United States Patent Application Publication US 2017/0114356 A1 - sequence listing, part 115

SEQ ID NO: 214489 - DNA, 3637 bp, Zea Mays
cagccgttctcctctcagccgtcgccgtcgctctcctctcctccacactgctctcctctctcctccgagccgcagctcttctctctccctctcccctgcgcgccgccactgcgggcatctacaccgctgccgctcctctcttctccgagccgcagctcttctctctccttctcccctgcgcgccgccgctgcgtggccctacacgccaccgctacgggtgccctacgcgccgccgtcactgctccagctctcctctgtttcccagccaatgccgccgctctaactccccaaggcatcgccccgacgacggctcaacgacgccccgtcgacgcctcgcggacgccctgcgccgcagcgggcgctttacgctccatggcaaggcgcgttagatgcctcaggttccacgcgcgccttagcccctaagcgacgctaaggcggcgcttcaaggacgccttgataagcatgattgggaggttatctatgcttatagcttttgctctggggtgaaaacatggattacgactttggtggcacctcacccgatccctatgggggtggaagcatccacctagtgtgtgatcattgcggtaccagtgacaactacaccactgacgacgctgatgatggccaattcacgtgccgtacatgctctgccgtgcacactacacaggcaactgctgctgatcctcatgacttccccgccactggcaacatctctgtccgtcgtgttgccacccagcccacccccaagcttggtgcccgcacacccgcgccttacctgaggacccctcaggctgctcccgtgcctgctactgccgcttttgatgacttcacagagctgagtgagccgcgggactttgtgtctggatctggcacgtgtggggagcctgaggatctggcagtgcaggtccgctggcgctatgtacggggtctccaggtgatcctgcagcggcagctggaggtgctggtggagcggcaccaggtaggcgcgtttgtgtgtgctgttgccggcattgtctgggtgcggtgggttgctgcatccagggtgtttgatggaatctgggcccgccaggtgcttgaggaccacaaggccgtggggagacagaagtgttatggtagcagatatgagctgtttttatgctttcccttgttaatcatttccatcggaagaactgaatggactctgacataaatctatctcttgttgcagatgacaagaaacctgatgagatgaagtatgaatgggatgatgatatgtcgctccaacgaaaagacaggcacaagctggagtttgcctttttgcgttcgttgaggatgatgctgccggtttactcaacattggctgtttgtttcttggcctgtcatattgcccgtgaagccatcttgccaagtgacatttacaggtgggcaatggaggggaatatcccatatgtggctgcttttactgaagtagacaggttccttgggagctctttccaagactgccctttggatgcaaggcagctgttcaggccggtgcgagttatcggagcatggcaactggaagctgcagctggatccatagcacaaagagtagccttgaggcttccttcagttaacttctatgcaattgctcaacgttgtttgaaggacttgttactgcctatagatagaatcctcccccacgcatgccaaatttatgagtgggcaatgcctgcagaattatggttgtctagtaatcctgctagagtcccaacacgggtttgtgtgatggctatcctaattgtggccctacgacttctttataacatcaacggtcaagggatatgggagaagatttgtgaggaaggaagaaacccaagtgaatctcactatgatgcaaattcatctacttccaggaagcttgaggctagtaacagtgaggagtttggcacaagagaactgttgtgtgctatttcagttgcctatgataaaatcaatacgtcacatgactactcgagtgatctccgctcttatctcaaatactgcaaggaagttgtttttgctggaattacatcttcagatgaacagactcatctaatagagatcttttgggatatgtacaaagccagggaggatgataatatagaagatcatgtaaaatcccagtcccattctatggcagacattccaattacaaatggagtgaggaaacactaccgagatggagcttttgttaaagcaagttccttttctgcatcttcaggtcatgatgcaatgcaaatgctcaagtcagagatgcaagatcatggatttcattatatgccacctaggaaaccaaggaaatcagatggttatcttcgttataggcggcggcggctaagtggtggctttatttttgttgcacatgctgattattacttgttgctacgtgcttttgcaaagcttgcagaaattgatattcgtatcatgcatattagtgtgttgaaacttgagaagagactcgcatgtattgaggagcgaattgaaagaagcttgaacaccttacataacttttctactggaacagtagatgagctaagatctgtatctgactgaagttcctagtgtagtctcatactctgctagcatggaataccccctccattccttctggaaaaaaacatgtggtgccattgcgtaactgtggttttgaagaatatacgtagcttgatacctcaggaattgagggcttctttctgtggcctcttggcattggtaagcaacctgagcacaaggacagggcaggatgtgggtctgtatttgctgaagcaatatgtaccaagaattatgccccccttctttagaacggacataattatatcagggtcctaatcagtactgtggtagattcagcaacagttccagtagtagacctcagtgcttggcagcaatggcactggggatctgcaatcatgaggcagtttcagtttgggaactggagtggcaagaggaaaaaggctggaacctgggctttttaaagaggctaatcagtactgtggtggattcagcaacagttccagtagtagacctcactgcgcggcagcaatggcactaagggatctgggttctgcaatcatgcggcagtttcagtttgggaactggagtggcaagaggaaaaagcatggaatttaggctttttaaagaaatgctatcagtattgtggtcgattcagcaacagttccagtagtggattcagcaacagttcaaggttagtacaattggtcttgtcaaagctgccgacagaactaaaaagatatccagcatagtgtaatgcatcttgatgtactgccgacatttatttcgttccagcttctgcagcaagagctgatcgtttcaaaggtgacgagaaattggtcgtactagagatgtactgtctattcgctgtatttgcaagtttaaaccaattattcgaactactgcagctgtaatccagagacaatataatatagaaaaaatagaagtcggtggttaaagccgtaacaaacatgctaacaaacatgctagtaggcttcaattgttaagggcttctttgtttcagcttttttgatgaacttttatgagaatctaactatggtgaaaatctgagtatcatgtgtattacatgcgtagaaagataaaagggtttataggatatttt

SEQ ID NO: 214490 - DNA, 2914 bp, Zea Mays
cagccgttctcctctcagccgtcgccgtcgctctcctctcctccacactgctctcctctctcctccgagccgcagctcttctctctccctctcccctgcgcgccgccactgcgggcatctacaccgctgccgctcctctcttctccgagccgcagctcttctctctccttctcccctgcgcgccgccgctgcgtggccctacacgccaccgctacgggtgccctacgcgccgccgtcactgctccagctctcctctgtttcccagccaatgccgccgctctaactccccaaggcatcgccccgacgacggctcaacgacgccccgtcgacgcctcgcggacgccctgcgccgcagcgggcgctttacgctccatggcaaggcgcgttagatgcctcaggttccacgcgcgccttagcccctaagcgacgctaaggcggcgcttcaaggacgccttgataagcatgattgggaggtgaaaacatggattacgactttggtggcacctcacccgatccctatgggggtggaagcatccacctagtgtgtgatcattgcggtaccagtgacaactacaccactgacgacgctgatgatggccaattcacgtgccgtacatgctctgccgtgcacactacacagatgacaagaaacctgatgagatgaagtatgaatgggatgatgatatgtcgctccaacgaaaagacaggcacaagctggagtttgcctttttgcgttcgttgaggatgatgctgccggtttactcaacattggctgtttgtttcttggcctgtcatattgcccgtgaagccatcttgccaagtgacatttacaggtgggcaatggaggggaatatcccatatgtggctgcttttactgaagtagacaggttccttgggagctctttccaagactgccctttggatgcaaggcagctgttcaggccggtgcgagttatcggagcatggcaactggaagctgcagctggatccatagcacaaagagtagccttgaggcttccttcagttaacttctatgcaattgctcaacgttgtttgaaggacttgttactgcctatagatagaatcctcccccacgcatgccaaatttatgagtgggcaatgcctgcagaattatggttgtctagtaatcctgctagagtcccaacacgggtttgtgtgatggctatcctaattgtggccctacgacttctttataacatcaacggtcaagggatatgggagaagatttgtgaggaaggaagaaacccaagtgaatctcactatgatgcaaattcatctacttccaggaagcttgaggctagtaacagtgaggagtttggcacaagagaactgttgtgtgctatttcagttgcctatgataaaatcaatacgtcacatgactactcgagtgatctccgctcttatctcaaatactgcaaggaagttgtttttgctggaattacatcttcagatgaacagactcatctaatagagatcttttgggatatgtacaaagccagggaggatgataatatagaagatcatgtaaaatcccagtcccattctatggcagacattccaattacaaatggagtgaggaaacactaccgagatggagcttttgttaaagcaagttccttttctgcatcttcaggtcatgatgcaatgcaaatgctcaagtcagagatgcaagatcatggatttcattatatgccacctaggaaaccaaggaaatcagatggttatcttcgttataggcggcggcggctaagtggtggctttatttttgttgcacatgctgattattacttgttgctacgtgcttttgcaaagcttgcagaaattgatattcgtatcatgcatattagaataccccctccattccttctggaaaaaaacatgtggtgccattgcgtaactgtggttttgaagaatatacgtagcttgatacctcaggaattgagggcttctttctgtggcctcttggcattggtaagcaacctgagcacaaggacagggcaggatgtgggtctgtatttgctgaagcaatatgtaccaagaattatgccccccttctttagaacggacataattatatcagggtcctaatcagtactgtggtagattcagcaacagttccagtagtagacctcagtgcttggcagcaatggcactggggatctgcaatcatgaggcagtttcagtttgggaactggagtggcaagaggaaaaaggctggaacctgggctttttaaagaggctaatcagtactgtggtggattcagcaacagttccagtagtagacctcactgcgcggcagcaatggcactaagggatctgggttctgcaatcatgcggcagtttcagtttgggaactggagtggcaagaggaaaaagcatggaatttaggctttttaaagaaatgctatcagtattgtggtcgattcagcaacagttccagtagtggattcagcaacagttcaaggttagtacaattggtcttgtcaaagctgccgacagaactaaaaagatatccagcatagtgtaatgcatcttgatgtactgccgacatttatttcgttccagcttctgcagcaagagctgatcgtttcaaaggtgacgagaaattggtcgtactagagatgtactgtctattcgctgtatttgcaagtttaaaccaattattcgaactactgcagctgtaatccagagacaatataatatagaaaaaatagaagtcggtggttaaagccgtaacaaacatgctaacaaacatgctagtaggcttcaattgttaagggcttctttgtttcagcttttttgatgaacttttatgagaatctaactatggtgaaaatctgagtatcatgtgtattacatgcgtagaaagataaaagggtttataggatatttt

SEQ ID NO: 214491 - DNA, 678 bp, Zea Mays
atggcgacaaaccagatgaatgcacaatgttgcaaacaaatcattttcgacattttgccacatctatcagtggtactctgtttgtttggatcagaggaagctcacgcagaggtcggagagggtgaattccatggatctgcatatgacatagccatgaacaatgccatatcagataaaagcagatggagcttccgtaggaggtctacaaggcaccgagttttgaagaactctgatatctcagaacctgagactcttagttccagcaaagcaaaggctgacattacaccgagcaacaatgtttatacttcaacatattcctatgcctcggagaagcctctgcaacaagacaagccagatgaagaaggtagtcctatactcatcatatgaagaagatggagtagagaaatctggagggggctcgtggagatcctgggccattatttgcagaccatagtgacagcttgttggaccacttgggcacttgggttaccaatggggagtaattccacaacatgagtctccaacaatgggtcatttaagtgatttaagattctggcattttatttttagctaccaggaagctgagaaggaatgatttcatccatgggatgagaagaatgatgggtgcctagcctcatcgagctctttcacgaacaatccatgtcatcgacgttggtc

SEQ ID NO: 214492 - DNA, 801 bp, Zea Mays
tctatcagtggtactctgtttgtttggatcagaggaagctcacgcagaggtcggagagggtgaattccatggatctgcatatgacatagccatgggaaaacaatggatggatagatcatcaaggtttaggtcttcagctctgaagcttgtaatcttattatattttgctatcttatatttttgtaggtggttaaaataaaagttatccgcaataggcaaacatgacagttagaggggcatctaagttgaactggtatcatatcgcatgggtgaaaagcgaacaatgccatatcagataaaagcagatggagcttccgtaggaggtctacaaggcaccgagttttgaagaactctgatatctcagaacctgagactcttagttccagcaaagcaaaggctgacattacaccgagcaacaatgtttatacttcaacatattcctatgcctcggagaagcctctgcaacaagacaagccagatgaagaaggtagtcctatactcatcatatgaagaagatggagtagagaaatctggagggggctcgtggagatcctgggccattatttgcagaccatagtgacagcttgttggaccacttgggcacttgggttaccaatggggagtaattccacaacatgagtctccaacaatgggtcatttaagtgatttaagattctggcattttatttttagctaccaggaagctgagaaggaatgatttcatccatgggatgagaagaatgatgggtgcctagcctcatcgagctctttcacgaacaatccatgtcatcgacgttggtc

SEQ ID NO: 214493 - DNA, 797 bp, Zea Mays
tctatcagtggtactctgtttgtttggatcagaggaagctcacgcagaggtcggagagggtgaattccatggatctgcatatgacatagccatggtggttaaaataaaagttatccgcaataggcaaacatgacagttagaggggtatggatttgttcagttcttttctcatgcattagcagaaaaggctcttcaagatttttatggtcatgtgatgccaaaccctgaccaggcatctaagttgaactggtatcatatcgcatgggtgaaaagcgaacaatgccatatcagataaaagcagatggagcttccgtaggaggtctacaaggcaccgagttttgaagaactctgatatctcagaacctgagactcttagttccagcaaagcaaaggctgacattacaccgagcaacaatgtttatacttcaacatattcctatgcctcggagaagcctctgcaacaagacaagccagatgaagaaggtagtcctatactcatcatatgaagaagatggagtagagaaatctggagggggctcgtggagatcctgggccattatttgcagaccatagtgacagcttgttggaccacttgggcacttgggttaccaatggggagtaattccacaacatgagtctccaacaatgggtcatttaagtgatttaagattctggcattttatttttagctaccaggaagctgagaaggaatgatttcatccatgggatgagaagaatgatgggtgcctagcctcatcgagctctttcacgaacaatccatgtcatcgacgttggtc

SEQ ID NO: 214494 - DNA, 3330 bp, Zea Mays
caagccttgcctattctgaaccaagaggatacctactcccaaacaatccatcttactcatgcaacttccatgcaaacacgcacatatgtttcctgaaccaatccattaaagatcacaacagctagcgttctcccgctagcttccctctctcctctgccgatctttttcgtccaccagcatggagaagaggaacctgcagtggcggcgagggcgtgatggcatcgtgcagtaccctcacctcttcttcgcggccctggcgctggccctcctagtcgcggacccgttcggcctcagtccgctggccgaggtcgactaccggccggtgaagcacgagctcgcgccgtacggggaggtcatgggcagctggcccagagacaatgccagccggctcaggcgcgggaggctggagttcgtcggcgaggtgttcgggccggagtctatcgagttcgatctccagggccgcgggccgtacgccggcctcgccgacggccgcgtcgtgcggtggatgggcgaggaggccgggtgggagacgttcgccgtcatgaatcctgactgaagaagtctgtgccaatggagtgaactcaacgacgaggaagcagcacgagaaggaggagttctgcggccggccgctcggcctgaggttccacggggagaccggcgagctctacgtcgccgacgcgtactacggtctcatggtcgttggccagagcggcggcgtggcgtcctccgtcgcgagggaagccgacggggaccccatccggttcgcgaacgacctcgatgtgcacaggaatggatccgtattcttcactgacacgagcatgagatacagcagaaaggaccatctgaacatcctgttagaaggagaaggcaccgggaggctgctcaggtatgatccagaaacaagcggtgtccatgtcgtgctcaaggggctggtgttcccaaacggcgtgcagatctcagaggaccatcagtttcttctcttctccgagacaacaaactgcaggataatgaggtactggctggaaggcccaagagcgggcgaggtagaggtgttcgcgaacctgccgggcttccccgacaacgtgcgctccaacggcaggggccagttctgggtggcgatcgactgctgccggacgccggcgcaggaggtgttcgccaagaggccgtggctccggaccctgtacttcaagttcccgctgtcgctcaaggtgctcacttggaaggccgccaggaggatgcacacggtgctcgcgctcctcgacggcgaagggcgcgtcgtggaggtgctcgaggaccggggccacgaggtgatgaagctggtgagcgaggtgcgggaggtgggccgcaagctgtggatcggaaccgtggcgcacaaccacatcgccaccatcccctaccctttagaggactaaccatgatctatgctgtttcaatgcctcctaatctgtgtacgtctataaatgtctaatgcagtcactggttgtaatcttgtttgtgtttggcaaattggcataataatggacagattcaatgggcattggtgctgtagtcgcatcacactaattgaatgggatcatgttgagctctcactttgctacaatttgctccagcttgtacggttgtaccctcttgctcgtctatagtaagggccatctaaaaaaaactcaaattagatctgcaatacaagtatgattgggccgaatttggattgtcacgggtccgcgaccgcgaattgggctcggtttgatttagccgacatagtagtgaccgacccgagccggcggcgagccaaaccgagcggacgccgccatggatcgcgagtggggctccaagcccggcagcggcggcgccgcctccgcgcagaatgaggccatcgaccggcgggagcgcctccgccgcctggccctcgagaccatcgacctcgccaaggacccctatttcatgcgcaaccacctcggcagctacgagtgcaagctgtgcctgacgctgcacaacaatgaggggaactacctggcccacacgcaggggaagcggcaccagaccaacctcgccaagcgcgccgcccgcgaggccaaggacgcacccgcgcagcctcagcccaacaagcgcaagcttgccccccgcaagtctgttaagattggcagacctgggtataaagtaaccaaacaatatgatcctgagatgaagcaacactcgtttctttttgaaattggttacccggaaatcgaagataattgcaagccaaggcaccgtttcatgtcatcatatgaacagaaagtccaaagttgggataagggttatcagtacctactttttgctgcagagccctatgaaattattgcattcaagataccaagtacagagattgataaatcagcgaacaaattcttctcttactgggatcctgacaagaaggaatatctactgcaactgtacttcaagccaagaccgccagaagctaataaaccaccaccagctcctccggggactttgcctaatgggactggggttcctggtgctccaacaaggccaccggcgcaagcccctccacccctgccacaagttccaccgcccccgcctcatgcacctcctcctgcacccatgggaatgccccctaggattcctccaccccctatgggtggtgttcaacctccgccgcctcctccaccgccagttgcaaatggtccgcggccaatgattccaccgccacctaacttcactcctggagcacccccaccacgccctccaatgcatggttttcctgggcaacaacagcagtagttaagtgcttagcaatgttccagtaattgacagtcggcaaaagtttcacgcttgcttgtgttgccttatgttttccaactcaaaactttgaatgttatcataggcttacatggtctctagactatactcagatttggtcgaccgatttggtcaaattgcaagaaattgagttacatcaaaatccaaggtacaaaggaagacaacaattaaaaccatcaaaatggtgaaagtgcaatggagtcagtacttgtttgaagaagccacatggtaagtggaagtcacgataggaagcaatatccatatctcttcgactcaagataactagaagccattgttttgtagcaaagtttagtttgggttcaaagggatagctaggagggaacgaaaattgctaatttctctcgattttgattttcaatgcataacacctattttggttaatctcagggcacattttttccccaaaggggaggttggtcatgaccctatcatgatagtcatttccatactcatcatgagaattatatgcatttgaatctcaatttgttt

SEQ ID NO: 214495 - DNA, 3279 bp, Zea Mays
tgcctattctgaaccaagaggatacctactcccaaacaatccatcttactcatgcaacttccatgcaaacacgcacatatgtttcctgaaccaatccattaaagatcacaacagctagcgttctcccgctagcttccctctctcctctgccgatctttttcgtccaccagcatggagaagaggaacctgcagtggcggcgagggcgtgatggcatcgtgcagtaccctcacctcttcttcgcggccctggcgctggccctcctagtcgcggacccgttcggcctcagtccgctggccgaggtcgactaccggccggtgaagcacgagctcgcgccgtacggggaggtcatgggcagctggcccagagacaatgccagccggctcaggcgcgggaggctggagttcgtcggcgaggtgttcgggccggagtctatcgagttcgatctccagggccgcgggccgtacgccggcctcgccgacggccgcgtcgtgcggtggatgggcgaggaggccgggtgggagacgttcgccgtcatgaatcctgactggtcagaagaagtctgtgccaatggagtgaactcaacgacgaggaagcagcacgagaaggaggagttctgcggccggccgctcggcctgaggttccacggggagaccggcgagctctacgtcgccgacgcgtactacggtctcatggtcgttggccagagcggcggcgtggcgtcctccgtcgcgagggaagccgacggggaccccatccggttcgcgaacgacctcgatgtgcacaggaatggatccgtattcttcactgacacgagcatgagatacagcagaaaggaccatctgaacatcctgttagaaggagaaggcaccgggaggctgctcaggtatgatccagaaacaagcggtgtccatgtcgtgctcaaggggctggtgttcccaaacggcgtgcagatctcagaggaccatcagtttcttctcttctccgagacaacaaactgcaggataatgaggtactggctggaaggcccaagagcgggcgaggtagaggtgttcgcgaacctgccgggcttccccgacaacgtgcgctccaacggcaggggccagttctgggtggcgatcgactgctgccggacgccggcgcaggaggtgttcgccaagaggccgtggctccggaccctgtacttcaagttcccgctgtcgctcaaggtgctcacttggaaggccgccaggaggatgcacacggtgctcgcgctcctcgacggcgaagggcgcgtcgtggaggtgctcgaggaccggggccacgaggtgatgaagctggtgagcgaggtgcgggaggtgggccgcaagctgtggatcggaaccgtggcgcacaaccacatcgccaccatcccctaccctttagaggactaaccatgatctatgctgtttcaatgcctcctaatctgtgtacgtctataaatgtctaatgcagtcactggttgtaatcttgtttgtgtttggcaaattggcataataatggacagattcaatgggcattggtgctgtagtcgcatcacactaattgaatgggatcatgttgagctctcactttgctacaatttgctccagcttgtacggttgtaccctcttgctcgtctatagtaagggccatctaaaaaaaactcaaattagatctgcaatacaagtatgattgggccgaatttggattgtcacgggtccgcgaccgcgaattgggctcggtttgatttagccgacatagtagtgaccgacccgagccggcggcgagccaaaccgagcggacgccgccatggatcgcgagtggggctccaagcccggcagcggcggcgccgcctccgcgcagaatgaggccatcgaccggcgggagcgcctccgccgcctggccctcgagaccatcgacctcgccaaggacccctatttcatgcgcaaccacctcggcagctacgagtgcaagctgtgcctgacgctgcacaacaatgaggggaactacctggcccacacgcaggggaagcggcaccagaccaacctcgccaagcgcgccgcccgcgaggccaaggacgcacccgcgcagcctcagcccaacaagcgcaagcttgccccccgcaagtctgttaagattggcagacctgggtataaagtaaccaaacaatatgatcctgagatgaagcaacactcgtttctttttgaaattggttacccggaaatcgaagataattgcaagccaaggcaccgtttcatgtcatcatatgaacagagccctatgaaattattgcattcaagataccaagtacagagattgataaatcagcgaacaaattcttctcttactgggatcctgacaagaaggaatatctactgcaactgtacttcaagccaagaccgccagaagctaataaaccaccaccagctcctccggggactttgcctaatgggactggggttcctggtgctccaacaaggccaccggcgcaagcccctccacccctgccacaagttccaccgcccccgcctcatgcacctcctcctgcacccatgggaatgccccctaggattcctccaccccctatgggtggtgttcaacctccgccgcctcctccaccgccagttgcaaatggtccgcggccaatgattccaccgccacctaacttcactcctggagcacccccaccacgccctccaatgcatggttttcctgggcaacaacagcagtagttaagtgcttagcaatgttccagtaattgacagtcggcaaaagtttcacgcttgcttgtgttgccttatgttttccaactcaaaactttgaatgttatcataggcttacatggtctctagactatactcagatttggtcgaccgatttggtcaaattgcaagaaattgagttacatcaaaatccaaggtacaaaggaagacaacaattaaaaccatcaaaatggtgaaagtgcaatggagtcagtacttgtttgaagaagccacatggtaagtggaagtcacgataggaagcaatatccatatctcttcgactcaagataactagaagccattgttttgtagcaaagtttagtttgggttcaaagggatagctaggagggaacgaaaattgctaatttctctcgattttgattttcaatgcataacacctattttggttaatctcagggcacattttttccccaaaggggaggttggtcatgaccctatcatgatagtcatttccatactcatcatgagaattatatgcatttgaatctcaatttgttt

SEQ ID NO: 214496 - DNA, 3312 bp, Zea Mays
atggccgatcttgttgttggcttggccaagacagtggtggagggggccctgaccaaggctcagtcagcgattgaggaggagacaaaactgcagcaaagcgtgcagcacaaccttgtgttcatcgctggcgagtttgagatgatgcactccttcctcaatgttgccaatgaggagcgtgtcaagaacaacgttgtgaggacatgggtgaggcagcgccaaatgctgccaccttgcttggcagcatcagcattgcccataaaagaggcagtcactgagatagagcagctcaaggttagggttgaggacgtgagccgaaggaactcacgctacagcctcatcagcgactctggatccaagcccatcatgcagcaacagacggcacccaaaactatttttggcacaatggtgcttgacatgatggttgaggcgagggacaccgcaaaaaggcagcaaggtttaggagatctcacccagctactaacaaaggaacaagctgacctgggggtaatctcagtgtggggaacaggcagtgaactcggtacaacatccatcatcagaaaggcctaccaggacccagaactctgtcaaaaatttgaatgtcgtggctgggtgaagcttacacaacctttcaatcctcatgagtttctccgcagtatggtcgcccagttctacgcaaacagttgcctgcaaaatggaatggttataaatgtcgatgaactgaagaggattgaggaaatggcgacaacgggaggcggactcattggggcatttatggataaagtaaatgagaacagatacctaatcgtcctggaaaatctgtccacaattggagattgggacaccatcggaacttacctgccagacaggaagaatggcagtcgggtcattgtatccacacagcagtgtgaaattgcaagcttgtgcattgggcattcataccaagtagcagaggtgaagcagtactcagcagagcactctgtatgtgtcttcttcgaggaggtacataggcaaaaaccatcatctcctataaaggactccatagatgaagagctacaagaacttattttgaagtgtggtggtcttccaaaagttatagttgccgtagctaactttttggcacctaaaacagtctcatggatggacagtgcaagttctatgaatctcaaatttatgcaagagctggagagcagcccagagtttgcttgcctgcagccactctttggttggctgcactcctactttcgaacatgcccggattttctcaagccatgtatcttctatctgtcaatttttcctcgagatcacagtatccggagaaggcgattggtgagacggtggattgcagagggctatgccagggacacggacaaaatttctgcagaggaaagaggggagcagttcttctgcaggctcctcgatctgagcataataatgcagaaaccatattcagtcaccaccggattcagagacagcagaatgactttgtgtcaagtcaacagttttgtccgagagtatatcatctctcgtcaaatggaagagaaccttgtatttgaactgggaggcagttgcaccctaacctctcagcgcatggggcgtcacctcatcatactgaaaagctgggacagagacagaattgtgtttgagagcattgacttctcaaggctacgatctttgacagtgtttggagaatggaagccattcttcatatctgataggatgaggttgcttcgggttctggatcttgaggatgcatctgatttaaaagatgaagacctcaaacaaatgatgaagctgctttgtcgcctcaagtatctttccctacgaggatgcactgggatctatagcctgccgaattcattaggttgcttgaggcagcttgagactctggatgtcagacatacagccatagcaaccatgccaaggactatcaccaagctaaagaagttgcagtacctccgcgctagtaccaccaaaccaactaaggaacaaccaacacccgatactgctgttacacccaaaccaacaaagaaacaaccaaatccacacacctcggtatcatggacgtcatccttgttccacagacatcgacaactagagggtgttgtggttcctactgggctagagaaattgactgcattgctcaccatcggtgttgttaatgtcaattctgctcgggggaggtccatcttgaaagaggtcaggaagctcacccaattgcgcaagcttggagtgtctggaataagtaggaacaacagcaaagatttctgtttggccatctcaagtcgtgcgcatttagactccttatcagttaagctcaagaaggacaatcaggactgcttgtgtgtcaccccagatggctaccttccccccaagaacctacagagctttaaattgtatggccttgcagacagttttccaaaatggatcaatcaacttgaaaatctcaggaagttagttttggagatgactatattaacgcaagatactatcaagggactcaaggatcttaaagtatgtattctgcgtctaattaccaagcagcttcctgatggtaagctcaatttttgtgtcatgttgcatgggcagcaattacgttgctatgaaacagtgaagatactcgagatctcttgcagctccagcttagatgtggcttttggatcacaatcactgcaaaatcttgagctgctgaaagtttcctgctgtagtggttcagggtcggtaatgaagctctctgggctagaaaaactgtctgaatctgaactcaaggaagtccagattaagggttccgatgatttcatagtaaaaacagatgtggaggaacaacttgccaggcacccaaagaaacctgttttgaaggttgaaaaggtactgtcgtccactggggattttgagctctagagtgtcagtttcctatcgttacgatatcaaggattagtgactggtgctgtttgcttcctcttatttcttcagtgctattcgatccaatctaaccgattagaaagatcagttatgcagccatcgtgccaataataaactgtgaaacctgaaagcttccttcttggccacatattgatcagtctatttttcttgtgcctgtggtttatttattcctactgcatagtcccagtctggatttgttctaaaagatatggatggtgtgcaaatgtgtttatgtatatagagaatgttggaccagtgaattgctattgtacttttctgttgctctcatgtattgtagtttcgtggtgtatcttgctacatccatgttctcttgtggttgtttgtgtgtacatttgttttgaatggtttttg

SEQ ID NO: 214497 - DNA, 4211 bp, Zea Mays
cctcgttctccttgatttcccttcctcatatcagtgtgcagtggacaaattaatcaatacggcccacctaaataacaaggtgtagatgataaagttatgagcatcagggccgatccatttatctatgaggggcatactttacatgagctacaggtgctcaggcaattcctagctagctattaccactaaggagagaatcagagactgaaaaagcaatggccgatcttgttgttggcttggccaagacagtggtggagggggccctgaccaaggctcagtcagcgattgaggaggagacaaaactgcagcaaagcgtgcagcacaaccttgtgttcatcgctggcgagtttgagatgatgcactccttcctcaatgttgccaatgaggagcgtgtcaagaacaacgttgtgaggacatgggtgaggcagcgccaaatgctgccaccttgcttggcagcatcagcattgcccataaaagaggcagtcactgagatagagcagctcaaggttagggttgaggacgtgagccgaaggaactcacgctacagcctcatcagcgactctggatccaagcccatcatgcagcaacagacggcacccaaaactatttttggcacaatggtgcttgacatgatggttgaggcgagggacaccgcaaaaaggcagcaaggtttaggagatctcacccagctactaacaaaggaacaagctgacctgggggtaatctcagtgtggggaacaggcagtgaactcggtacaacatccatcatcagaaaggcctaccaggacccagaactctgtcaaaaatttgaatgtcgtggctgggtgaagcttacacaacctttcaatcctcatgagtttctccgcagtatggtcgcccagttctacgcaaacagttgcctgcaaaatggaatggttataaatgtcgatgaactgaagaggattgaggaaatggcgacaacgggaggcggactcattggggcatttatggataaagtaaatgagaacagatacctaatcgtcctggaaaatctgtccacaattggagattgggacaccatcggaacttacctgccagacaggaagaatggcagtcgggtcattgtatccacacagcagtgtgaaattgcaagcttgtgcattgggcattcataccaagtagcagaggtgaagcagtactcagcagagcactctgtatgtgtcttcttcgaggagggattgcaaggtaatggtgataaaagcatggaatctgatagagtagtagacaacaacaatgaaatgtcaatgcaggatgaaataacccacggtactggctttctgtccgacagaattccaacatctaaacggaaggatgcctctgattgggtgaagaattttcaacttgttgaacgcaagtcagaaatgaaccaactcggtaactatattgctaaggcacgtgtctatggtttgcaaatactgtctgtgtgggggatagctggtgttgggaaatcagccctcgttaggaacatgtactttgacagaattcatcgaaatgaccaattatttgagaagtacggttgggttgatgtaacccacccattcaatttaagggacttctcccggagtttgcttttggatttccattcagaacctgttcaagccatgggaatcaaagaccctactcaagagtgtcataagattctagaagataaccggtgccttgttgttattgatgatttgcagtccattgaagaatgggacttaatacaagctgccttggtgtctagaccttctagaagtattatcattgtcattacaactgaagcaagtatcgccacatattgtgcagataatgaaggggtcgtatttaatgtcaaaggtctagaagacaaagcagccctcaagcttttcaaaaagcaggtacataggcaaaaaccatcatctcctataaaggactccatagatgaagagctacaagaacttattttgaagtgtggtggtcttccaaaagttatagttgccgtagctaactttttggcacctaaaacagtctcatggatggacagtgcaagttctatgaatctcaaatttatgcaagagctggagagcagcccagagtttgcttgcctgcagccactctttggttggctgcactcctactttcgaacatgcccggattttctcaagccatgtatcttctatctgtcaatttttcctcgagatcacagtatccggagaaggcgattggtgagacggtggattgcagagggctatgccagggacacggacaaaatttctgcagaggaaagaggggagcagttcttctgcaggctcctcgatctgagcataataatgcagaaaccatattcagtcaccaccggattcagagacagcagaatgactttgtgtcaagtcaacagttttgtccgagagtatatcatctctcgtcaaatggaagagaaccttgtatttgaactgggaggcagttgcaccctaacctctcagcgcatggggcgtcacctcatcatactgaaaagctgggacagagacagaattgtgtttgagagcattgacttctcaaggctacgatctttgacagtgtttggagaatggaagccattcttcatatctgataggatgaggttgcttcgggttctggatcttgaggatgcatctgatttaaaagatgaagacctcaaacaaatgatgaagctgctttgtcgcctcaagtatctttccctacgaggatgcactgggatctatagcctgccgaattcattaggttgcttgaggcagcttgagactctggatgtcagacatacagccatagcaaccatgccaaggactatcaccaagctaaagaagttgcagtacctccgcgctagtaccaccaaaccaactaaggaacaaccaacacccgatactgctgttacacccaaaccaacaaagaaacaaccaaatccacacacctcggtatcatggacgtcatccttgttccacagacatcgacaactagagggtgttgtggttcctactgggctagagaaattgactgcattgctcaccatcggtgttgttaatgtcaattctgctcgggggaggtccatcttgaaagaggtcaggaagctcacccaattgcgcaagcttggagtgtctggaataagtaggaacaacagcaaagatttctgtttggccatctcaagtcgtgcgcatttagactccttatcagttaagctcaagaaggacaatcaggactgcttgtgtgtcaccccagatggctaccttccccccaagaacctacagagctttaaattgtatggccttgcagacagttttccaaaatggatcaatcaacttgaaaatctcaggaagttagttttggagatgactatattaacgcaagatactatcaagggactcaaggatcttaaagtatgtattctgcgtctaattaccaagcagcttcctgatggtaagctcaatttttgtgtcatgttgcatgggcagcaattacgttgctatgaaacagtgaagatactcgagatctcttgcagctccagcttagatgtggcttttggatcacaatcactgcaaaatcttgagctgctgaaagtttcctgctgtagtggttcagggtcggtaatgaagctctctgggctagaaaaactgtctgaatctgaactcaaggaagtccagattaagggttccgatgatttcatagtaaaaacagatgtggaggaacaacttgccaggcacccaaagaaacctgttttgaaggttgaaaaggtactgtcgtccactggggattttgagctctagagtgtcagtttcctatcgttacgatatcaaggattagtgactggtgctgtttgcttcctcttatttcttcagtgctattcgatccaatctaaccgattagaaagatcagttatgcagccatcgtgccaataataaactgtgaaacctgaaagcttccttcttggccacatattgatcagtctatttttcttgtgcctgtggtttatttattcctactgcatagtcccagtctggatttgttctaaaagatatggatggtgtgcaaatgtgtttatgtatatagagaatgttggaccagtgaattgctattgtacttttctgttgctctcatgtattgtagtttcgtggtgtatcttgctacatccatgttctcttgtggttgtttgtgtgtacatttgttttgaatggtttttg

SEQ ID NO: 214498 - DNA, 3920 bp, Zea Mays
ggcaaaatcacctccgaggcacggcgttgcgtccacctgccgtgtacgcattcccggcgcggctccgttgcgttccagtcagtgcggcgacgccgccaacgtctcacatggcttgtcggatctcaaggtgtagatgataaagttatgagcatcagggccgatccatttatctatgaggggcatactttacatgagctacaggtgctcaggcaattcctagctagctattaccactaaggagagaatcagagactgaaaaagcaatggccgatcttgttgttggcttggccaagacagtggtggagggggccctgaccaaggctcagtcagcgattgaggaggagacaaaactgcagcaaagcgtgcagcacaaccttgtgttcatcgctggcgagtttgagatgatgcactccttcctcaatgttgccaatgaggagcgtgtcaagaacaacgttgtgaggacatgggtgaggcaggtccgtgatctggcatatgatgtggaggactgcatagagtttgtcacccacctggacaaaaagtcaagctggtagcgccaaatgctgccaccttgcttggcagcatcagcattgcccataaaagaggcagtcactgagatagagcagctcaaggttagggttgaggacgtgagccgaaggaactcacgctacagcctcatcagcgactctggatccaagcccatcatgcagcaacagacggcacccaaaactatttttggcacaatggtgcttgacatgatggttgaggcgagggacaccgcaaaaaggcagcaaggtttaggagatctcacccagctactaacaaaggaacaagctgacctgggggtaatctcagtgtggggaacaggcagtgaactcggtacaacatccatcatcagaaaggcctaccaggacccagaactctgtcaaaaatttgaatgtcgtggctgggtgaagcttacacaacctttcaatcctcatgagtttctccgcagtatggtcgcccagttctacgcaaacagttgcctgcaaaatggaatggttataaatgtcgatgaactgaagaggattgaggaaatggcgacaacgggaggcggactcattggggcatttatggataaagtaaatgagaacagatacctaatcgtcctggaaaatctgtccacaattggagattgggacaccatcggaacttacctgccagacaggaagaatggcagtcgggtcattgtatccacacagcagtgtgaaattgcaagcttgtgcattgggcattcataccaagtagcagaggtgaagcagtactcagcagagcactctgtatgtgtcttcttcgaggagggattgcaaggtaatggtgataaaagcatggaatctgatagagtagtagacaacaacaatgaaatgtcaatgcaggatgaaataacccacggtactggctttctgtccgacagaattccaacatctaaacggaaggatgcctctgattgggtgaagaattttcaacttgttgaacgcaagtcagaaatgaaccaactcgataatgaaggggtcgtatttaatgtcaaaggtctagaagacaaagcagccctcaagcttttcaaaaagcaggtacataggcaaaaaccatcatctcctataaaggactccatagatgaagagctacaagaacttattttgaagtgtggtggtcttccaaaagttatagttgccgtagctaactttttggcacctaaaacagtctcatggatggacagtgcaagttctatgaatctcaaatttatgcaagagctggagagcagcccagagtttgcttgcctgcagccactctttggttggctgcactcctactttcgaacatgcccggattttctcaagccatgtatcttctatctgtcaatttttcctcgagatcacagtatccggagaaggcgattggtgagacggtggattgcagagggctatgccagggacacggacaaaatttctgcagaggaaagaggggagcagttcttctgcaggctcctcgatctgagcataataatgcagaaaccatattcagtcaccaccggattcagagacagcagaatgactttgtgtcaagtcaacagttttgtccgagagtatatcatctctcgtcaaatggaagagaaccttgtatttgaactgggaggcagttgcaccctaacctctcagcgcatggggcgtcacctcatcatactgaaaagctgggacagagacagaattgtgtttgagagcattgacttctcaaggctacgatctttgacagtgtttggagaatggaagccattcttcatatctgataggatgaggttgcttcgggttctggatcttgaggatgcatctgatttaaaagatgaagacctcaaacaaatgatgaagctgctttgtcgcctcaagtatctttccctacgaggatgcactgggatctatagcctgccgaattcattaggttgcttgaggcagcttgagactctggatgtcagacatacagccatagcaaccatgccaaggactatcaccaagctaaagaagttgcagtacctccgcgctagtaccaccaaaccaactaaggaacaaccaacacccgatactgctgttacacccaaaccaacaaagaaacaaccaaatccacacacctcggtatcatggacgtcatccttgttccacagacatcgacaactagagggtgttgtggttcctactgggctagagaaattgactgcattgctcaccatcggtgttgttaatgtcaattctgctcgggggaggtccatcttgaaagaggtcaggaagctcacccaattgcgcaagcttggagtgtctggaataagtaggaacaacagcaaagatttctgtttggccatctcaagtcgtgcgcatttagactccttatcagttaagctcaagaaggacaatcaggactgcttgtgtgtcaccccagatggctaccttccccccaagaacctacagagctttaaattgtatggccttgcagacagttttccaaaatggatcaatcaacttgaaaatctcaggaagttagttttggagatgactatattaacgcaagatactatcaagggactcaaggatcttaaagtatgtattctgcgtctaattaccaagcagcttcctgatggtaagctcaatttttgtgtcatgttgcatgggcagcaattacgttgctatgaaacagtgaagatactcgagatctcttgcagctccagcttagatgtggcttttggatcacaatcactgcaaaatcttgagctgctgaaagtttcctgctgtagtggttcagggtcggtaatgaagctctctgggctagaaaaactgtctgaatctgaactcaaggaagtccagattaagggttccgatgatttcatagtaaaaacagatgtggaggaacaacttgccaggcacccaaagaaacctgttttgaaggttgaaaaggtactgtcgtccactggggattttgagctctagagtgtcagtttcctatcgttacgatatcaaggattagtgactggtgctgtttgcttcctcttatttcttcagtgctattcgatccaatctaaccgattagaaagatcagttatgcagccatcgtgccaataataaactgtgaaacctgaaagcttccttcttggccacatattgatcagtctatttttcttgtgcctgtggtttatttattcctactgcatagtcccagtctggatttgttctaaaagatatggatggtgtgcaaatgtgtttatgtatatagagaatgttggaccagtgaattgctattgtacttttctgttgctctcatgtattgtagtttcgtggtgtatcttgctacatccatgttctcttgtggttgtttgtgtgtacatttgttttgaatggtttttg

SEQ ID NO: 214499 - DNA, 4277 bp, Zea Mays
cttgtccactgtgcggcatccttcctggcaaaatcacctccgaggcacggcgttgcgtccacctgccgtgtacgcattcccggcgcggctccgttgcgttccagtcagtgcggcgacgccgccaacgtctcacatggcttgtcggatctcaaggtgtagatgataaagttatgagcatcagggccgatccatttatctatgaggggcatactttacatgagctacaggcaattcctagctagctattaccactaaggagagaatcagagactgaaaaagcaatggccgatcttgttgttggcttggccaagacagtggtggagggggccctgaccaaggctcagtcagcgattgaggaggagacaaaactgcagcaaagcgtgcagcacaaccttgtgttcatcgctggcgagtttgagatgatgcactccttcctcaatgttgccaatgaggagcgtgtcaagaacaacgttgtgaggacatgggtgaggcagcgccaaatgctgccaccttgcttggcagcatcagcattgcccataaaagaggcagtcactgagatagagcagctcaaggttagggttgaggacgtgagccgaaggaactcacgctacagcctcatcagcgactctggatccaagcccatcatgcagcaacagacggcacccaaaactatttttggcacaatggtgcttgacatgatggttgaggcgagggacaccgcaaaaaggcagcaaggtttaggagatctcacccagctactaacaaaggaacaagctgacctgggggtaatctcagtgtggggaacaggcagtgaactcggtacaacatccatcatcagaaaggcctaccaggacccagaactctgtcaaaaatttgaatgtcgtggctgggtgaagcttacacaacctttcaatcctcatgagtttctccgcagtatggtcgcccagttctacgcaaacagttgcctgcaaaatggaatggttataaatgtcgatgaactgaagaggattgaggaaatggcgacaacgggaggcggactcattggggcatttatggataaagtaaatgagaacagatacctaatcgtcctggaaaatctgtccacaattggagattgggacaccatcggaacttacctgccagacaggaagaatggcagtcgggtcattgtatccacacagcagtgtgaaattgcaagcttgtgcattgggcattcataccaagtagcagaggtgaagcagtactcagcagagcactctgtatgtgtcttcttcgaggagggattgcaaggtaatggtgataaaagcatggaatctgatagagtagtagacaacaacaatgaaatgtcaatgcaggatgaaataacccacggtactggctttctgtccgacagaattccaacatctaaacggaaggatgcctctgattgggtgaagaattttcaacttgttgaacgcaagtcagaaatgaaccaactcggtaactatattgctaaggcacgtgtctatggtttgcaaatactgtctgtgtgggggatagctggtgttgggaaatcagccctcgttaggaacatgtactttgacagaattcatcgaaatgaccaattatttgagaagtacggttgggttgatgtaacccacccattcaatttaagggacttctcccggagtttgcttttggatttccattcagaacctgttcaagccatgggaatcaaagaccctactcaagagtgtcataagattctagaagataaccggtgccttgttgttattgatgatttgcagtccattgaagaatgggacttaatacaagctgccttggtgtctagaccttctagaagtattatcattgtcattacaactgaagcaagtatcgccacatattgtgcagataatgaaggggtcgtatttaatgtcaaaggtctagaagacaaagcagccctcaagcttttcaaaaagcaggtacataggcaaaaaccatcatctcctataaaggactccatagatgaagagctacaagaacttattttgaagtgtggtggtcttccaaaagttatagttgccgtagctaactttttggcacctaaaacagtctcatggatggacagtgcaagttctatgaatctcaaatttatgcaagagctggagagcagcccagagtttgcttgcctgcagccactctttggttggctgcactcctactttcgaacatgcccggattttctcaagccatgtatcttctatctgtcaatttttcctcgagatcacagtatccggagaaggcgattggtgagacggtggattgcagagggctatgccagggacacggacaaaatttctgcagaggaaagaggggagcagttcttctgcaggctcctcgatctgagcataataatgcagaaaccatattcagtcaccaccggattcagagacagcagaatgactttgtgtcaagtcaacagttttgtccgagagtatatcatctctcgtcaaatggaagagaaccttgtatttgaactgggaggcagttgcaccctaacctctcagcgcatggggcgtcacctcatcatactgaaaagctgggacagagacagaattgtgtttgagagcattgacttctcaaggctacgatctttgacagtgtttggagaatggaagccattcttcatatctgataggatgaggttgcttcgggttctggatcttgaggatgcatctgatttaaaagatgaagacctcaaacaaatgatgaagctgctttgtcgcctcaagtatctttccctacgaggatgcactgggatctatagcctgccgaattcattaggttgcttgaggcagcttgagactctggatgtcagacatacagccatagcaaccatgccaaggactatcaccaagctaaagaagttgcagtacctccgcgctagtaccaccaaaccaactaaggaacaaccaacacccgatactgctgttacacccaaaccaacaaagaaacaaccaaatccacacacctcggtatcatggacgtcatccttgttccacagacatcgacaactagagggtgttgtggttcctactgggctagagaaattgactgcattgctcaccatcggtgttgttaatgtcaattctgctcgggggaggtccatcttgaaagaggtcaggaagctcacccaattgcgcaagcttggagtgtctggaataagtaggaacaacagcaaagatttctgtttggccatctcaagtcgtgcgcatttagactccttatcagttaagctcaagaaggacaatcaggactgcttgtgtgtcaccccagatggctaccttccccccaagaacctacagagctttaaattgtatggccttgcagacagttttccaaaatggatcaatcaacttgaaaatctcaggaagttagttttggagatgactatattaacgcaagatactatcaagggactcaaggatcttaaagtatgtattctgcgtctaattaccaagcagcttcctgatggtaagctcaatttttgtgtcatgttgcatgggcagcaattacgttgctatgaaacagtgaagatactcgagatctcttgcagctccagcttagatgtggcttttggatcacaatcactgcaaaatcttgagctgctgaaagtttcctgctgtagtggttcagggtcggtaatgaagctctctgggctagaaaaactgtctgaatctgaactcaaggaagtccagattaagggttccgatgatttcatagtaaaaacagatgtggaggaacaacttgccaggcacccaaagaaacctgttttgaaggttgaaaaggtactgtcgtccactggggattttgagctctagagtgtcagtttcctatcgttacgatatcaaggattagtgactggtgctgtttgcttcctcttatttcttcagtgctattcgatccaatctaaccgattagaaagatcagttatgcagccatcgtgccaataataaactgtgaaacctgaaagcttccttcttggccacatattgatcagtctatttttcttgtgcctgtggtttatttattcctactgcatagtcccagtctggatttgttctaaaagatatggatggtgtgcaaatgtgtttatgtatatagagaatgttggaccagtgaattgctattgtacttttctgttgctctcatgtattgtagtttcgtggtgtatcttgctacatccatgttctcttgtggttgtttgtgtgtacatttgttttgaatggtttttg

SEQ ID NO: 214500 - DNA, 3291 bp, Zea Mays
gtcgtctccctcccgtgtcttgtccactgtgcggcatccttcctggcaaaatcacctccgaggcacggcgttgcgtccacctgccgtgtacgcattcccggcgcggctccgttgcgttccagtcagtgcggcgacgccgccaacgtctcacatggcttgtcggatctcaagggattgcaaggtaatggtgataaaagcatggaatctgatagagtagtagacaacaacaatgaaatgtcaatgcaggatgaaataacccacggtactggctttctgtccgacagaattccaacatctaaacggaaggatgcctctgattgggtgaagaattttcaacttgttgaacgcaagtcagaaatgaaccaactcggtaactatattgctaaggcacgtgtctatggtttgcaaatactgtctgtgtgggggatagctggtgttgggaaatcagccctcgttaggaacatgtactttgacagaattcatcgaaatgaccaattatttgagaagtacggttgggttgatgtaacccacccattcaatttaagggacttctcccggagtttgcttttggatttccattcagaacctgttcaagccatgggaatcaaagaccctactcaagagtgtcataagattctagaagataaccggtgccttgttgttattgatgatttgcagtccattgaagaatgggacttaatacaagctgccttggtgtctagaccttctagaagtattatcattgtcattacaactgaagcaagtatcgccacatattgtgcagataatgaaggggtcgtatttaatgtcaaaggtctagaagacaaagcagccctcaagcttttcaaaaagcagccatggggcatatttggcattggaatccacaactcgtacaagaagagtggctggctctcaccatttctccaatttaccggaaatctcaaatttataactaagttgcatggtaaattatgcatggtacataggcaaaaaccatcatctcctataaaggactccatagatgaagagctacaagaacttattttgaagtgtggtggtcttccaaaagttatagttgccgtagctaactttttggcacctaaaacagtctcatggatggacagtgcaagttctatgaatctcaaatttatgcaagagctggagagcagcccagagtttgcttgcctgcagccactctttggttggctgcactcctactttcgaacatgcccggattttctcaagccatgtatcttctatctgtcaatttttcctcgagatcacagtatccggagaaggcgattggtgagacggtggattgcagagggctatgccagggacacggacaaaatttctgcagaggaaagaggggagcagttcttctgcaggctcctcgatctgagcataataatgcagaaaccatattcagtcaccaccggattcagagacagcagaatgactttgtgtcaagtcaacagttttgtccgagagtatatcatctctcgtcaaatggaagagaaccttgtatttgaactgggaggcagttgcaccctaacctctcagcgcatggggcgtcacctcatcatactgaaaagctgggacagagacagaattgtgtttgagagcattgacttctcaaggctacgatctttgacagtgtttggagaatggaagccattcttcatatctgataggatgaggttgcttcgggttctggatcttgaggatgcatctgatttaaaagatgaagacctcaaacaaatgatgaagctgctttgtcgcctcaagtatctttccctacgaggatgcactgggatctatagcctgccgaattcattaggttgcttgaggcagcttgagactctggatgtcagacatacagccatagcaaccatgccaaggactatcaccaagctaaagaagttgcagtacctccgcgctagtaccaccaaaccaactaaggaacaaccaacacccgatactgctgttacacccaaaccaacaaagaaacaaccaaatccacacacctcggtatcatggacgtcatccttgttccacagacatcgacaactagagggtgttgtggttcctactgggctagagaaattgactgcattgctcaccatcggtgttgttaatgtcaattctgctcgggggaggtccatcttgaaagaggtcaggaagctcacccaattgcgcaagcttggagtgtctggaataagtaggaacaacagcaaagatttctgtttggccatctcaagtcgtgcgcatttagactccttatcagttaagctcaagaaggacaatcaggactgcttgtgtgtcaccccagatggctaccttccccccaagaacctacagagctttaaattgtatggccttgcagacagttttccaaaatggatcaatcaacttgaaaatctcaggaagttagttttggagatgactatattaacgcaagatactatcaagggactcaaggatcttaaagtatgtattctgcgtctaattaccaagcagcttcctgatggtaagctcaatttttgtgtcatgttgcatgggcagcaattacgttgctatgaaacagtgaagatactcgagatctcttgcagctccagcttagatgtggcttttggatcacaatcactgcaaaatcttgagctgctgaaagtttcctgctgtagtggttcagggtcggtaatgaagctctctgggctagaaaaactgtctgaatctgaactcaaggaagtccagattaagggttccgatgatttcatagtaaaaacagatgtggaggaacaacttgccaggcacccaaagaaacctgttttgaaggttgaaaaggtactgtcgtccactggggattttgagctctagagtgtcagtttcctatcgttacgatatcaaggattagtgactggtgctgtttgcttcctcttatttcttcagtgctattcgatccaatctaaccgattagaaagatcagttatgcagccatcgtgccaataataaactgtgaaacctgaaagcttccttcttggccacatattgatcagtctatttttcttgtgcctgtggtttatttattcctactgcatagtcccagtctggatttgttctaaaagatatggatggtgtgcaaatgtgtttatgtatatagagaatgttggaccagtgaattgctattgtacttttctgttgctctcatgtattgtagtttcgtggtgtatcttgctacatccatgttctcttgtggttgtttgtgtgtacatttgttttgaatggtttttg

SEQ ID NO: 214501 - DNA, 4092 bp, Zea Mays
gtcaagtcgtctccctcccgtgtcttgtccactgtgcggcatccttcctggcaaaatcacctccgaggcacggcgttgcgtccacctgccgtgtacgcattcccggcgcggctccgttgcgttccagtcagtgcggcgacgccgccaacgtctcacatggcttgtcggatctcaaggtgtagatgataaagttatgagcatcagggccgatccatttatctatgaggggcatactttacatgagctacaggtgctcaggcaattcctagctagctattaccactaaggagagaatcagagactgaaaaagcaatggccgatcttgttgttggcttggccaagacagtggtggagggggccctgaccaaggctcagtcagcgattgaggaggagacaaaactgcagcaaagcgtgcagcacaaccttgtgttcatcgctggcgagtttgagatgatgcactccttcctcaatgttgccaatgaggagcgtgtcaagaacaacgttgtgaggacatgggtgaggcaggtccgtgatctggcatatgatgtggaggactgcatagagtttgtcacccacctggacaaaaagtcaagctggtagcgccaaatgctgccaccttgcttggcagcatcagcattgcccataaaagaggcagtcactgagatagagcagctcaaggttagggttgaggacgtgagccgaaggaactcacgctacagcctcatcagcgactctggatccaagcccatcatgcagcaacagacggcacccaaaactatttttggcacaatggtgcttgacatgatggttgaggcgagggacaccgcaaaaaggcagcaaggtttaggagatctcacccagctactaacaaaggaacaagctgacctgggggtaatctcagtgtggggaacaggcagtgaactcggtacaacatccatcatcagaaaggcctaccaggacccagaactctgtcaaaaatttgaatgtcgtggctgggtgaagcttacacaacctttcaatcctcatgagtttctccgcagtatggtcgcccagttctacgcaaacagttgcctgcaaaatggaatggttataaatgtcgatgaactgaagaggattgaggaaatggcgacaacgggaggcggactcattggggcatttatggataaagtaaatgagaacagatacctaatcgtcctggaaaatctgtccacaattggagattgggacaccatcggaacttacctgccagacaggaagaatggcagtcgggtcattgtatccacacagcagtgtgaaattgcaagcttgtgcattgggcattcataccaagtagcagaggtgaagcagtactcagcagagcactctgtatgtgtcttcttcgaggagggattgcaaggtaatggtgataaaagcatggaatctgatagagtagtagacaacaacaatgaaatgtcaatgcaggatgaaataacccacggtactggctttctgtccgacagaattccaacatctaaacggaaggatgcctctgattgggtgaagaattttcaacttgttgaacgcaagtcagaaatgaaccaactcggtaactatattgctaagtccattgaagaatgggacttaatacaagctgccttggtgtctagaccttctagaagtattatcattgtcattacaactgaagcaagtatcgccacatattgtgcagataatgaaggggtcgtatttaatgtcaaaggtctagaagacaaagcagccctcaagcttttcaaaaagcaggtacataggcaaaaaccatcatctcctataaaggactccatagatgaagagctacaagaacttattttgaagtgtggtggtcttccaaaagttatagttgccgtagctaactttttggcacctaaaacagtctcatggatggacagtgcaagttctatgaatctcaaatttatgcaagagctggagagcagcccagagtttgcttgcctgcagccactctttggttggctgcactcctactttcgaacatgcccggattttctcaagccatgtatcttctatctgtcaatttttcctcgagatcacagtatccggagaaggcgattggtgagacggtggattgcagagggctatgccagggacacggacaaaatttctgcagaggaaagaggggagcagttcttctgcaggctcctcgatctgagcataataatgcagaaaccatattcagtcaccaccggattcagagacagcagaatgactttgtgtcaagtcaacagttttgtccgagagtatatcatctctcgtcaaatggaagagaaccttgtatttgaactgggaggcagttgcaccctaacctctcagcgcatggggcgtcacctcatcatactgaaaagctgggacagagacagaattgtgtttgagagcattgacttctcaaggctacgatctttgacagtgtttggagaatggaagccattcttcatatctgataggatgaggttgcttcgggttctggatcttgaggatgcatctgatttaaaagatgaagacctcaaacaaatgatgaagctgctttgtcgcctcaagtatctttccctacgaggatgcactgggatctatagcctgccgaattcattaggttgcttgaggcagcttgagactctggatgtcagacatacagccatagcaaccatgccaaggactatcaccaagctaaagaagttgcagtacctccgcgctagtaccaccaaaccaactaaggaacaaccaacacccgatactgctgttacacccaaaccaacaaagaaacaaccaaatccacacacctcggtatcatggacgtcatccttgttccacagacatcgacaactagagggtgttgtggttcctactgggctagagaaattgactgcattgctcaccatcggtgttgttaatgtcaattctgctcgggggaggtccatcttgaaagaggtcaggaagctcacccaattgcgcaagcttggagtgtctggaataagtaggaacaacagcaaagatttctgtttggccatctcaagtcgtgcgcatttagactccttatcagttaagctcaagaaggacaatcaggactgcttgtgtgtcaccccagatggctaccttccccccaagaacctacagagctttaaattgtatggccttgcagacagttttccaaaatggatcaatcaacttgaaaatctcaggaagttagttttggagatgactatattaacgcaagatactatcaagggactcaaggatcttaaagtatgtattctgcgtctaattaccaagcagcttcctgatggtaagctcaatttttgtgtcatgttgcatgggcagcaattacgttgctatgaaacagtgaagatactcgagatctcttgcagctccagcttagatgtggcttttggatcacaatcactgcaaaatcttgagctgctgaaagtttcctgctgtagtggttcagggtcggtaatgaagctctctgggctagaaaaactgtctgaatctgaactcaaggaagtccagattaagggttccgatgatttcatagtaaaaacagatgtggaggaacaacttgccaggcacccaaagaaacctgttttgaaggttgaaaaggtactgtcgtccactggggattttgagctctagagtgtcagtttcctatcgttacgatatcaaggattagtgactggtgctgtttgcttcctcttatttcttcagtgctattcgatccaatctaaccgattagaaagatcagttatgcagccatcgtgccaataataaactgtgaaacctgaaagcttccttcttggccacatattgatcagtctatttttcttgtgcctgtggtttatttattcctactgcatagtcccagtctggatttgttctaaaagatatggatggtgtgcaaatgtgtttatgtatatagagaatgttggaccagtgaattgctattgtacttttctgttgctctcatgtattgtagtttcgtggtgtatcttgctacatccatgttctcttgtggttgtttgtgtgtacatttgttttgaatggtttttg

SEQ ID NO: 214502 - DNA, 4349 bp, Zea Mays
cctcactcgtcgatcgacgcgttcatgccattgacccgtgagtcaagtcgtctccctcccgtgtcttgtccactgtgcggcatccttcctggcaaaatcacctccgaggcacggcgttgcgtccacctgccgtgtacgcattcccggcgcggctccgttgcgttccagtcagtgcggcgacgccgccaacgtctcacatggcttgtcggatctcaaggtgtagatgataaagttatgagcatcagggccgatccatttatctatgaggggcatactttacatgagctacaggtgctcaggcaattcctagctagctattaccactaaggagagaatcagagactgaaaaagcaatggccgatcttgttgttggcttggccaagacagtggtggagggggccctgaccaaggctcagtcagcgattgaggaggagacaaaactgcagcaaagcgtgcagcacaaccttgtgttcatcgctggcgagtttgagatgatgcactccttcctcaatgttgccaatgaggagcgtgtcaagaacaacgttgtgaggacatgggtgaggcagcgccaaatgctgccaccttgcttggcagcatcagcattgcccataaaagaggcagtcactgagatagagcagctcaaggttagggttgaggacgtgagccgaaggaactcacgctacagcctcatcagcgactctggatccaagcccatcatgcagcaacagacggcacccaaaactatttttggcacaatggtgcttgacatgatggttgaggcgagggacaccgcaaaaaggcagcaaggtttaggagatctcacccagctactaacaaaggaacaagctgacctgggggtaatctcagtgtggggaacaggcagtgaactcggtacaacatccatcatcagaaaggcctaccaggacccagaactctgtcaaaaatttgaatgtcgtggctgggtgaagcttacacaacctttcaatcctcatgagtttctccgcagtatggtcgcccagttctacgcaaacagttgcctgcaaaatggaatggttataaatgtcgatgaactgaagaggattgaggaaatggcgacaacgggaggcggactcattggggcatttatggataaagtaaatgagaacagatacctaatcgtcctggaaaatctgtccacaattggagattgggacaccatcggaacttacctgccagacaggaagaatggcagtcgggtcattgtatccacacagcagtgtgaaattgcaagcttgtgcattgggcattcataccaagtagcagaggtgaagcagtactcagcagagcactctgtatgtgtcttcttcgaggagggattgcaaggtaatggtgataaaagcatggaatctgatagagtagtagacaacaacaatgaaatgtcaatgcaggatgaaataacccacggtactggctttctgtccgacagaattccaacatctaaacggaaggatgcctctgattgggtgaagaattttcaacttgttgaacgcaagtcagaaatgaaccaactcggtaactatattgctaaggcacgtgtctatggtttgcaaatactgtctgtgtgggggatagctggtgttgggaaatcagccctcgttaggaacatgtactttgacagaattcatcgaaatgaccaattatttgagaagtacggttgggttgatgtaacccacccattcaatttaagggacttctcccggagtttgcttttggatttccattcagaacctgttcaagccatgggaatcaaagaccctactcaagagtgtcataagattctagaagataaccggtgccttgttgttattgatgatttgcagtccattgaagaatgggacttaatacaagctgccttggtgtctagaccttctagaagtattatcattgtcattacaactgaagcaagtatcgccacatattgtgcagataatgaaggggtcgtatttaatgtcaaaggtctagaagacaaagcagccctcaagcttttcaaaaagcaggtacataggcaaaaaccatcatctcctataaaggactccatagatgaagagctacaagaacttattttgaagtgtggtggtcttccaaaagttatagttgccgtagctaactttttggcacctaaaacagtctcatggatggacagtgcaagttctatgaatctcaaatttatgcaagagctggagagcagcccagagtttgcttgcctgcagccactctttggttggctgcactcctactttcgaacatgcccggattttctcaagccatgtatcttctatctgtcaatttttcctcgagatcacagtatccggagaaggcgattggtgagacggtggattgcagagggctatgccagggacacggacaaaatttctgcagaggaaagaggggagcagttcttctgcaggctcctcgatctgagcataataatgcagaaaccatattcagtcaccaccggattcagagacagcagaatgactttgtgtcaagtcaacagttttgtccgagagtatatcatctctcgtcaaatggaagagaaccttgtatttgaactgggaggcagttgcaccctaacctctcagcgcatggggcgtcacctcatcatactgaaaagctgggacagagacagaattgtgtttgagagcattgacttctcaaggctacgatctttgacagtgtttggagaatggaagccattcttcatatctgataggatgaggttgcttcgggttctggatcttgaggatgcatctgatttaaaagatgaagacctcaaacaaatgatgaagctgctttgtcgcctcaagtatctttccctacgaggatgcactgggatctatagcctgccgaattcattaggttgcttgaggcagcttgagactctggatgtcagacatacagccatagcaaccatgccaaggactatcaccaagctaaagaagttgcagtacctccgcgctagtaccaccaaaccaactaaggaacaaccaacacccgatactgctgttacacccaaaccaacaaagaaacaaccaaatccacacacctcggtatcatggacgtcatccttgttccacagacatcgacaactagagggtgttgtggttcctactgggctagagaaattgactgcattgctcaccatcggtgttgttaatgtcaattctgctcgggggaggtccatcttgaaagaggtcaggaagctcacccaattgcgcaagcttggagtgtctggaataagtaggaacaacagcaaagatttctgtttggccatctcaagtcgtgcgcatttagactccttatcagttaagctcaagaaggacaatcaggactgcttgtgtgtcaccccagatggctaccttccccccaagaacctacagagctttaaattgtatggccttgcagacagttttccaaaatggatcaatcaacttgaaaatctcaggaagttagttttggagatgactatattaacgcaagatactatcaagggactcaaggatcttaaagtatgtattctgcgtctaattaccaagcagcttcctgatggtaagctcaatttttgtgtcatgttgcatgggcagcaattacgttgctatgaaacagtgaagatactcgagatctcttgcagctccagcttagatgtggcttttggatcacaatcactgcaaaatcttgagctgctgaaagtttcctgctgtagtggttcagggtcggtaatgaagctctctgggctagaaaaactgtctgaatctgaactcaaggaagtccagattaagggttccgatgatttcatagtaaaaacagatgtggaggaacaacttgccaggcacccaaagaaacctgttttgaaggttgaaaaggtactgtcgtccactggggattttgagctctagagtgtcagtttcctatcgttacgatatcaaggattagtgactggtgctgtttgcttcctcttatttcttcagtgctattcgatccaatctaaccgattagaaagatcagttatgcagccatcgtgccaataataaactgtgaaacctgaaagcttccttcttggccacatattgatcagtctatttttcttgtgcctgtggtttatttattcctactgcatagtcccagtctggatttgttctaaaagatatggatggtgtgcaaatgtgtttatgtatatagagaatgttggaccagtgaattgctattgtacttttctgttgctctcatgtattgtagtttcgtggtgtatcttgctacatccatgttctcttgtggttgtttgtgtgtacatttgttttgaatggtttttg

SEQ ID NO: 214503 - DNA, 3403 bp, Zea Mays
gcaaccttggcgtgcgtgccagtacgctttccgaactccaccgaacgatcctgtttggtccatcgtcaccttcctcttccttcttcggttcttcgccagccgtgcgcgcttctccactgccctggagacaaaggagcaccccgcgatctcccggcgggacccggccccacctccccgcccgcgtgcctctgaaacggagaagctgccggttcccagccggccaggctactccgactcttcctttccctccagccggcgaggcgtccaagcggattagcggagagcgtcggggcggcgacatgtgggtgttctacctgatatcgctgcctctgacgctgggcatggtcgtcgtcacgctccgctacttcgccggccctgccgtgccgcgctacgttgtcgccaccgtaggatacgcatggttctgctccctctccatcatcatcctcgtccccgccgacatctggcagggctgtagttcctactatccagggctatgaagacgcaggagatttcactgttaaagaaaggctgaaaactagcattcatatgaacctgcttttttattcaattgtgggagccattggccttattggtgtcatattactcttaatcatgcatagagcttgggatggtggtattgtgggatttgcaatggcatgctcaaatacctttggattggtgactggtgcttttcttcttggttttgggttaagcgaaattccaagaaacatttggaaaaatgcatactggtctcaccgccaaaaagtactttctcatagagttgccaaaatggctgtaaagcttgataatgcccatcaagaatattcaaatgcaattgttgttgctcaagctacatcaaatcaaatgtcaaaacgtgacattttgaggccttacatggatattattgataacatgctgtctcaaatgctgcgggaggatccatccttcaaaccttctggtggtagattcggtgaaaatgatatggactatgatacagatgataaatcgatggccacacttcgacgccaactcaggagggcccatgaggagtactataggggcaaaagtgagtatatgacttgtgtcatggaagccctcaaactagaagacaccataaaaaattatgaacgccgtgatgctagcggatggaaatatgtatcaagttttagagacagacgttcgggcacacttggaccaattttggatactattgagttcatttggcaatgtatactgagaaagcagcttcaaaaagcatttgctgttatccttggttgcatgtcagctgctatcttgttggctgaagctactttacttccaagtgttgatctatctctcttttctattcttataaaagttgtaggaaaacaagaggttttagttcaggttgctgcttttgtacccttgatgtatatgttcatttgcacatattattcattattcaagattggtatgttgatgttctattccctgactccaagacaaaccagctctgtcagcttgcttatgatctgttcgtgagttttaatgcttcattttttatggttgacatgtttctattccaaagccacttgactcattgtagtcatgcaccaaatttggtttgcagaatggttgcaagatatgcacctcctatctcttataactttctgaatctcatccgccttggtggcaatgctaaaactacatttgagaagagaatggggaacattgatgatgcagttcctttctttggcagaggcttcaacaagatctacccactgattatggttgtttatacgctattggttgctagtaatttctttggccgtgtgattgactttttgggaagctggaaaaggttcaagttacaacaggaagaagagaatatagatggtttagatccctctggaatgattattgtacaaaaagagagatcttggatcgaacaagggtgcaaagtgggtgagcatgttattccattggcaaggaatttcaatggcgtgaacacagatattgaatcacaaaatgtgccattggttggaaacacagtggagatgaaagtaggggcagcttcttccagaaatgatgggagagctggccagttgaaatatgcaaacagcagggagactatcgccagcaaatacacttctattagggaacagaaccggcagtcagggaaggcagtgaaaaaggaaatttcatcaaactctgtatctttgcttgaagaaagaagttctgagcagtggtccaatactggtataccaccaactggtgtgtctgcaacatgggcctcgatgaagataggttttcaaaatttcaaagccaatttgggttcgaagaagtttcttcctttgcgccaggatccaggatttgttctaaatttgagtgtctcttcacctgaatctcttgatgacatattccaaaggttgaaacgacggcctgcaaatgtgcttgtggattaccttgatgacgatgacaacaacaacacacgagatatggatgtgcatttccaggatcaatgaaataggttgtgatattcttttaggttcagaatatgcatgcacagaaaaactaaaaggattggtatagcattagacgctcaaagaagatatagaggatgtatagatctgatgatggtttggtgtgattcctggaatctcaagacgcctgccatctgaaaaaacttcaaaatggaagtaagatatgatgacaagctgactgcctttgcagaaaggcttgagatttccccaccaagaaggtttgggacttctacttcactatatggggaaaatatcctatgcaatcacttatcctggtgcaaacatgcaatcaagcgatctgatgcatctgatctagatctaattatgactgttattttatatttaaccccttccacctaaaacatagtacctattttacttttaactccttccatgaaaccgttggatctagattggatgctctcgatagtttgattgcacgcttgtaccaaaatgagtgattgcacaggatatgtcctccactatatgcaggtaacattgttgacttgttgattatcttaccttttttgaatctgtattggagatgctgatctgtgatcgaagccaaaggatgtaaatgtgtacctaggattccatgtgaaggttaacgtgcctgagttgtaacctgtaaaaacgtactatcaaatatatacctaatcgggacaaaaaccccaagtgtttctgtgtagcagacgtcagacctgtatttgacggcaacttgtggacacttcttgtctactgcctgacataaaaaatgcacatttgtacttcattaactggttctttttttagggtgcacgtgttacagttggaataggcacgattaagggtacagcacgaattagtgaaaaccactgcgatcgggcatgaacataaataca

SEQ ID NO: 214504 - DNA, 3713 bp, Zea Mays
cggagatgcaaccttggcgtgcgtgccagtacgctttccgaactccaccgaacgatcctgtttggtccatcgtcaccttcctcttccttcttcggttcttcgccagccgtgcgcgcttctccactgccctggagacaaaggagcaccccgcgatctcccggcgggacccggccccacctccccgcccgcgtgcctctgaaacggagaagctgccggttcccagccggccaggctactccgactcttcctttccctccagccggcgaggcgtccaagcggattagcggagagcgtcggggcggcgacatgtgggtgttctacctgatatcgctgcctctgacgctgggcatggtcgtcgtcacgctccgctacttcgccggccctgccgtgccgcgctacgttgtcgccaccgtaggatacgcatggttctgctccctctccatcatcatcctcgtccccgccgacatctggcagacattaactgccagtgcgaaggggggcattggattcttttggagctggtcctattggagcacatttatcctaacatgggctgtagttcctactatccagggctatgaagacgcaggagatttcactgttaaagaaaggctgaaaactagcattcatatgaacctgcttttttattcaattgtgggagccattggccttattggtgtcatattactcttaatcatgcatagagcttgggatggtggtattgtgggatttgcaatggcatgctcaaatacctttggattggtgactggtgcttttcttcttggttttgggttaagcgaaattccaagaaacatttggaaaaatgcatactggtctcaccgccaaaaagtactttctcatagagttgccaaaatggctgtaaagcttgataatgcccatcaagaatattcaaatgcaattgttgttgctcaagctacatcaaatcaaatgtcaaaacgtgacattttgaggccttacatggatattattgataacatgctgtctcaaatgctgcgggaggatccatccttcaaaccttctggtggtagattcggtgaaaatgatatggactatgatacagatgataaatcgatggccacacttcgacgccaactcaggagggcccatgaggagtactataggggcaaaagtgagtatatgacttgtgtcatggaagccctcaaactagaagacaccataaaaaattatgaacgccgtgatgctagcggatggaaatatgtatcaagttttagagacagacgttcgggcacacttggaccaattttggatactattgagttcatttggcaatgtatactgagaaagcagcttcaaaaagcatttgctgttatccttggttgcatgtcagctgctatcttgttggctgaagctactttacttccaagtgttgatctatctctcttttctattcttataaaagttgtaggaaaacaagaggttttagttcaggttgctgcttttgtacccttgatgtatatgttcatttgcacatattattcattattcaagattggtatgttgatgttctattccctgactccaagacaaaccagctctgtcagcttgcttatgatctgttcgtgagttttaatgcttcattttttatggttgacatgtttctattccaaagccacttgactcattgtagtcatgcaccaaatttggtttgcagaatggttgcaagatatgcacctcctatctcttataactttctgaatctcatccgccttggtggcaatgctaaaactacatttgagaagagaatggggaacattgatgatgcagttcctttctttggcagaggcttcaacaagatctacccactgattatggttgtttatacgctattggttgctagtaatttctttggccgtgtgattgactttttgggaagctggaaaaggttcaagttacaacaggaagaagagaatatagatggtttagatccctctggaatgattattgtacaaaaagagagatcttggatcgaacaagggtgcaaagtgggtgagcatgttattccattggcaaggaatttcaatggcgtgaacacagatattgaatcacaaaatgtgccattgtcctgtgtcgactaggtgcgcgaaccatgtcaacatactctgaaaactgaattggatcagcacatcagttaaactaagggggcctttgagaagaggtttatttggtctttttgtccaagagagatcttggatggaacaagggtgcaatgtgggcgagcatgttatcccattggcaaggaatttcaatggcgtgaacacagatattgaatcacaaaatgtgccattggttggaaacacagtggagatgaaagtaggggcagcttcttccagaaatgatgggagagctggccagttgaaatatgcaaacagcagggagactatcgccagcaaatacacttctattagggaacagaaccggcagtcagggaaggcagtgaaaaaggaaatttcatcaaactctgtatctttgcttgaagaaagaagttctgagcagtggtccaatactggtataccaccaactggtgtgtctgcaacatgggcctcgatgaagataggttttcaaaatttcaaagccaatttgggttcgaagaagtttcttcctttgcgccaggatccaggatttgttctaaatttgagtgtctcttcacctgaatctcttgatgacatattccaaaggttgaaacgacggcctgcaaatgtgcttgtggattaccttgatgacgatgacaacaacaacacacgagatatggatgtgcatttccaggatcaatgaaataggttgtgatattcttttaggttcagaatatgcatgcacagaaaaactaaaaggattggtatagcattagacgctcaaagaagatatagaggatgtatagatctgatgatggtttggtgtgattcctggaatctcaagacgcctgccatctgaaaaaacttcaaaatggaagtaagatatgatgacaagctgactgcctttgcagaaaggcttgagatttccccaccaagaaggtttgggacttctacttcactatatggggaaaatatcctatgcaatcacttatcctggtgcaaacatgcaatcaagcgatctgatgcatctgatctagatctaattatgactgttattttatatttaaccccttccacctaaaacatagtacctattttacttttaactccttccatgaaaccgttggatctagattggatgctctcgatagtttgattgcacgcttgtaccaaaatgagtgattgcacaggatatgtcctccactatatgcaggtaacattgttgacttgttgattatcttaccttttttgaatctgtattggagatgctgatctgtgatcgaagccaaaggatgtaaatgtgtacctaggattccatgtgaaggttaacgtgcctgagttgtaacctgtaaaaacgtactatcaaatatatacctaatcgggacaaaaaccccaagtgtttctgtgtagcagacgtcagacctgtatttgacggcaacttgtggacacttcttgtctactgcctgacataaaaaatgcacatttgtacttcattaactggttctttttttagggtgcacgtgttacagttggaataggcacgattaagggtacagcacgaattagtgaaaaccactgcgatcgggcatgaacataaataca

SEQ ID NO: 214505 - DNA, 2129 bp, Zea Mays
ccgaacgatcctgtttggtccatcgtcaccttcctcttccttcttcggttcttcgccagccgtgcgcgcttctccactgccctggagacaaaggagcaccccgcgatctcccggcgggacccggccccacctccccgcccgcgtgcctctgaaacggagaagctgccggttcccagccggccaggctactccgactcttcctttccctccagccggcgaggcgtccaagcggattagcggagagcgtcggggcggcgacatgtgggtgttctacctgatatcgctgcctctgacgctgggcatggtcgtcgtcacgctccgctacttcgccggccctgccgtgccgcgctacgttgtcgccaccgtaggatacgcatggttctgctccctctccatcatcatcctcgtccccgccgacatctggcagacattaactgccagtgcgaaggggggcattggattcttttggagctggtcctattggagcacatttatcctaacatgggctgtagttcctactatccagggctatgaagacgcaggagatttcactgttaaagaaaggctgaaaactagcattcatatgaacctgcttttttattcaattgtgggagccattggccttattggtgtcatattactcttaatcatgcatagagcttgggatggtggtattgtgggatttgcaatggcatgctcaaatacctttggattggtgactggtgcttttcttcttggttttgggttaagcgaaattccaagaaacatttggaaaaatgcatactggtctcaccgccaaaaagtactttctcatagagttgccaaaatggctgtaaagcttgataatgcccatcaagaatattcaaatgcaattgttgttgctcaagctacatcaaatcaaatgtcaaaacgtgacattttgaggccttacatggatattattgataacatgctgtctcaaatgctgcgggaggatccatccttcaaaccttctggtggtagattcggtgaaaatgatatggactatgatacagatgataaatcgatggccacacttcgacgccaactcaggagggcccatgaggagtactataggggcaaaagtgagtatatgacttgtgtcatggaagccctcaaactagaagacaccataaaaaattatgaacgccgtgatgctagcggatggaaatatgtatcaagttttagagacagacgttcgggcacacttggaccaattttggatactattgagttcatttggcaatgtatactgagaaagcagcttcaaaaagcatttgctgttatccttggttgcatgtcagctgctatcttgttggctgaagctactttacttccaagtgttgatctatctctcttttctattcttataaaagttgtaggaaaacaagaggttttagttcaggttgctgcttttgtacccttgatgtatatgttcatttgcacatattattcattattcaagattggtatgttgatgttctattccctgactccaagacaaaccagctctgtcagcttgcttatgatctgttcaatggttgcaagatatgcacctcctatctcttataactttctgaatctcatccgccttggtggcaatgctaaaactacatttgagaagagaatggggaacattgatgatgcagttcctttctttggcagaggcttcaacaagatctacccactgattatggttgtttatacgctattggttgctagtaatttctttggccgtgtgattgactttttgggaagctggaaaaggttcaagttacaacaggaagaagagaatatagatggtttagatccctctggaatgattattgtacaaaaagagagatcttggatcgaacaagggtgcaaagtgggtgagcatgttattccattggcaaggaatttcaatggcgtgaacacagatattgaatcacaaaatgtgccattgagaatttctgaaaattgcatgcatgatcttttttacccactggttatggaaggtccaaatgataacccttgcccttgccccaaaatcctgtcctgtgtcgactaggtgcgcgaaccatgtcaacatactctgaaaactgaattggatcagcacatcagttaaacta

SEQ ID NO: 214506 - DNA, 2526 bp, Zea Mays
tttggaaatacgattgactgcaggttatcttctattcgatatggcactgcacggtctggttcttgttcctgagcagttgagctgcgcacaccgacttcttttgcacaaggtacagcagcgcaggcgcggcggcagcccgccgctggatctctcccgaggctccggcgatggagcggtcctgctacttcccgctgcggtgggagagcacgggcgaccagtggtggtacgcgtcgccgatagactgggcggcggccgacggccactacgacatcgtccgccagctgctgcacctcgaccccaacctgctcatcaagctcacctccctccgccggatccgccgcctcgaggcgctgtgggacgacgacgcccgcttcgccgacgcggcccggaaccgcgcgtccgtcgcccgcagcctgctgctggagtgcgagtgcaggaaccaccgccccggcgccggggagaacacgctgctccgggccgggtacggcggctgggtgctctacgcggcggcgtcggccggggacgccgcgttcgtgcgggagctgctggagagggacccgctgctcgtgttcggcgagggcgagtacggcgtcacggacatgttctacgcggcggccaggggcgggagcgcggacgtgttcaggctgctgctcgaccacgccatgtcgccgaggtgctcgacgagttgccggaacggcgaagccagcgccaggcgcagctccgtgttccggcttgagatgatgagccgggccgtccacgccgcggcgaggggcgggagcgtggagatgctcagggagctgctcgacgagtccagcgtgtcgacgtatctcgacatccgtggatccaccgtgctgcatgccgccgctgggagagggcagctgcaggttgtcaagtaccttgtggcctctttcgacataatcaattcgactgataatcacgggaacacagcgctgcatgtagcggcctaccgagggcaccaacctgtcgtggaagccttggttgctgcgtctccatcaaccttgtcagttgtcaacaacgccggtgacacgtttctccactcggcagttacaggattcaggaccccaggattccgacggctcgaccgccagttggagctgatgaggtacctcatacgcgagagaaccgcggatatccagaagatcatcaacctgagaaacgacgcgggccttacagctcttcacctggctgtggttggctgcgcacacccggatctcgtcgagctactgatggccaccccgtccatcgacctgaacgctgaagacgctaatggcatgaccgcgctggcgctgctgaagcagcagctgcgctcagcgacgtccgaccggctcatcaagcagatcgtctctgccggaggggtcttgaactccagcatcctgagaacccggtcagccatcgcttctcagatcaagatgcagggcgggatcgcgagcagccccggcaccactttcaaggtatcggatgcggagatattcctgttctccggcatgggagcggcggagtctctgaggccaagctcctgctccagcaacgggaaggatgatgaccctactcacgcagacgcagactgcgccgagaaccgtggatcgtcggagaagaggctgagctccgcgagccgggccaaagaccgcctcaagatgatgctgagatggcctcgccacaaggacaagacgcccaagaagtcagaggacagcagcccgctggggtcgatcagcaggctgaacgagcacggggccgagacccctgctccgctgaggcagaagtttaccaagacgacggcgctcaacggcaagcggaccctagcggtgaagagctccaccccgagctcctcatccaccaagaagaagctcaacacgaagctcatccacggcatcatggaggccatgccacagctggcgccatctacggcgcggtccgcgtccccgacggacactttcctgaggtcctcggtatcgtccacgccgcagccgctggcgaagctgaaggacatctgcctcgacgacgagatctccatggtgacgccgcccgccggcaggctgaaggatagtgacgacgccatggaggacccctcgtgctccaacaactcgtccatggacgacggctgtggcgccgggacggcagagagcgcggcccggaagcacgggtgcggcaacgggaggctcatcaacatctgctttggcgcgcagggcctcaccgtggaggactcggcgagcgggcagcagacgagcaagatgttcaagcagcagtgcctcagggtgtcctgattgacggcgtggtgtctcgactacaacagcgtggtgtgattggtttggtgtctcgcgtgcagctatgtgtgcttgtttgctttgctccttgcacagccagcggtgaactggtgatccaatgaacttgtgcttgtgttaactgtgacgttgacgaatccacagctctttaacttcctcagtgtcaggtcgtgcattcttcaaacaaatcaccgttgatcaatcacttcctcgaattttattttac

SEQ ID NO: 214507 - DNA, 2770 bp, Zea Mays
cactgatacagattcatcatgcaggcaggcagggactccccccgctcgatcactgtctgttccgctctcttttttccagataggaccactgggctgcagctggagctggactggacggcggcactgcacggtctggttcttgttcctgagcagttgagctgcgcacaccgacttcttttgcacaagtctgcagtttacaaatgctttgagtcctgcgctcctgtcctgctgttcttgtctagcagtaaacaagtcatttcctttgttgtcacatggtggctcgccgagtgctggtgcacacattctctcctcgttccaccttgctgctgctgctgcagttcttggcacggccttgtattcagcgcaggcgcggcggcagcccgccgctggatctctcccgaggctccggcgatggagcggtcctgctacttcccgctgcggtgggagagcacgggcgaccagtggtggtacgcgtcgccgatagactgggcggcggccgacggccactacgacatcgtccgccagctgctgcacctcgaccccaacctgctcatcaagctcacctccctccgccggatccgccgcctcgaggcgctgtgggacgacgacgcccgcttcgccgacgcggcccggaaccgcgcgtccgtcgcccgcagcctgctgctggagtgcgagtgcaggaaccaccgccccggcgccggggagaacacgctgctccgggccgggtacggcggctgggtgctctacgcggcggcgtcggccggggacgccgcgttcgtgcgggagctgctggagagggacccgctgctcgtgttcggcgagggcgagtacggcgtcacggacatgttctacgcggcggccaggggcgggagcgcggacgtgttcaggctgctgctcgaccacgccatgtcgccgaggtgctcgacgagttgccggaacggcgaagccagcgccaggcgcagctccgtgttccggcttgagatgatgagccgggccgtccacgccgcggcgaggggcgggagcgtggagatgctcagggagctgctcgacgagtccagcgtgtcgacgtatctcgacatccgtggatccaccgtgctgcatgccgccgctgggagagggcagctgcaggttgtcaagtaccttgtggcctctttcgacataatcaattcgactgataatcacgggaacacagcgctgcatgtagcggcctaccgagggcaccaacctgtcgtggaagccttggttgctgcgtctccatcaaccttgtcagttgtcaacaacgccggtgacacgtttctccactcggcagttacaggattcaggaccccaggattccgacggctcgaccgccagttggagctgatgaggtacctcatacgcgagagaaccgcggatatccagaagatcatcaacctgagaaacgacgcgggccttacagctcttcacctggctgtggttggctgcgcacacccggatctcgtcgagctactgatggccaccccgtccatcgacctgaacgctgaagacgctaatggcatgaccgcgctggcgctgctgaagcagcagctgcgctcagcgacgtccgaccggctcatcaagcagatcgtctctgccggaggggtcttgaactccagcatcctgagaacccggtcagccatcgcttctcagatcaagatgcagggcgggatcgcgagcagccccggcaccactttcaaggtatcggatgcggagatattcctgttctccggcatgggagcggcggagtctctgaggccaagctcctgctccagcaacgggaaggatgatgaccctactcacgcagacgcagactgcgccgagaaccgtggatcgtcggagaagaggctgagctccgcgagccgggccaaagaccgcctcaagatgatgctgagatggcctcgccacaaggacaagacgcccaagaagtcagaggacagcagcccgctggggtcgatcagcaggctgaacgagcacggggccgagacccctgctccgctgaggcagaagtttaccaagacgacggcgctcaacggcaagcggaccctagcggtgaagagctccaccccgagctcctcatccaccaagaagaagctcaacacgaagctcatccacggcatcatggaggccatgccacagctggcgccatctacggcgcggtccgcgtccccgacggacactttcctgaggtcctcggtatcgtccacgccgcagccgctggcgaagctgaaggacatctgcctcgacgacgagatctccatggtgacgccgcccgccggcaggctgaaggatagtgacgacgccatggaggacccctcgtgctccaacaactcgtccatggacgacggctgtggcgccgggacggcagagagcgcggcccggaagcacgggtgcggcaacgggaggctcatcaacatctgctttggcgcgcagggcctcaccgtggaggactcggcgagcgggcagcagacgagcaagatgttcaagcagcagtgcctcagggtgtcctgattgacggcgtggtgtctcgactacaacagcgtggtgtgattggtttggtgtctcgcgtgcagctatgtgtgcttgtttgctttgctccttgcacagccagcggtgaactggtgatccaatgaacttgtgcttgtgttaactgtgacgttgacgaatccacagctctttaacttcctcagtgtcaggtcgtgcattcttcaaacaaatcaccgttgatcaatcacttcctcgaattttattttac

SEQ ID NO: 214508 - DNA, 2592 bp, Zea Mays
tgtgcaactgcatggacccagctcctctgatcctctctcgctctccctctctctctcatccataacgacatggcacctttgcaccacgctactgccctgcctactactagcactgcacggtctggttcttgttcctgagcagttgagctgcgcacaccgacttcttttgcacaaggtacagcagcgcaggcgcggcggcagcccgccgctggatctctcccgaggctccggcgatggagcggtcctgctacttcccgctgcggtgggagagcacgggcgaccagtggtggtacgcgtcgccgatagactgggcggcggccgacggccactacgacatcgtccgccagctgctgcacctcgaccccaacctgctcatcaagctcacctccctccgccggatccgccgcctcgaggcgctgtgggacgacgacgcccgcttcgccgacgcggcccggaaccgcgcgtccgtcgcccgcagcctgctgctggagtgcgagtgcaggaaccaccgccccggcgccggggagaacacgctgctccgggccgggtacggcggctgggtgctctacgcggcggcgtcggccggggacgccgcgttcgtgcgggagctgctggagagggacccgctgctcgtgttcggcgagggcgagtacggcgtcacggacatgttctacgcggcggccaggggcgggagcgcggacgtgttcaggctgctgctcgaccacgccatgtcgccgaggtgctcgacgagttgccggaacggcgaagccagcgccaggcgcagctccgtgttccggcttgagatgatgagccgggccgtccacgccgcggcgaggggcgggagcgtggagatgctcagggagctgctcgacgagtccagcgtgtcgacgtatctcgacatccgtggatccaccgtgctgcatgccgccgctgggagagggcagctgcaggttgtcaagtaccttgtggcctctttcgacataatcaattcgactgataatcacgggaacacagcgctgcatgtagcggcctaccgagggcaccaacctgtcgtggaagccttggttgctgcgtctccatcaaccttgtcagttgtcaacaacgccggtgacacgtttctccactcggcagttacaggattcaggaccccaggattccgacggctcgaccgccagttggagctgatgaggtacctcatacgcgagagaaccgcggatatccagaagatcatcaacctgagaaacgacgcgggccttacagctcttcacctggctgtggttggctgcgcacacccggatctcgtcgagctactgatggccaccccgtccatcgacctgaacgctgaagacgctaatggcatgaccgcgctggcgctgctgaagcagcagctgcgctcagcgacgtccgaccggctcatcaagcagatcgtctctgccggaggggtcttgaactccagcatcctgagaacccggtcagccatcgcttctcagatcaagatgcagggcgggatcgcgagcagccccggcaccactttcaaggtatcggatgcggagatattcctgttctccggcatgggagcggcggagtctctgaggccaagctcctgctccagcaacgggaaggatgatgaccctactcacgcagacgcagactgcgccgagaaccgtggatcgtcggagaagaggctgagctccgcgagccgggccaaagaccgcctcaagatgatgctgagatggcctcgccacaaggacaagacgcccaagaagtcagaggacagcagcccgctggggtcgatcagcaggctgaacgagcacggggccgagacccctgctccgctgaggcagaagtttaccaagacgacggcgctcaacggcaagcggaccctagcggtgaagagctccaccccgagctcctcatccaccaagaagaagctcaacacgaagctcatccacggcatcatggaggccatgccacagctggcgccatctacggcgcggtccgcgtccccgacggacactttcctgaggtcctcggtatcgtccacgccgcagccgctggcgaagctgaaggacatctgcctcgacgacgagatctccatggtgacgccgcccgccggcaggctgaaggatagtgacgacgccatggaggacccctcgtgctccaacaactcgtccatggacgacggctgtggcgccgggacggcagagagcgcggcccggaagcacgggtgcggcaacgggaggctcatcaacatctgctttggcgcgcagggcctcaccgtggaggactcggcgagcgggcagcagacgagcaagatgttcaagcagcagtgcctcagggtgtcctgattgacggcgtggtgtctcgactacaacagcgtggtgtgattggtttggtgtctcgcgtgcagctatgtgtgcttgtttgctttgctccttgcacagccagcggtgaactggtgatccaatgaacttgtgcttgtgttaactgtgacgttgacgaatccacagctctttaacttcctcagtgtcaggtcgtgcattcttcaaacaaatcaccgttgatcaatcacttcctcgaattttattttac

SEQ ID NO: 214509 - DNA, 2738 bp, Zea Mays
ggctggccgccgccggaggttgagacacaagaggcgccgggagcattctccattcttgaccttcgcctccactagtccactccctcgttgatcaagtagggaggagtgcagtggatatgtggcggcggcagcagactctcctccgccggctgccaccgctgagggtggtggcgcaggctccggcatcctggccggcctgccggctgggacgcttctgcgggtctgtgccggagaagaggaagggaaaggcggcgcctttgcaggcgcggggcatggtggacaggttccggatgcgcgccaagggtggcgacggcggcaatggatgcgtcagcctcaggcgctctaggtccaaccgccagggcatgcctgacggtggtagtggagggaagggcggtgatgtaattcttgagtgttcaaggtctatctgggatttcagtggcttgcagcatcacatgattgcacaagtacctgtaggcacagtgattcatcttgtcgaaggcgagcaaccttctctgacagtaaataaaccaaccagagctctggatccctgggatatacctagtgctgaagaacactcttcagatttggaccagattgttaatatagtggcagaaggttttgatggtggcttgtcccatcggcatattgcccctaagcataacactgatggaaatgacactgtaaagggaagcagcagtcactcagaggatccaaaatactttcatacatgctccaagcttcagttctcaaactctaatcgtgatgtaagaatctattcatgtcaggaggggacagatgaaaaagatcaaactgaaagtgaggatgaagaattttgggaggatgaagacgagtttgacatggatgaggaggaagaagaggatgagaaggaagaacaagatgtgcaatattgtgttgctgagatgacgaaacctgggcagcggttaatcatagcacgaggaggcaaaggtggactggggaatgcttttgtcatgaaggagatgcggccatccaaagcaaacagacaagagaagatagcccgtttgagtactgggcagccaggaactgagagcatccttatcctggaactgaagagcattgcagatgttggtctggttggattgcccaatgctgggaagagcacattgctcagtgctctatctagggcgcaaccagagatagctgactacgaattcaccacgctgaggcccaacattggcagcctgacctacgaggactacttctcagttaaagtggctgatatacctggcctgatcaaaggagcacatgagaaccgtggcctgggccatgctttcctgaggcacatagagcgcaccaaagttattgcctatgtgcttgaccttgcagccacacttaatggcaggaagggtatcccgccttgggagcagctgcacgatttggtcacagagctggagcattaccaaaaaggaatgactcggcggccatcactgattgtggcaaacaagatagatgaagagggagctgaagagatgtacgaggagctgaagaggagagtgcagggtgttccaatatttccagtttgcgccatcttgcaggagggggtgccagatctgagagtgggtctaaggaaccttatggatgactcagatccgcagggcgttgattttgaggaaaacgactgttaaatgagaggactaggcaagaccaccctcgctcagctcatctacaacgaccctcaggtcaaggagcacttccatctactaaagtgggtatgtgtgtcagatgatttcagtgtccgtattcttgccaacaagatatgtaatacatcagaggcagtccttgaggatgcactaaagaagcttcaggaacatcttaagggaaagaggatcgacgataatggaatccgtctcacgccactccttccatgccgttgttgccttgggctgaagcttgttgaatccaaaggtgttcatttcttccacaaggtccttgaaggtgtcaacaatcccgcgaagcctgttgcccatcctaatatggaatgcagcacggttgtgggtagggaagagttttaccctggccataatgccaagcttggtgatgtgcccattcttcttggctcgacggtggagcgcctcatactcgaagtcatcgaagacctcgttcgcctcagaagcaggaggaagttcacagaggccatgaagcgccaggatcttagagatgctgtacttgtccttctcgtcgtttgtgagcaggaggacaacatagtccatgtctctgttctcaaccgccctaacagcatcgcagcaggggctatgccgggacacaacatagatggggtagccgagacggatgaaccggtcgcattcctctaggatcttgtccttctgttctttgctcactgatggcttaccactcacgaggaggctgggactgggagaagaaaccactacaaggactaggagagcggctacttgcttagacggaaacatcgatctcttattatcgcagtgcagatctccgcagctagtgatcgagttgccaccgcagctgcagccgtgggcggcctcgccggactccgccgcggcctcgacgaactcgggcgcggccttcttctccggggccacgccgaggacgacggtggcctgcgcggcggtgctcgtctcctccagcttgagccgcagccgcagcttgatccgcagttgcaagacatcctcgaccttgtggtgcaaaagaagctcgatctcttcaagaatcaatga

SEQ ID NO: 214510 - DNA, 1988 bp, Zea Mays
ctgggaaacgccgtcagaacgtggtcgggtgcttggctcggttgccctggtcgccgtcggcgccaccgccaccgctccagctacctccacactcctcctaaatttagccatgcccaccacccatcgtccgctcgtccgctccaatccacgcctctcgccaccacggcaccgctctccgtcgatcccattccaatggggtgggccgcgtctcctcctcctcctcctccttcgtcgtcatcatcatgatcatcgtcgaatcgcctgcccttccgccgtttggaacctacaccgccgccgtaaccgctcctcgatggagtcctccagcaagtcatcatacagcaagctgtccgctgcaaatgacaagatggattccgatgccgccgggagccacgagagtgcacggtcgaatggcctctcggttgatgcagccgacaaggcgccggccgcgggaggagcgggcagagctgacaagacctccgacgcttccactggtagcagtgacgacagcttggtggatagctccggtggtactggccgccatacgaagcggcacactgggagcgatcgcaggtgggaggccatccggtcggccagcgccgggggctccccgctcagcctcgtccacttcaggctcctgaagcgcctgggctacggagacatcggcagcgtgtacctcgtggagctgaggggcacgggcaccttcttcgccatgaaggtgatggacaaggaggcgctcatcagccggaacaagctggtccgcgcgcacacggagaggcagatacttggccttctcgaccaccccttcctgcccaccctgtacacccacttcgagactgacaagttctactgcctcgtcatggagtactgctgcggcggtaacctccattcgcttcggcagaagcagcctaacaggcatttcactgagcaagcagccaggttttatgcctccgaggtgttgcttgctctcgagtacctccacatgctcggcatcgtctacagggacctgaaaccagagaacgtcctggtcagagatggaggtcacatcatgctctccgacttcgatctgtcgctgcggtgctcggtcagcccgatgctagtcagatcctcatcggtccatgccgccgccaacaacggcgtggtccatgccgacggtgccagccagcagggccagggctgcatacagtcaccgtcagcgttcttcccgcgcatagtactccccaagaagagccgcaagaccagcaggtcggactccagcatcaaggacgggtcgatcctggagttcaacgcggagccgacggacgcgcggtccacgtcgttcgtcggaacgcacgagtacctcgcgccggagatcgtcagaggcgagggccacgggagcgcggtggactggtggaccttcggcatcttcctgtacgagctcctccatggcacgacgccgttcaagggggacagcaaccgcgccacgctgtgcaacgtggtggaccagccgctgcggttccccgacgcggccccgcctgtgcctgtgagcaccgtcgcccgggacctcatccgtgggcttctggtgaaggacccccagaagagaatcgccaccaggaggggcgcagctgagatcaagcagcacccgttctttgatggggtcaactgggcactcgtcagggatgctcaccctccttctgtccctgaccctgcagacttgggccggtttgcatctaaggagaagccggcggcggcagttgccactgctcatcgtgctcctgcagctaaaccaaagaccggcaattttgttcagtatttttaggttgtctatatatcatgtttttgtttttggcagacaaaaaatacaagtcattttttaagaacaactatataagtttccatatgcatggcacagttcagtttatagcttgattgccaattgaacagtttgctatggctctcctcactcctcaggttataagtcattttttattgccaactgatcttgatgctgc

SEQ ID NO: 214511 - DNA, 3401 bp, Zea Mays
cacgaacacggtcacgcactccgccgatcccgccaccgcggcgcggggacgcgcacatgctgccacgaatactcctccagtcctcccccgtggtgccggcccccacctgacccccgatccccgcaaccttctatccagaggggaaaaaaagaagacaaaaaccgccggcgagcatgggcacgcaacccggctcggcggttcgtgtcgctgcggatgagagctcgctccctggactttacttaactctactctgagtctcggatgctccagagtccagacttccgggattagaaatccacgcacatcgccgtgcacgcacgcgacggcggagatgtccgtggccgtggggaagcgggtgctcgatacgggctggctcgccgcgcgctccaccgaggtcgcgctcaccggcgtccagctcaccaccacgcacccgccggcagctgaccccgccccagccgcgccctggatgagcgccgccgtccccggcaccgtgctggggacgctgctcaagaacaagctgatccccgaccccttctacgggctgaacaaccaggccatcatcgacatcgccgacgccgggagggagtactacaccttttggttcttcaccacgttccagtgtgccctgtcaggaaatcagcatgcgactttaaacttccggggaataaactactcagctgaaatgtatttaaatgggcacaaggaggtactaccaaaaggaatgttccgaaggcacaacattgatattactgatatcctccatcctgatggtaacaatctgcttgctgtccttgttcatcctcctgatcaccctggcaaaattcctcctcaggggggccagggtggtgatcatgagattggaaaagatgttgctacacaatatgttgaaggatgggattggatgtgcccaataagggatcgaaatactggtatctgggatgaggtatcaatttccatatctgggcctgtgaatataacagacccccatctggtttcaacttttcatgatgattttaagaggtcatacctacattgtacacttcagttggagaacaaaagttcttggattgcagattgtaccttgaaaatacaagtttcaactgaacttgaagggaacatttgtttggtggaacaccttcaaagttatgcaataacagttcctcctcaatcagatatagagtacaccattccttctttattcttctataagcccaacttgtggtggccaaatggcatgggaaagcaatccttatacaacattgagattagtgtggatgtaaaagggtttggagaatctgattcctggagccattattttggattccgcaagattgagagtacaattgatgattctacgggtgggaggatcttcaaggtaaatggtgaacctatttttatccgaggagggaactggatattgtcagatggccttcttagattaacaaagaagcgatatatgaccgacatcaagttccatgctgacatgaacttcaatatgcttagatgttggggtggtgggctagcagagaggcctgacttttatcatttttgcgatgtctatggtctgatggtatggcaagaattttggataactggagatgttgatggccgaggaattcctgtatctaaccctaatggccctttggatcatgatctctttcttttgtgtgctagagataccgtgaaattactcaggaatcatgctagtctagctttatgggttggtggtaatgagcaagttccaccggttgacattaacaaagcactgaagaatgatttgaagctacatccaatgtttgatcaatgtgggatggttttgcgaatggtaaaggggacttcactgatggtccatatgagattcagtatccagagagttttttcaaggacagcttctacaaatatgggttcaaccctgaagttgggtctgtaggggttccagttgccgcaacaattagggccacaatgcctccagtaggatggagcattccgattttaaagaaaagaattgatgggtacatcgaagaagtaccaaatccaatatgggactaccacaagtatattccatactcaaaaccagggaaggtccatgatcagattgaactatatggagccccaaaagacctggatgatttttgtgaaaaggcacagctggtgaactatgttcagtacagagcacttttggaaggatggacttccttcatgtggacaaagtttacaggtgtcctaatttggaagacgcagaatccttggactggactaaggggccaattctatgatcacctccaagaccaaacggctgggttttatggttgccggtgtgctgctcaacctattcatgtccaactgaatttggttacctattttgtagaggtggtaaacactacagctgatgaactcaaagacatggctgtcgagatttcagtgtgggatctagatggtgcatgcccctattacaaagttaccgagaaaatagttataccgccaaagaaagtgaagcaaattatcgagatgaaatacccaaagatgaaagatgccaagcctgtgtattttctgctcctcaagctcttcaggctgtcagacaatggaacaatctccagaaacttctactggttacaccttcctgggcaggactacaaatcgctggagcagtatcagcagaaaaagattccattaaaaattgattctgatgtttcagtctcaggcacgaggcacaaagtaagaatgacagtagagaacatctcaaagaagtccgtagtagacagcacacgttcagtatcagcaatggatctaggtgatgcaagtggttcccacagcactcgcaaagaaactactcggaagggaaacgggagcgacggactgtggaggaaaatacgcagtggcctcggggtcgcaagaccaagcgacaaccgaagaacactggaggtcagcgggaccgattcaggggttgccttcttcctccatttctcagtgcacacctccgaatcatccacggacggggaggaatacaatgacacaagaatcctcccggtccactactcggacaactacttttcgctgacgccgggggagaacatggccgtcgacatctcgttcgaggctccccagggatccagtcccagagttgtcctcagaggctggaaccatcatctggaccacgccgtgatgatctgagatccgtgtaataaaataagcacgtaccgaataaagtgcagacatcagatcgtgttcgtgcctgttgttggattataattaggcttgtcctaattttattttattttattaaataaatcgtacgacctaaattgaattctaggttaaatggcttcaaggtactctatatccttcgtaattgttttagatgtcagtgttatttaaagcttatatatacatccttataaaag

SEQ ID NO: 214512 - DNA, 2090 bp, Zea Mays
ctcatagtagacgagggtgctctagaactacgcatgatggagtttctagagaagctgacgcaaccaggatgcttcggcaataccattagcgatggcgcgatactccacctcagcactcgagtgggagacgacgttctgacacttggaggaccaggttacaaggtatggcaagaattttggataactggagatgttgatggccgaggaattcctgtatctaaccctaatggccctttggatcatgatctctttcttttgtgtgctagagataccgtgaaattactcaggaatcatgctagtctagctttatgggttggtggtaatgagcaagttccaccggttgacattaacaaagcactgaagaatgatttgaagctacatccaatgtttgtaagttaccagacatcaaaaagtgaagtaatatatttatctgaagaatcaactgaccctagtaaataccttgatggtactcgggtgtatgtgcaaggatcaatgtgggatggttttgcgaatggtaaaggggacttcactgatggtccatatgagattcagtatccagagagttttttcaaggacagcttctacaaatatgggttcaaccctgaagttgggtctgtaggggttccagttgccgcaacaattagggccacaatgcctccagtaggatggagcattccgattttaaagaaaagaattgatgggtacatcgaagaagtaccaaatccaatatgggactaccacaagtatattccatactcaaaaccagggaaggtccatgatcagattgaactatatggagccccaaaagacctggatgatttttgtgaaaaggcacagctggtgaactatgttcagtacagagcacttttggaaggatggacttccttcatgtggacaaagtttacaggtgtcctaatttggaagacgcagaatccttggactggactaaggggccaattctatgatcacctccaagaccaaacggctgggttttatggttgccggtgtgctgctcaacctattcatgtccaactgaatttggttacctattttgtagaggtggtaaacactacagctgatgaactcaaagacatggctgtcgagatttcagtgtgggatctagatggtgcatgcccctattacaaagttaccgagaaaatagttataccgccaaagaaagtgaagcaaattatcgagatgaaatacccaaagatgaaagatgccaagcctgtgtattttctgctcctcaagctcttcaggctgtcagacaatggaacaatctccagaaacttctactggttacaccttcctgggcaggactacaaatcgctggagcagtatcagcagaaaaagattccattaaaaattgattctgatgtttcagtctcaggcacgaggcacaaagtaagaatgacagtagagaacatctcaaagaagtccgtagtagacagcacacgttcagtatcagcaatggatctaggtgatgcaagtggttcccacagcactcgcaaagaaactactcggaagggaaacgggagcgacggactgtggaggaaaatacgcagtggcctcggggtcgcaagaccaagcgacaaccgaagaacactggaggtcagcgggaccgattcaggggttgccttcttcctccatttctcagtgcacacctccgaatcatccacggacggggaggaatacaatgacacaagaatcctcccggtccactactcggacaactacttttcgctgacgccgggggagaacatggccgtcgacatctcgttcgaggctccccagggatccagtcccagagttgtcctcagaggctggaaccatcatctggaccacgccgtgatgatctgagatccgtgtaataaaataagcacgtaccgaataaagtgcagacatcagatcgtgttcgtgcctgttgttggattataattaggcttgtcctaattttattttattttattaaataaatcgtacgacctaaattgaattctaggttaaatggcttcaaggtactctatatccttcgtaattgttttagatgtcagtgttatttaaagcttatatatacatccttataaaag

SEQ ID NO: 214513 - DNA, 3494 bp, Zea Mays
cgatgaaattcgtggagagatactctttgttctatacaaactcgctttactaaatgccaccccatgggacgatatatgtgaaactggagatttggaccttctggcaattggtagaagcttgcttcaactctctcttgaagtcctactcaaaactcaaaatgatgctgttcgcttgaactgtattgcattgctccttactttagcaaagaaggagccctttgatcatttgctgatcagcaaccagagttctaacaaatgcatagaagcagagtccatgcagacggattatatgtccctaaatgcttctcttgttctattcgctgaggctgtcaaaggatctctgctatctactaacctagaagttcaggcagggacattggatttgatctttcatttcctgtcatctgatgcaaatatttgtgctctacttcaaactttgatcgatgaaaatgttgctgattacatatttgaggttctcaggttatcagagataccatttcacccagtccagtcccatgttttacgacttgtttggatttgcatggccaattgttctggtatcctctcactgccccaagaagaacagatagcctgtactttgactgcaatcttgagaagaaatctcaatggtgaacttgacatgagttctgaaacttttattctggtttgctcaatattaatagagattctgaagtcacctcatgctcatgatattgagaaactaccatcatttattgaagaagcatcaaaatatgcgatatcttctacattgtcacatgggtatgattctacgatcctcagtactcattctcttcttcttctgaaagaagcacttatattctgccttgaagggagcaaatacaatattgctagaacgaaggatcttgaggatagcatcatgggaacttgtggaacaattttactgcaatggcttgaaagtgctgtggttgacggtaatgatgaagaaacattggctgagatccttcagattttccaaattattttgtcaagggcatctgacaaaaagccattaaaattcgctgaattgctagcatcatcatcatggctctgtgctaacaaccaaattctggcttctgttgagcaatacatcctcctcaatggtgggacctttccatatgaaatcaatggttccattatgcttacgcttctggtccatctttatgccttcatcagaggcctttcccatagctgcagcattccacacagtccagaagccgagaatacactattccacttaatcatacacaaggactgggatttgcttgtgattcgagtccattcggtagcaataaaatggctctttcagaagcaagaaattatggaaccactcgccttccagatgctaaagttttgtagaactttctgtgaagatgaaactgtcatgctttcaaacagcagtcagttggttgacatgcaaatgattgcggagcttgcactttctggagaaaccaccatctcgtctttgctggtgtccttgctagaccagatgctaaaggagggtacagaagatgagttattttcagttgtcagtgttatcgctgaaatcctcatgatctctccatgttcttccgatcaatttatatcatgtgcaaatgcatcaacatttggccaggaagatgaatggcttcctcttgttctaaagatgttgtagtaaacaacgcttgtgttaaaggcccatctttatttcaacacaatcaggagacaacctttggagaattcctgattcttgtacttctattggtgttcttctctctaagaagtttgcatagcattctagaggtaagtattgactggcaggacttccttcagcattcagacgatgtccagtcattttctgttctcggtattccatgccatgatttatgccgtctcatgcacttcggttcaccttctattaagcttattgcttcacaatgcctgttggagttgctcacgagaatttcagatcaaaggtcatgtaataatgctgagttaagatgctctgtgggatatttgaagtccattattgcagtgacagagggattggtgttcagtgaagacagtaaagttgctggaaattgcagtgcctgtctctctgtgattttgggatgggagaaatttggaagccaagaaaaggtggcagtcagagaatctaaatggtttaggctaataatggaggaatttgttgtggccttgactgctcctggtttgacgtcgaaatctttctccagtcagcagaagtttgctgcgaatatggctgtttcgttgctcaggctgagccaagtgccagattggctgacatcgttgtttgatgggcatctgatatctggcatcgtggctaatctttctgctaggaatgttactgcagaaatcatcaatctcttcagtgagctcatggctaggaagtatctcagtcaagagcacattgttgatctacataacttgttgcaggtgtgcagaagccaggtctacgagggaagctccaaagcaccgttgccagagcaaagggttgaaaaagtcgcgagaagcaccaatgacgtgctcgcatctctctttggcctgatggtgaaccagtgcacagactctggcacggcgcaagcggagcagcagagactactgcatgcgattgacgtgttcttccaggagtcgggcaggagacaacagcaacatgctacagctcgacaagagacagtgccaggggattatggaccaagacagggcagcagggcccgtcgccccaaagagaagatatccggtccaggatggatccggatccggcactagtgagcctacgcctacgcctgcgctcgtgaccgatgccggccgtgcccaggttgctgctggcttgtgttcggagctcccacgcttgatttgtggggaattccggcgatcagctccgccgctcccatctcacgagtcacgaactacatccgcttccaaagaaacatgatatcttgaatcctaagtcatgaatcctgagtcagaaactctagtgaagtcgcaactactcgacgtgttttaagtttttaaggagccgtaaatttagctcttgtatttaacgagctcctcgcgaaccggaatgagctgaggaagcccaaaactgatgcccacaacaagcacaaagccaacagcccaacactaacaagaccctacgtttatctcttcctattgatttcaccctgaccctgcgccaacggcttgctgccagccatggtcttgtgctaatcgcttcttgtccggttcctacccatgcttagtgtgaccctagtgttgtctgcttcgacaccaataggtaacacgaacactaaacaagcttatccatggtcatcaagcagtctattaccttcccattcttcgtactgcatttataactcaagcttgatgaatacatgagtacgtatgtgtgttttgaattatattgtcgtctactgaataagtatatgctttttcttctcgtacatgagtatgcattttcttctcgtacattgacttca

SEQ ID NO: 214514 - DNA, 1459 bp, Zea Mays
gacaaatgttctcttttcttaaatcttgttaatgatctccgacttccaagcgatgaaattcgtggagagatactctttgttctatacaaactcgctttactaaatgccaccccatgggacgatatatgtgaaactggagatttggaccttctggcaattggtagaagcttgcttcaactctctcttgaagtcctactcaaaactcaaaatgatgctgttcgcttgaactgtattgcattgctccttactttagcaaagaaggagccctttgatcatttgctgatcagcaaccagagttctaacaaatgcatagaagcagagtccatgcagacggattatatgtccctaaatgcttctcttgttctattcgctgaggctgtcaaaggatctctgctatctactaacctagaagttcaggcagggacattggatttgatctttcatttcctgtcatctgatgcaaatatttgtgctctacttcaaactttgatcgatgaaaatgttgctgattacatatttgaggttctcaggttatcaggaaataatgatctgcttgtcatttcctctattcgggtactattactttttgcgagatcagaggaaaatttcaaagaaaagcttgccattggattttccactcttcttcctgttcttcactatgttgcagagataccatttcacccagtccagtcccatgttttacgacttgtttggatttgcatggccaattgttctggtatcctctcactgccccaagaagaacagatagcctgtactttgactgcaatcttgagaagaaatctcaatggtgaacttgacatgagttctgaaacttttattctggtttgctcaatattaatagagattctgaagtcacctcatgctcatgatattgagaaactaccatcatttattgaagaagcatcaaaatatgcgatatcttctacattgtcacatgggtatgattctacgatcctcagtactcattctcttcttcttctgaaagaagcacttatattctgccttgaagggagcaaatacaatattgctagaacgaaggatcttgaggatagcatcatgggaacttgtggaacaattttactgcaatggcttgaaagtgctgtggttgacggtaatgatgaagaaacattggctgagatccttcagattttccaaattattttgtcaagggcatctgacaaaaagccattaaaattcgctgaattgctagcatcatcatcatggtttagcttgtcatttggattcatgggcttatttcctaccgatcatgtaaaatcactagtatgtttggtcaccagtttgattgttgacaggcttttgggatgtaattatggggaaacaattcgagatgcacacatttatctgccatcagaccctacagaaaatgatgtatttacttgggcaatgtagcacagaagacttcaacttggcatcatgc

SEQ ID NO: 214515 - DNA, 513 bp, Zea Mays
gaagagggctacgagttggatttttgtagatcattcgtattgtatccttccttgtattgcttcttttgttctgctacaaatatgatcaacatggcagggagaggtcttgaggtcaagcctggacccactgtcaattttatttcatgtaagactgatctaaacaatttctttgtggagtattttgtttccttgacctcatttttgcttcttgcctcttacataatggctcttgattctgaagatgaagagaacgagctaaacgttctagtaatcaaggaaaatggcaaaggtgaggtgaaggaggaccagagaagtgaagagaaggcagttgctgcagcttcaaaatcaagtcttgggcttgaaaaaaaagcaaggatgagtatgagtctgatgattctgatgagggagaaggtgaaactgaagaatgcgcagatgtggctgttcatggacgacagcatcaagaaacctgcaacatgcaaccagattttaagaaatctgccacctgcaacatga

SEQ ID NO: 214516 - DNA, 1127 bp, Zea Mays
cctgtaacggcgatattttgatggtggcatgtgtgctgatgttctatctacagaaggatgattttccagtggatactcatcaaattttgggccaataggtactccgcattacgaaggctatgggctgggttcctgctacagctagcagggagaaggcctacattcatctaaataataagattcctgatgatctgaagtttgatttgaattgtctttttgtaactcatggaaagctttgtcagtcatgtaccaaaaaggtgggaagtgataaaagaaagagttccaattctgcctgtcctctagcaggttactgttgtattggagaaaagcttcagcaactgtgaaggcagtagctgggggcgttcaaaaggctctgctgtgtttgattcggcaaatgctttatcacaatcggtgcaaacttagctgaatgctaccgccccacttgtttgaaaaggacgtctgcacttgagttcaactgtgtaaacctgggagctttggatggaggacttgtggatccttgatgcgcatttgttgcaaatgctttggattgaagcagagcaatgtaccataccatgctggcatgcgatctaagtggccggcggcttgcttcatgctcacatgaagtttaactaccatcaccatcggttgcagcttcaagtttggttcggttgtaatgaaacggattctcatatgttaaacctgagagccttctgttaagccttgtttgagtactctagtattcacctcaatccacgtttattaaagttgattgaggtgtaaattaaactaatttacatcatagtccaactcaatacatgtggaatgagatgaatactagcgtgaaactctaccattttgacctttctctgggtagtagtaaccgattttagggtgcatcttcagacactcatgaatcatgatcaagtgctaccatctttgcttcgagtgttgaacattagcatcaacagaacaaaaagagaaaaggacagaagaaagtgctgttaggccctgattggttgagtttgcagggttgtttatgcccaagcaaagcggctgtttttggagcttgcttttttagaagcaactgctttttcgtagtatatttttaaaagcatctcagaccctct

SEQ ID NO: 214517 - DNA, 4384 bp, Zea Mays
cctgtgtctactggatggagggttccattgcccatcatccaccagcgaagaaacatagggaaaagggaaaaaagatggtcgtgctgccgcgccattatagccccggaatccgcggcgcgcccccgccttccgtcctctctcccgccacaaatcgccgggcgcccgcgccgccccagcctcccttctccctccctccctcatcccctccgtgtcccggagcccagggagcggaggcgggcgggccggcgggcggccatggacgtggactgcgtctcgctgcccgacgccccggcgggcgacgtggatggcggcgccgcccggccgtggcccaaggccgtgaccaacggcggcgtccacgagctgctggagtgccccgtgtgcaccaactccatgttcccgccgatccaccagtgccccaatggacacacgctgtgttccacatgcaaggccagagtacacaaccgttgccctacctgcaggcaagagctgggcgacatcaggtgtctggcgctggagaaagtcgccgagtcgctggagctcccctgcaggtactactcgctggggtgcccggagatcatgccttactacagcaagataaagcacgaggcgcagtgcggcctgagaccgtacaactgcccctacgccggctccgagtgcggcgcggccggcgacatcccttccctcgtctcccacctgagggacgaccacaaggtggacatgcacagcggctgcaccttcaaccacagttcgaggcgttccagctcgggatggcgcccgtgtacatggccttcctccgcttcatgggggacgagaacgaggccaagaactacagctacagcctcgaggtcggcgccaacgggaggaagatggtgtgggagggcaccccaaggagcgtccgcgacagccaccgcaaggtgagggacagccacgacggcctcatcatccagaggaacatggcgctcttcttctccggcggggaccggaaggagctcaagctcaggatcaccggacggatctggaaagagcagcagacaccagacggcgcatgtactccaaatctgtgcagctaattaagcaatcttcaaacaaacaacaccttgcctgtccttctttctctttctaattaatcgtggtggtggtggtggtgctcaaagggatttatttatttattactaattattaggaggatgtaggatgctcgtgtaaatgaaactgtgtatattatatggatggcatggcatccctggccttaaatcatgtcacagcacagtactgtactgtacctacgggtggccggctgatcaaaagatctttgcttgctgacaaagctgtgtctgcatcttcatgactccatgtttgcattctattcctcccacacaacagtcaccagtgggcgtgccacgtggccgctatcccatccaatggttccacacctcctctttcccaataatcccaggcgccgcgaggcaaacaatctcctcttctctccccagattcactcaccgtccgtccgtccagggagccatggcagcagcagcagcagcctgcatctgtctgcagctctctctcccaagcaaccattcttcctctgcatgtcctccagcatacaggaagcgtgtcgcgctagccccagggagaggaaaccgtcttctctgcactgcatctggcgcctcttcttcttcttctgtggtggtgaccaaggagcaggaggaaggatctcctgagcccgaaatctttagctacaaagacgaccccaacttcaggggctgcaagggctgcggcagggacgagcttcagaggggctgcaatggacaaggccggatccagggcggcatagccgccgtcccgggcttcggctggtggcccatcaaggcgtaccggccgtgccccggcttcgtcgcgtccggcggccgctaccggcgccagggccaaagcatggacgacgttgcatccggcagggggaaaaagaaaccctctcccgccaaaaaacaagcttaacccctctagctagtttatgttcatcaggtgaattcagaatctacccaagatgggagggaactgggggaagctcaagttattcaggaacagcagttttttttgggtccacaacgccaatgtatatgcactagtttggagtactgtttgcagaaacaacaattgtatcagtagcttggaacatctgactgtaccctaattgtattattgtcttcatcaagtggcgaatgcaggatcttgcactggtataagcaagcacccacccacaggatgatgtgcattattacgctgctgccgtcttcttgacgaactcgtccctgagctgcctccgcaggatcttgccggacaccgacttggggatggcgtccacgaagcgcagcagccggagcttcttgtacgacgcaacgcgccccgccacgtacgccatcatgtccgcctcgctctccggcgcgccacgtcgccgcaccacgcacgacgccgggacctcgccggcctcctcgtccggcagcctgcgcccgcatacatgcatgatgacccgcaggaacacacacgcacaatctccaactgcatgccgcggtccgctcggtcgcttacccgaagacggcggcgtcctcgacggacgggtgagacagcaggatggcctccagctcggcaggggcgacttggaagcccttgtacttgatgagctccttgatgcggtccacgatgaacacgtcgccgtcgtcgtcgatgtacccgacgtcgcccgtgtggagccaccccgcggcgtcgatggtgcgctccgtctcctccttcttcctgtagtagccctgcatcacggcctggctccgcacgcagatctcccccggcgtgttcttgggcagcgaccgccccgtgtcggggtccacgaacttcacctccaggttgggcaggatgaagccgaccgacttcttcttggcgacctgcaccgccgaccccacgtcctcgccgccgccgctggcgtgcgtcagcgtgatgcagctgtgctccgtgagcccgtacgcctcctccacctgcacgcccgggaacttgcgctcgaacgccgccaggaggtccggcgcgagcggcgcggcggccgtcatgacggacctgagggccaggccggacaggtcgaactcgtcggccacggggctcttcaccatggccagcatgaccggcggcacgacgggcgcgaacatgacgcggtgcgtcagcagcgcgcccaggaacgcgcgcaggtcgaagcggtccatcaccaccaccgtgcccttgtgccgcagcgtggcgcagcagatgccggtgatgccgtagatgtggaagaagggcatcaggcccagggtgaccacctgcccgaccagctcctgcccgacggcgaacatggaggagcagaggctggacaccaggttccggtggctcagcatcacgcccttggacacccccgtcgtaccagacgagtaggggagcgcgcacaggtcggactgctgcgccggctcaagcgccaccaccggcgcgcccgcgcggtccgccatggcgaggagctcgtcccagcctatggcgccgggaagccgcgccacgtccccgatgccgatcaccggcacgccagcgtccttcaccttgtcgtaggccaccgcgtcggcgaccacgagcctggcctcggagtcctccacctgcttcttgatctcggcggcgacggcgcgcgggttcacgccggagaagaccgctccggcggacatgatcccgaggctcaccacggggtacaccgccaggttcgggagcgcgaccaccacgacgtggcccctgcggacgccgatggaccgcagcgccctggcgaaccgcgccacgagcgccgtcttgtccgcgtaggcctcggcgtccgccagcacgaactccggcacggtgacgtcgtctggtacggccacgggcgggaaccggctccggaagatgtgctcctcctcagactcatgcaaatgcacggcggcgatggccgcgtcgcccatcctcagctgctgctggtggtggtggttgtgggtatggagctgaaggaagggcgctgcgttggcatttgaagagacgaccggaggtcttggcattgggccacgcgaggaaggtgaaggcatgttggtggtggcgacacaattcttgcgtggtgtcaagaaaggtggtgtgcaggtgaggatcggttgtgtcatggcctttgacctcgtagaacttggctgggtcatgctcatgtcctttgagctcacagagcttagagccaccggtcaacagtgacacgcgtgaaagcagcgttgtcgtgttcatcatagttcgcaatagagttcagatgatataatagttggttaagtgcatgcacaaattcttcaaatgaaagaaatatcaattcgcccccata

SEQ ID NO: 214518 - DNA, 1600 bp, Zea Mays
gtcattccgctcgtctctctcgctcacatcaactctccaggcaaaatatcctgggcgcgatggatgcaacgccagcgagcaagaaggccacgccggccgccgccgtcgccgacgcggtcccgctcgctgcgcagcaggcggcggagcagctgtcgtcgcccgaatccgtcgccggcgtgagggcgagcggcagcgaggacgacgacgagcaggtggagaggttctacgcgctgctggacaacatccgcgccatgaggggcatggtcagcaccggcggcgcggcaccggggaggaagcgggcgcgcgacgacgagcccccgtggcggccggcgttccggatggaggacttcgagcttgaggaattcgactccggctccgcggggtgcgacgggggaaagaagaagagggagagcagcatcgcgaagcggccggccgacgaggaggagcaggccgaggtagtggaggccaaaggtccccggtgtgggccgcggccgccccagtcgcacaagccgcggcgcgagggagtgcgagccgtcgacacgtgacaggaattagaatacacagccctgccctggtccaatttgcacgtctttcacatttacgatgatatttctatattctatattctatctatactactctattaagtttgtagtgtcagtgtccacacatgcaatgcccccgcctcgcgttgctcgtccccctgccctgccgcgagtcgtctccgcccacgtcgtctcccgaaatctcgccccccgagacgcgcccgcgccacggctgccgctccttccgccccgcctgcccacctcgaccacccctcccccgcgggtgctgccagaactggtgggtggatgatctctccgtggtcaaggtcgaccactcccaggtgctcctcgcctccgtcaccttctccgcccccatgccgttgctccgcctccgcgtggcctctcctaggtcaggcctccccgccgcgatcgatgggtccgcggtctccgtccacttccgccggatgtccgtgttcgcctccacccgccccgtcgcggccgccctcggcgccgccgcgttcgaggaggccgtcgtcaagtacgagccccgcgccttagctgtctccgtcgccgcctccactctcgacctcggtaagcacgaggtcaacctcacccgccttctcccgctctcgttcgaggatctcgaggacgacggcgactccggcttcgagaagtggagcaccagcttccggctgtccggccccgtccgcggcgcgcggcttaacgtaaccttctcttgctcgctcctcgcgggcggcggcaccagcgagcagcacaggggcggggaagtggcggggctgcgacgcggctcgatggcacgggcagtgtcagtgcaagtgccgacgcctttgcccgcgcggagcaggggcgtgagggttctccacgaggtgctgcccagcttgaggtctgccaggccggtgccttcttctgttgctgacgggggtcctgatgcgaggaaggaggaggtggcagcaccggactgcacggaagaggggtctccggaggcaaagcactgcacatcggtagagcctgtgttcgtcagctttggtggatag

SEQ ID NO: 214519 - DNA, 3420 bp, Zea Mays
cgcgtttccgtttcaaacgattcaaaccaaactatcgtggcctcttggggcccactgtctcctctacctcctccgtcctccggatcccaaaatctcaaaccgtcaaacgggacctgatacctgagatacgcgcatggcgtcgccgcgccgcattccctctgtgcctgccagatccggcaacaaagagaatatatctcaagatggagaagctcccttggattttgcaaccttgcctaaagaagggcctgccactacaaggcggaagaagaagcttgcaggtttcaacttgaggaaaagcattgcctggaatcctgcttttttaactgaagaaggtgttttggataactcggagctttctgtgcttactggctcccaaccgatggcaaataggagccctggatcaggggtcagtagtataatgtccccatcctgtcagtcagggagatatggtaacacatatgtacggaaggaagccgcagggaattcacatggaaaattgcctgcaagatatcacagggcagaaagccagggaaggaaattgttttcttcagcaaaaactcctcagggggacaatcagaaagaatctgctggaacacaaaacagaagctctgcaagaatcatccaaatatgtacaccaagagtaccagctggatctatacagaagaaagtacaaaactcatctgcttctacatctcagatgtcaagaataccaaaacaattacgaccttctcttcctaaggtcccaagaagtacttcatctgtgacaaacaatttggaatcacacaaaaaaatagctccagttaaagctgaactagttcacagagtaactggattccctgctagattgaagatcaatcctgtatcttctggacctagcatagagaaggctgtggtgcctgctgttactgccatacatgaagaagccactgtgaaatgcaaaaaaaacccagcacacccacaaattagcccatccaccccctttgatagcactgtgtcaaaacttgctaagccatcagcacttcgattgccttcaccttcacttggttttttcactcaggaaaaagcgcatgtgccacatggtgatgctgctaaaagaaacgtggggaggtgtttctcttcaaatacttcagcgcttgatagacctcccagatacaggcagtctgaggaaagcagactccacctagcaaagcagctgtcaaccaatggcactgttgcttccaatcttgtgctacctgtgactagagagggccatctcaaatctttggtggttccagaaaatgaatcatcgtcaaaagttatcattacatacttagaaaaatctggaaatgtaaataatcaagcaatgccaaaggctgatttcttattggcaggaactggagctactgatactacacaaccaatgaatttagaaaagaaagatgacgctggaaatagtgagacattgcttgtagaaggaatggatgatatcaaagagattgaacctcttgataatttctacgctcctgaagctatttgttcctcaaccattcgacctgttgaggattctttctcgcttgaagccagttattcctcaactaaacctattgtagagagtaaattgtcactctcttgcatttcttctaaagtacactcctctagtgagcttagttgtcaaggcaagtcagtcagtgatcccagtgcagcgatggacatggaaaactctaatgttggagatactgcacttagcgcttctttgtcgaaaggcaggagttgcactccagctcttgatttgttgcaaggattttattcatttgatcgccagaatattgaatgtcctatgctgatggaatcagtatctacaatatgtgcagaccagctgccacattgtgacagtttaagcgatgaaacgccagccctagctggcagtcattcagatttgaatgattctttgtgtgatgaagctaaacctgctttgtcaaaagaaccaaatactgaaggtgaaatggagcttcaaacaaacagtaccatagctgtaaaggaaactccgttgttagatgtggggtgtgggcatattcacaattataggaccacagattgttctacgagattggaagcacctacaccttgtgtggaaagacgtcatgctttattagtagaaccaaatatggaagaaaaaatggtgcttgacacaaacagattgtcagctatacagtacacaccacatatagaaaagaacaaggcactggaaagatcaccggcaaatacaatccgtaaagatcatctgaagaacttgataccatttacagaagaatggcttgctgtcatggagtcttgtgggcaggaagttttggaacaaaagaccggtgctgtgcaaaattctcctcctgacaaaacacctccagaaccgagtccttggtcaccggttaaacggaaggcgcaagatgttggaccatttgactgtacgaagtactccaaaagcatccgaacctctggtacctaactgcagacgtttgagttcacattctatcacggtatagccacggtgataaggtcagggcatccgagcttttggtaccctaactgcagaccttgaccttcacgctctgtcaactgacatggtacagtcactgtgataaggtcagggactcccagccgaacacggcgtaaatacctgctaccgattgtcatttttgaccaaactaactgcgatgtagttcagcagccttgttgacctgcatttttttgcttccccccccccccccccccccccccctttcccccctttttttgttattgtgaaatactgttgagatcacgccccaagcaaacgcttggtaattaagaagggaaaaaagagagagagagaggagaaaggatctattattatgtttgtctcgattgtccttttttggccattagtaggtgactattgatgtctgaaattccgaacgggatacctgatcgaattccttgagagttggtcaggccaatgcagaattgaggtttcacggcggcaagccggcaatcctgctgccccagccaccagagaagagagtcagattttctggtgaacacgagagagcatcttgatgtgcatcttccattcttcctacctcgtcctgttccccttctctagtgtcgtgtagcgctcagcgttgttatgtgtttggttgcagggcaactgaaacagttggagacagaacagctggaacagccacgtcctgttgccctattttgtccgtctaattctgacgaatagctagagatggttctgtcccaatttatgactctgtactaaacaatcttatttaaaaatcgttctatcgttgcaactaaacacatactggttttctggacggaatgtgtgttccattgttttagtgtttgttagactatttcagcaacttacctatccatgtatgcaaactccattataggaac

SEQ ID NO: 214520 - DNA, 2736 bp, Zea Mays
cgcgtttccgtttcaaacgattcaaaccaaactatcgtggcctcttggggcccactgtctcctctacctcctccgtcctccggatcccaaaatctcaaaccgtcaaacgggacctgatacctgagatacgcgcatggcgtcgccgcgccgcattccctctgtgcctgccagatccggcaacaaagagaatatatctcaagatggagaagctcccttggattttgcaaccttgcctaaagaagggcctgccactacaaggcggaagaagaagcttgcaggtttcaacttgaggaaaagcattgcctggaatcctgcttttttaactgaagaaggtgttttggataactcggagctttctgtgcttactggctcccaaccgatggcaaataggagccctggatcaggggtcagtagtataatgtccccatcctgtcagtcagggagatatggtaacacatatgtacggaaggaagccgcagggaattcacatggaaaattgcctgcaagatatcacagggcagaaagccagggaaggaaattgttttcttcagcaaaaactcctcagggggacaatcagaaagaatctgctggaacacaaaacagaagctctgcaagaatcatccaaatatgtacaccaagagtaccagctggatctatacagaagaaagtacaaaactcatctgcttctacatctcagatgtcaagaataccaaaacaattacgaccttctcttcctaaggtcccaagaagtacttcatctgtgacaaacaatttggaatcacacaaaaaaatagctccagttaaagctgaactagttcacagagtaactggattccctgctagattgaagatcaatcctgtatcttctggacctagcatagagaaggctgtggtgcctgctgttactgccatacatgaagaagccactgtgaaatgcaaaaaaaacccagcacacccacaaattagcccatccaccccctttgatagcactgtgtcaaaacttgctaagccatcagcacttcgattgccttcaccttcacttggttttttcactcaggaaaaagcgcatgtgccacatggtgatgctgctaaaagaaacgtggggaggtgtttctcttcaaatacttcagcgcttgatagacctcccagatacaggcagtctgaggaaagcagactccacctagcaaagcagctgtcaaccaatggcactgttgcttccaatcttgtgctacctgtgactagagagggccatctcaaatctttggtggttccagaaaatgaatcatcgtcaaaagttatcattacatacttagaaaaatctggaaatgtaaataatcaagcaatgccaaaggctgatttcttattggcaggaactggagctactgatactacacaaccaatgaatttagaaaagaaagatgacgctggaaatagtgagacattgcttgtagaaggaatggatgatatcaaagagattgaacctcttgataatttctacgctcctgaagctatttgttcctcaaccattcgacctgttgaggattctttctcgcttgaagccagttattcctcaactaaacctattgtagagagtaaattgtcactctcttgcatttcttctaaagtacactcctctagtgagcttagttgtcaaggcaagtcagtcagtgatcccagtgcagcgatggacatggaaaactctaatgttggagatactgcacttagcgcttctttgtcgaaaggcaggagttgcactccagctcttgatttgttgcaaggattttattcatttgatcgccagaatattgaatgtcctatgctgatggaatcagtatctacaatatgtgcagaccagctgccacattgtgacagtttaagcgatgaaacgccagccctagctggcagtcattcagatttgaatgattctttgtgtgatgaagctaaacctgctttgtcaaaagaaccaaatactgaaggtgaaatggagcttcaaacaaacagtaccatagctgtaaaggaaactccgttgttagatgtggggtgtgggcatattcacaattataggaccacagattgttctacgagattggaagcacctacaccttgtgtggaaagacgtcatgctttattagtagaaccaaatatggaagaaaaaatggtgcttgacacaaacagattgtcagctatacagtacacaccacatatagaaaagaacaaggcactggaaagatcaccggcaaatacaatccgtaaagatcatctgaagaacttgataccatttacagaagaatggcttgctgtcatggagtcttgtgggcaggaagttttggaacaaaagaccggtgctgtgcaaaattctcctcctgacaaaacacctccagaaccgagtccttggtcaccggttaaacggaaggcgcaagatgttggaccatttgactgtacgaagtactccaaaagcatccgaacctctgggcaactgaaacagttggagacagaacagctggaacagccacgtcctgttgccctattttgtccgtctaattctgacgaatagctagagatggttctgtcccaatttatgactctgtactaaacaatcttatttaaaaatcgttctatcgttgcaactaaacacatactggttttctggacggaatgtgtgttccattgttttagtgtttgttagactatttcagcaacttacctatccatgtatgcaaactccattataggaac

SEQ ID NO: 214521 - DNA, 3240 bp, Zea Mays
atgccaaccacagcgccaccggtggatgcagaacctcccgagtgcccggtgtgcctctccccattcgacgcggcctccgttgtgccgcgcgtcctcccgtgcggccactccctctgcgggtcttgcatcgcggccctcccgcccgcctccgcggccgcaggcgcctcctccctccgctgccctctctgctcccagtgcgtcccctacgcccgcgcgctcggcccctcctccctccccaaaaacctcgccctcctcactcttctcccctccccatcgcatgctctcagcgccgccaccctcgtcacagcgccgcttccccacccccatccgctccacgccgcccactcgcgcctcctttcgcgcttccgccatgccgtcctccccgagtccgcctccccgctcggttccgagccaagccccgtccacctcgcgttcggatccctcggctccgacctcggcgcgccctggttctgcgcgcggggccgccccgtgagcctcctcccgatcgagacccaaccagtccccccgacgaagcaggaagccgaattctaccggcccagccacgcgacgcgggtcctcgccgcggtcgacgcgctcagcgacgcgaccaaggaggagctggccggtctgatcgcctcttccgcgaggctagcacggatggtgagcaggctctacggtgtctggatgtcccctcacgcgccgccactatggatggtctctgaacggcacccacgtacggtttcccaattgttggaggaggagattatcaatagagaggagacggtggtgcgggccggattccttgtaatggaggcatgtgaagtgatcatggggttgcacagcgaggggctggtgctggggtgcctcgggctggactgcttctgcctcgatcgttttgggcactgcatgcttgatttgaatcaggcgttggccttgtgccggggagtccaagctggggctagctcgaacagtgttcgagctttcatcgctccagaggtggcggcagtgctaggtgacacgttgcggacggagggtcgtgattttgatggtttggttggctgtacctcggatatctggtcgttgggttgtgtgttcgtggcacttcttactagggatgaacagcttgtgcctgtggcaggttggaactctgaaggactgtatgatgattgggagaaggaagtggttacaaggcttgatgccacattgcttggtactatacttgaaccattggctgcagttatagcatcgtgcttgagatatgatccaaaatcccgtccagagattgctgatgtttggaaatgtattagaggcttgttgacaaaatttggtgatgttactttagctcctgatgatgatgttgcagctcagaagagttttagatgtttactccttggggagttatcctccatgtttgttgattctggtgctgttgagtcagatgataaaacacaactgtctcgaggagctgatggcaacagttcgaatcaggatcatggaagtaatgatggtttcttaaacaatagcggaaatgatttgtcaggaatcgatggtccacagtctgtcggagtgtttaaatcatcaacactgcttgcccaccgtgattgtgtaacaggattagctgttggagagggttttgtaatgctggctcaagaactgcctattttcattctttctttcactgcaggtgggttcttgtttagctcttcttatgataaaactatcaatgtgtggtcactgcaggacttctctcatgtgcattgtttgaagggtcatgaacacaaaatcacagcaatagttgttgttgacaatgatagccattctctttgtataagtggagacagtggcagcggaatttttgtctggcgtgtggattctactctgaaggaagaacctttgaataaatggtatgaacataacgattggctctatcgaggggttaactgcttggctgtctctggaactggttatctttacactggtagcagagacaaaactatcaaggcttggtcactagaggattattcacttcgctgcactatgacaggtcataaatcaactgtgtcttgccttgcagtggccagtggtattctttacagtggaagttgggatggtaccattcgtttatggtggctcactgatcatacaccattgtctgtcctggaagatgatgcagcaggaagcatagcccctgtattgtcgatttcagcaggaaccaattttgttgcctcgtcatatgagaatggctattttaaggtctggaagaacgatgtgcttgtcaaatcagaaaagcttcaaaatggtgctgtttatgcagttaaattgagtggcaaatggctctatactggtggatgggataaagtcataaacatccaggagttgttggatgatgagtcagaggtagaactccgagacgtcgcttccattacttgcgactcaattataacttcgatactgccctgggatgaaaggctgatagttggactatccaacagggaaataaagtccgcagcagcttttggtggccagaagctgtcagaagccgaaacaaacagggcctaggtgtcgcaatggccctaggccaaaaacaaactctgttttcgtgggaactggtgccttgaagactctccgtttgaagcatcgatgtgtaagactctcttcaacggtggacgctagcgccccctcccctctctgtgacggctacaggcctccctctaccgctccctctaccgctacaacggtgccccctagcactgctacagtgctagcggctggtgggtgcgcaccctacatcaagggataccacaagggctccccttgtctcggtttgtgtgtacaaaagtatttattagttgggaaaaaattgataatagatggtgaataggtatggaaaatagtattttatgattatagtggagtataggggaagtatttagggggaaccgctgtacagggtggagatatagggggaagagaatactgacgtggcagtgggatatagggggagaaatttagggttaaccgctgaagacagtctaaagcctatgccagaggcgtctcctagaaggagagtaccaacatcttgctgcagccgcatactcgcatacaaattaccaaagtagttgtagcagtagcagactaggactctgtttatggtactggtaacttggttgtggtaattatttgagtatctgtgtgattaacaatatacaaaacatatatgcagctccagtcttttaccca

SEQ ID NO: 214522 - DNA, 3316 bp, Zea Mays
gtaaagcattttgcagtccagcagcagcagcccctctcgtactcctccgcctcccgcaatgccgcccggttccgcctccgccgccgccatcgccacccgcttcgcgacccactggatagctgacgccctcgccggcgacgagtacatagacttctccgtgctcaaggttctggtgggggcctcgtcgaagcccctcgcgggcgccccggagtttacgcgtgagcgggtcgcgctccggtgcattcaggaggtgtcgtccgtgatagccgccgggggtgacgccgcggacaccgcgggggtgcttagggttgatggcgcccaatcatgccagaatgtgctgtttcagcttatgagagaggttggtagccccggagatttggagaaggatttgcttccacatttcagtcaagacatccaggaatatttatgtaccgagaaatttatgctaccagaaacttccttccagatgctaaaacaagttgacccattgcttacatctatggccctacaatcccaaatggagcacaatgacactgaacaatgtgacaatgatcagtcactgcgcagcagccacagatgtgtaaatatagagaagcctgtgtttgtgttccctacagatgtagtcaatgaaagtgaaacaggaaatctccaaaaggatccgcctgcaccaacttctgtttttcaccaaccatgtatgccccaaagcaggtcttacgtccctccgcaagaagatactattgatgctgttggtctaggcactaggtcctcagaaaggattcctattgtggaggggaacatgtctgttggatctgtgcttgcttcagatggctgtgatgcacctttgcagggaagcattactgagcccttttcccagcaggataaacatgaccatactgctacagttgaaccaaaatcttgtaagcaaaaatctccaagtctatctcactgtgctgatggagatggggcaaatgatggtggctccagcaatcagtcatctaaggtttccattcatgaaggactgagctctcatgccacggtaacttcaggttttgacagaatcagcgatgtcttaccaacagatgcatctggacctgagcatttgcctgagtgcataacagcacaggatacaaacatgatttcacagcttgacagcaggaaagctcatttgagtgctctgcaacaggataggggtgagaaagtaacccaagatctggaagatatctctgcaaatattgggctagtggaaaaggaccatgttcatggggatctgactttgcaatctgccagtgttttgctttctataagctgcaatggtgctaatcaaggaagtaaatctgaaaccaaccttcaaccagggattgttgctacagaggataggatggctttggaagagcagaatgcagacaagtctcacttagaattcagcgataccaacatggctaatcaagctctgcatgatgattgcagcgtcatgaaaaataatgcggtacatggcgggctgactgcacagactgctgcagtgtctcaaaactgcaatgtaaccttacatgataaaacttcagaagccaattgtttttctgagccggaaaatgaaaagaacattcaaaaaaataattgtcatacttatgttccaggttcttctcaggataggggtggagaaagtgcaaaggagacatcaaatgagctaaagtctaaggacgcttctccagaaatatttgtccatttcgaggatcaatacatcattgatactttggagggcttgtctcaacaagatttgtgcttgaaatgtggcaaaggtggtcagttgttggaatgcagccgctgttttttagctgttcatagtagctgtttgggttcatcagcgacatttgaagggacaaatttattctactgcccaatatgctcttataagaaagctattgaagcatgtaaaaaggcaaacaaaacatattgcgaagctaggaagaaccttgctgctttacttagcaaaacacaagtcaccaagcaagttcagccaggagatgcccatgaaaatgaagtaaataatcttgctcatcaggttaaagagcctaatcagcagaggaggaagcagaaaataaatgctatagtgctccagaataacaatgaaatacaagttaaggattcagagaaaaggcggcaagcagtagacgaagaaggtcgcaaagaagctagtaatgacaactcatctcatgaaacaggatcttcatctcagataagatgtgattctcctttgaatcaggacgttgaggctgaccaggatggtaatcttacagcttctaaccaacctggtggttctgatgaatcagaagcaacatcttctgatgactctggcaggccatcatcttcttggcagtcatcacgttattggcgttgtacgagacacaacaaaaaaggattgcaagataaggagccagctgtatcaagtaaatctaaggaggatcaacaaatgcctacttcaccagcgaaaagaaagtctgcaaacccgcaaaagcactattccaatcctgttgcgagagctcgaagacgcagaaaactctggtggacagcagaagaagaagcaatgttgaaggatgggatggcaaaattctctccacataatgatggtcaaatttcatggacccagatactgcaatatggccgtggtgtgtttaacatcgcgcgcctgccatgtgatttgagggtcaagtggaggaacatgcagatgaaggagaggcgggcagtctcttacacacacatataactgttgtgtgtcatactaaattactaaccatgccttcatttgtttgtgtccatctgcagatataattgatgtggcagatataaccttgcctttatttgtttgtggcaatcttacacacacatataacactgatgtggtactagaacatagcgaatatgcaagtaggaatggaagtgggtttctccgaaataggatgacagaggtatagtttttcccttcttttggtaagtacggcgttgattggttgtgtgatttggtgaacctagacctactatacccgtagatgatgtaaagagattggtagacactcactatgtactctgaaaagaggtatcagagtcgacttccttttgtttcttttgggattgaatctaacagtttagatgataacatccggcagctgtgtttcatccggcaactgtgcatagcaggctcagggacacgcaatgttcttgcatgagtttagggttcaattcgtaatactccctccatttcaaaatagtatttgttttagagtattaatagatttatacaatatttggtgtatgtgtttta

SEQ ID NO: 214523 - DNA, 2886 bp, Zea Mays
gtctactttcattctactgctatgagtagcaattccccgcgcgcgctctctccgccccggcactaggccaacggcaatcaccactcaccaggtgccaaggtgtcttgtcggccccttcaccaagtgttagtcgggtccttcgccggcgacgggcaccaccagtatggacgaatcacgaaaaagagctgtctctactgcaaatggtaaaaatataagttcatcccttgatgaagactttggaaatgacttcctttcatcttggaagttaccaaaatcaggaaaagacacgattgacttcagtgttgactcagttcccaagagtagcaagaaattcagctttgacaacctagatgattttgggcttaatggagcctttgacaaattaccgtcctttcaaatgggcatgtctgatctggatttttctagccctgacaagaaaaaagtgaagcacaccagttcaaatgcagatctttttgaaaagaaaaaggaaactgacaaggacaatttctccttttcttttgatttcaatgagttgggaaagtttagtcttgatggaaagctaggaattgaagaaaagagtactaatagatttaatggcaaatctgaccctgtctcctcagaggttaaaaaggatacacaaagaggccttttagccaagggcaatgctatccttgaagagaataatagtaaggataaaatgcatacacttgatactcgcacttcaagaccttctcatctgacgaatcatgagaatgtgaagaatgccagtcaaccaacttcaaatatcgatgttgctgattcatctgacaagatgcaagaacataccagtgtcaatcctgcaacaatggaacaaactaaagtagactcagtgctcaatgacaatcctggagagcatcctaaagagatatatgcaatgaaggcagctgttaacataccttctcaggatttctcctgcggtgccatatctagtgaagatccaacacaagggccagcagatcatgtgaacagtaaagatgcacctatagtgaactgtggtaaagttcatgtatcgagggagagtaatgatgatgagcagtcgaatggtttacaatccagggacaccagcattattaattccaatgtgtcaagaagaccgtcgggccaatttaactcccagaatgaggttcttgaggaaagtgtttcgcttaatgaaggaagtcaagacaaccaaagttttagtggcgctcctaagaagtttttaaagaagacatcacatgggacaacaaataccgaggaagagatttcaggtcccaagattctctcttgttcagtgcagagggaaatcagaagtgttgaacctgcaccgatgaaggagagaggaagcttctctcttttatccaagtctgtacatatgaaagcaaccagggttgaactaacttcagaaacagccttaaatcaatcatccagtgcaagtaaagtgataaaaaagatgactacacatcctacagacttgaagagggaacacatgcaagctaatgcagtccctcacaaatctaaaactgctttatcaaaaacatacagcaagctagcatcaaatgggctattggccacctccatgaatgccaaagttgacacgaatgccaaattaggccttgagcctcctatctcggggaagtcgtctctactgaatgctcgaagcagcacaccacatagcgctggacataaagttgttgcaagtcatgtgcttctaaaagctagcaatacttctgattcattgcaaggtgttccttccaaagataataaatcgtcaacaatttctcaactgacaggagcaagaatcacaaaattaggaatcagaagtctgaaatctgacatggccctagagaaagaatcagtacaagtgagtgggacaaagtgttccccggtaacaacatccagaatccttgactccattcctgaaggaaaacctgcattgcctagcccatccataatgcagaaagttcctgaggaatcagctctaaatccaaaagctcctaaagtgctcaaacacatcatgagatctccagctgtaagaaaatcacctagaactgttccggagttgggaaatgaaatgattctgggaagtggaactccaaaagctcatgtggataatgcaatctcctcacgtatgccacctgggatgggagccatttcagatctagagttgcctgtgttagaaaatgatggaaacatagaaaaagctgaggcttgtagaaaggagcttgaggatatatgcattctattgaaaaggaaacatgcagaagctaaagagctagcagttcgggctatcgttaacaacaatacgatgctgatgttaaaccacccgatgattgaggagaaaatttactctattcagaaatttgcgaacgacctgaaatccaagaagtacttatttgaggaagttggcaccattaactctcactgacgtgggacaaatgcagggagcaaatgacttatccagcggagcatgggtaatgtaaatgcaacaaaagagctcaggcgtccagcgtaaatgcaatcttgaagtaacttgaataactaccttcctcgtgcattctgctacatggttggcttctgtagatgcgtccgtttacactttacacagcgtagcaactgttgagtgacctaatacttctagtagtgagatatgaccttgtggactaaatgactagatgggcactgctgtactaggtaatacctggttccatctattccaattgcagttggtgacaaaacgttcacattggatttatgataggtagaagttgcaagagcacagtgtagacaaccatggtggttgatgactaggccgccctttctaccctgagtttgacgtatgcggtcaaaagctatagtaatttttgttgc

SEQ ID NO: 214524 - DNA, 838 bp, Zea Mays
tctactttcattctactgctatgagtagcaattccccgcgcgcgctctctccgccccggcactaggccaacggcaatcaccactcaccaggtgccaaggtgtcttgtcggccccttcaccaagtgttagtcgggtccttcgccggcgacgggcaccaccagtatggacgaatcacgaaaaagagctgtctctactgcaaatgatatgcattctattgaaaaggaaacatgcagaagctaaagagctagcagttcgggctatcgttaacaacaatacgatgctgatgttaaaccacccgatgattgaggagaaattactctattcagaaatttgcgaacgacctgaaatccaagaagtacttatttgaggaagttggcaccattaactctcactgacgtgggacaaatgcagggagcaaatgacttatccagcggagcatgggtaatgtaaatgcaacaaaagagctcaggcgtccagcgtaaatgcaatcttgaagtaacttgaataactaccttcctcgtgcattctgctacatggttggcttctgtagatgcgtccgtttacactttacacagcgtagcaactgttgagtgacctaatacttctagtagtgagatatgaccttgtggactaaatgactagatgggcactgctgtactaggtaatacctggttccatctattccaattgcagttggtgacaaaacgttcacattggatttatgataggtagaagttgcaagagcacagtgtagacaaccatggtggttgatgactaggccgccctttctaccctgagtttgacgtatgcggtcaaaagctatagtaatttttgttgc

SEQ ID NO: 214525 - DNA, 2632 bp, Zea Mays
ctactttcattctactgctatgagtagcaattccccgcgcgcgctctctccgccccggcactaggccaacggcaatcaccactcaccaggtgccaaggtgtcttgtcggccccttcaccaagtgttagtcgggtccttcgccggcgacgggcaccaccagtatggacgaatcacgaaaaagagctgtctctactgcaaatggtaaaaatataagttcatcccttgatgaagactttggaaatgacttcctttcatcttggaagttaccaaaatcaggaaaagacacgattgacttcagtgttgactcagttcccaagagtagcaagaaattcagctttgacaacctagatgattttgggcttaatggagcctttgacaaattaccgtcctttcaaatgggcatgtctgatctggatttttctagccctgacaagaaaaaagtgaagcacaccagttcaaatgcagatctttttgaaaagaaaaaggaaactgacaaggacaatttctccttttcttttgatttcaatgagttgggaaagtttagtcttgatggaaagctaggaattgaagaaaagagtactaatagatttaatggcaaatctgaccctgtctcctcagaggttaaaaaggatacacaaagaggccttttagccaagggcaatgctatccttgaagagaataatagtaaggataaaatgcatacacttgatactcgcacttcaagaccttctcatctgacgaatcatgagaatgtgaagaatgccagtcaaccaacttcaaatatcgatgttgctgattcatctgacaagatgcaagaacataccagtgtcaatcctgcaacaatggaacaaactaaagtagactcagtgctcaatgacaatcctggagagcatcctaaagagatatatgcaatgaaggcagctgttaacataccttctcaggatttctcctgcggtgccatatctagtgaagatccaacacaagggccagcagatcatgtgaacagtaaagatgcacctatagtgaactgtggtaaagttcatgtatcgagggagagtaatgatgatgagcagtcgaatggtttacaatccagggacaccagcattattaattccaatgtgtcaagaagaccgtcgggccaatttaactcccagaatgaggttcttgaggaaagtgtttcgcttaatgaaggaagtcaagacaaccaaagttttagtggcgctcctaagaagtttttaaagaagacatcacatgggacaacaaataccgaggaagagatttcaggtcccaagattctctcttgttcagtgcagagggaaatcagaagtgttgaacctgcaccgatgaaggagagaggaagcttctctcttttatccaagtctgtacatatgaaagcaaccagggttgaactaacttcagaaacagccttaaatcaatcatccagtgcaagtaaagtgataaaaaagatgactacacatcctacagacttgaagagggaacacatgcaagctaatgcagtccctcacaaatctaaaactgctttatcaaaaacatacagcaagctagcatcaaatgggctattggccacctccatgaatgccaaagttgacacgaatgccaaattaggccttgagcctcctatctcggggaagtcgtctctactgaatgctcgaagcagcacaccacatagcgctggacataaagttgttgcaagtcatgtgcttctaaaagctagcaatacttctgattcattgcaaggtgttccttccaaagataataaatcgtcaacaatttctcaactgacaggagcaaggaatcagaagtctgaaatctgacatggccctagagaaagaatcagtacaagtgagtgggacaaagtgttccccggtaacaacatccagaatccttgactccattcctgaaggaaaacctgcattgcctagcccatccataatgcagaaagttcctgaggaatcagctctaaatccaaaagctcctaaagtgctcaaacacatcatgagatctccagctgtaagaaaatcacctagaactgttccggagttgggaaatgaaatgattctgggaagtggaactccaaaagctcatgtggataatgcaatctcctcacgtatgccacctgggatgggagccatttcagatctagagttgcctgtgttagaaaatgatggaaacatagaaaaagctgaggcttgtagaaaggagcttgaggatatatgcattctattgaaaaggaaacatgcagaagctaaagagctagcagttcgggctatcgttaacaacaatacgatgctgatgttaaaccacccgatgattgaggagaaaatatcctaagggggcgtttggatcccttcattttagaggaattggaattcactcaataaaataacttatttagtttggaatttgacattccaccactttccaaagtttagatataagtctatctcaaattcatggggtggaggatgggaaatgactttatgtattagtagaatttgtttctactctgtaacttacatgacactcttcgtctcactcttctatagtaaaaatgtagcacataaatatctctgacatcttgctaataatagtatacaaatatattttgcat

SEQ ID NO: 214526 - DNA, 2682 bp, Zea Mays
ctactttcattctactgctatgagtagcaattccccgcgcgcgctctctccgccccggcactaggccaacggcaatcaccactcaccaggtgccaaggtgtcttgtcggccccttcaccaagtgttagtcgggtccttcgccggcgacgggcaccaccagtatggacgaatcacgaaaaagagctgtctctactgcaaatgatgaagactttggaaatgacttcctttcatcttggaagttaccaaaatcaggaaaagacacgattgacttcagtgttgactcagttcccaagagtagcaagaaattcagctttgacaacctagatgattttgggcttaatggagcctttgacaaattaccgtcctttcaaatgggcatgtctgatctggatttttctagccctgacaagaaaaaagtgaagcacaccagttcaaatgcagatctttttgaaaagaaaaaggaaactgacaaggacaatttctccttttcttttgatttcaatgagttgggaaagtttagtcttgatggaaagctaggaattgaagaaaagagtactaatagatttaatggcaaatctgaccctgtctcctcagaggttaaaaaggatacacaaagaggccttttagccaagggcaatgctatccttgaagagaataatagtaaggataaaatgcatacacttgatactcgcacttcaagaccttctcatctgacgaatcatgagaatgtgaagaatgccagtcaaccaacttcaaatatcgatgttgctgattcatctgacaagatgcaagaacataccagtgtcaatcctgcaacaatggaacaaactaaagtagactcagtgctcaatgacaatcctggagagcatcctaaagagatatatgcaatgaaggcagctgttaacataccttctcaggatttctcctgcggtgccatatctagtgaagatccaacacaagggccagcagatcatgtgaacagtaaagatgcacctatagtgaactgtggtaaagttcatgtatcgagggagagtaatgatgatgagcagtcgaatggtttacaatccagggacaccagcattattaattccaatgtgtcaagaagaccgtcgggccaatttaactcccagaatgaggttcttgaggaaagtgtttcgcttaatgaaggaagtcaagacaaccaaagttttagtggcgctcctaagaagtttttaaagaagacatcacatgggacaacaaataccgaggaagagatttcaggtcccaagattctctcttgttcagtgcagagggaaatcagaagtgttgaacctgcaccgatgaaggagagaggaagcttctctcttttatccaagtctgtacatatgaaagcaaccagggttgaactaacttcagaaacagccttaaatcaatcatccagtgcaagtaaagtgataaaaaagatgactacacatcctacagacttgaagagggaacacatgcaagctaatgcagtccctcacaaatctaaaactgctttatcaaaaacatacagcaagctagcatcaaatgggctattggccacctccatgaatgccaaagttgacacgaatgccaaattaggccttgagcctcctatctcggggaagtcgtctctactgaatgctcgaagcagcacaccacatagcgctggacataaagttgttgcaagtcatgtgcttctaaaagctagcaatacttctgattcattgcaaggtgttccttccaaagataataaatcgtcaacaatttctcaactgacaggagcaagaatcacaaaattaggaatcagaagtctgaaatctgacatggccctagagaaagaatcagtacaagtgagtgggacaaagtgttccccggtaacaacatccagaatccttgactccattcctgaaggaaaacctgcattgcctagcccatccataatgcagaaagttcctgaggaatcagctctaaatccaaaagctcctaaagtgctcaaacacatcatgagatctccagctgtaagaaaatcacctagaactgttccggagttgggaaatgaaatgatatgcattctattgaaaaggaaacatgcagaagctaaagagctagcagttcgggctatcgttaacaacaatacgatgctgatgttaaaccacccgatgattgaggagaaaatttactctattcagaaatttgcgaacgacctgaaatccaagaagtacttatttgaggaagttggcaccattaactctggagcaaatgacttatccagcggagcatgggtaatgtaaatgcaacaaaagagctcaggcgtccagcgtaaatgcaatcttgaagtaacttgaataactaccttcctcgtgcattctgctacatggttggcttctgtagatgcgtccgtttacactttacacagcgtagcaactgttgagtgacctaatacttctagtagtgagatatgaccttgtggactaaatgactagatgggcactgctgtactaggtaatacctggttccatctattccaattgcagttggtgacaaaacgttcacattggatttatgataggtagaagttgcaagagcacagtgtagacaaccatggtggttgatgactaggccgccctttctaccctgagtttgacgtatgcggtcaaaagctatagtaatttttgttgc

SEQ ID NO: 214527 - DNA, 2637 bp, Zea Mays
ctactttcattctactgctatgagtagcaattccccgcgcgcgctctctccgccccggcactaggccaacggcaatcaccactcaccaggtgccaaggtgtcttgtcggccccttcaccaagtgttagtcgggtccttcgccggcgacgggcaccaccagtatggacgaatcacgaaaaagagctgtctctactgcaaatgatgaagactttggaaatgacttcctttcatcttggaagttaccaaaatcaggaaaagacacgattgacttcagtgttgactcagttcccaagagtagcaagaaattcagctttgacaacctagatgattttgggcttaatggagcctttgacaaattaccgtcctttcaaatgggcatgtctgatctggatttttctagccctgacaagaaaaaagtgaagcacaccagttcaaatgcagatctttttgaaaagaaaaaggaaactgacaaggacaatttctccttttcttttgatttcaatgagttgggaaagtttagtcttgatggaaagctaggaattgaagaaaagagtactaatagatttaatggcaaatctgaccctgtctcctcagaggttaaaaaggatacacaaagaggccttttagccaagggcaatgctatccttgaagagaataatagtaaggataaaatgcatacacttgatactcgcacttcaagaccttctcatctgacgaatcatgagaatgtgaagaatgccagtcaaccaacttcaaatatcgatgttgctgattcatctgacaagatgcaagaacataccagtgtcaatcctgcaacaatggaacaaactaaagtagactcagtgctcaatgacaatcctggagagcatcctaaagagatatatgcaatgaaggcagctgttaacataccttctcaggatttctcctgcggtgccatatctagtgaagatccaacacaagggccagcagatcatgtgaacagtaaagatgcacctatagtgaactgtggtaaagttcatgtatcgagggagagtaatgatgatgagcagtcgaatggtttacaatccagggacaccagcattattaattccaatgtgtcaagaagaccgtcgggccaatttaactcccagaatgaggttcttgaggaaagtgtttcgcttaatgaaggaagtcaagacaaccaaagttttagtggcgctcctaagaagtttttaaagaagacatcacatgggacaacaaataccgaggaagagatttcaggtcccaagattctctcttgttcagtgcagagggaaatcagaagtgttgaacctgcaccgatgaaggagagaggaagcttctctcttttatccaagtctgtacatatgaaagcaaccagggttgaactaacttcagaaacagccttaaatcaatcatccagtgcaagtaaagtgataaaaaagatgactacacatcctacagacttgaagagggaacacatgcaagctaatgcagtccctcacaaatctaaaactgctttatcaaaaacatacagcaagctagcatcaaatgggctattggccacctccatgaatgccaaagttgacacgaatgccaaattaggccttgagcctcctatctcggggaagtcgtctctactgaatgctcgaagcagcacaccacatagcgctggacataaagttgttgcaagtcatgtgcttctaaaagctagcaatacttctgattcattgcaaggtgttccttccaaagataataaatcgtcaacaatttctcaactgacaggagcaagaatcacaaaattaggaatcagaagtctgaaatctgacatggccctagagaaagaatcagtacaagtgagtgggacaaagtgttccccggtaacaacatccagaatccttgactccattcctgaaggaaaacctgcattgcctagcccatccataatgcagaaagttcctgaggaatcagctctaaatccaaaagctcctaaagtgctcaaacacatcatgagatctccagctgtaagaaaatcacctagaactgttccggagttgggaaatgaaatgatatgcattctattgaaaaggaaacatgcagaagctaaagagctagcagttcgggctatcgttaacaacaatacgatgctgatgttaaaccacccgatgattgaggagaaaatttactctattcagaaatttgcgaacgacctgaaatccaagaagtacttatttgaggaagttggcaccattaactctcactgacgtgggacaaatgcagggagcaaatgacttatccagcggagcatgggtaatgtaaatgcaacaaaagagctcaggcgtccagcgtaaatgcaatcttgaagtaacttgaataactaccttcctcgtgcattctgctacatggttggcttctgtagatgcgtccgtttacactttacacagcgtagcaactgttgagtgacctaatacttctagtagtgagatatgaccttgtggactaaatgactagatgggcactgctgtactaggtagaagttgcaagagcacagtgtagacaaccatggtggttgatgactaggccgccctttctaccctgagtttgacgtatgcggtcaaaagctatagtaatttttgttgc

SEQ ID NO: 214528 - DNA, 2846 bp, Zea Mays
ctactttcattctactgctatgagtagcaattccccgcgcgcgctctctccgccccggcactaggccaacggcaatcaccactcaccaggtgccaaggtgtcttgtcggccccttcaccaagtgttagtcgggtccttcgccggcgacgggcaccaccagtatggacgaatcacgaaaaagagctgtctctactgcaaatgatgaagactttggaaatgacttcctttcatcttggaagttaccaaaatcaggaaaagacacgattgacttcagtgttgactcagttcccaagagtagcaagaaattcagctttgacaacctagatgattttgggcttaatggagcctttgacaaattaccgtcctttcaaatgggcatgtctgatctggatttttctagccctgacaagaaaaaagtgaagcacaccagttcaaatgcagatctttttgaaaagaaaaaggaaactgacaaggacaatttctccttttcttttgatttcaatgagttgggaaagtttagtcttgatggaaagctaggaattgaagaaaagagtactaatagatttaatggcaaatctgaccctgtctcctcagaggttaaaaaggatacacaaagaggccttttagccaagggcaatgctatccttgaagagaataatagtaaggataaaatgcatacacttgatactcgcacttcaagaccttctcatctgacgaatcatgagaatgtgaagaatgccagtcaaccaacttcaaatatcgatgttgctgattcatctgacaagatgcaagaacataccagtgtcaatcctgcaacaatggaacaaactaaagtagactcagtgctcaatgacaatcctggagagcatcctaaagagatatatgcaatgaaggcagctgttaacataccttctcaggatttctcctgcggtgccatatctagtgaagatccaacacaagggccagcagatcatgtgaacagtaaagatgcacctatagtgaactgtggtaaagttcatgtatcgagggagagtaatgatgatgagcagtcgaatggtttacaatccagggacaccagcattattaattccaatgtgtcaagaagaccgtcgggccaatttaactcccagaatgaggttcttgaggaaagtgtttcgcttaatgaaggaagtcaagacaaccaaagttttagtggcgctcctaagaagtttttaaagaagacatcacatgggacaacaaataccgaggaagagatttcaggtcccaagattctctcttgttcagtgcagagggaaatcagaagtgttgaacctgcaccgatgaaggagagaggaagcttctctcttttatccaagtctgtacatatgaaagcaaccagggttgaactaacttcagaaacagccttaaatcaatcatccagtgcaagtaaagtgataaaaaagatgactacacatcctacagacttgaagagggaacacatgcaagctaatgcagtccctcacaaatctaaaactgctttatcaaaaacatacagcaagctagcatcaaatgggctattggccacctccatgaatgccaaagttgacacgaatgccaaattaggccttgagcctcctatctcggggaagtcgtctctactgaatgctcgaagcagcacaccacatagcgctggacataaagttgttgcaagtcatgtgcttctaaaagctagcaatacttctgattcattgcaaggtgttccttccaaagataataaatcgtcaacaatttctcaactgacaggagcaaggaatcagaagtctgaaatctgacatggccctagagaaagaatcagtacaagtgagtgggacaaagtgttccccggtaacaacatccagaatccttgactccattcctgaaggaaaacctgcattgcctagcccatccataatgcagaaagttcctgaggaatcagctctaaatccaaaagctcctaaagtgctcaaacacatcatgagatctccagctgtaagaaaatcacctagaactgttccggagttgggaaatgaaatgattctgggaagtggaactccaaaagctcatgtggataatgcaatctcctcacgtatgccacctgggatgggagccatttcagatctagagttgcctgtgttagaaaatgatggaaacatagaaaaagctgaggcttgtagaaaggagcttgaggatatatgcattctattgaaaaggaaacatgcagaagctaaagagctagcagttcgggctatcgttaacaacaatacgatgctgatgttaaaccacccgatgattgaggagaaaatttactctattcagaaatttgcgaacgacctgaaatccaagaagtacttatttgaggaagttggcaccattaactctcactgacgtgggacaaatgcagggagcaaatgacttatccagcggagcatgggtaatgtaaatgcaacaaaagagctcaggcgtccagcgtaaatgcaatcttgaagtaacttgaataactaccttcctcgtgcattctgctacatggttggcttctgtagatgcgtccgtttacactttacacagcgtagcaactgttgagtgacctaatacttctagtagtgagatatgaccttgtggactaaatgactagatgggcactgctgtactaggtaatacctggttccatctattccaattgcagttggtgacaaaacgttcacattggatttatgataggtagaagttgcaagagcacagtgtagacaaccatggtggttgatgactaggccgccctttctaccctgagtttgacgtatgcggtcaaaagctatagtaatttttgttgc

SEQ ID NO: 214529 - DNA, 2945 bp, Zea Mays
ctactttcattctactgctatgagtagcaattccccgcgcgcgctctctccgccccggcactaggccaacggcaatcaccactcaccaggtgccaaggtgtcttgtcggccccttcaccaagtgttagtcgggtccttcgccggcgacgggcaccaccagtatggacgaatcacgaaaaagagctgtctctactgcaaatggtaaaaatataagttcatcccttgatgaagactttggaaatgacttcctttcatcttggaagttaccaaaatcaggaaaagacacgattgacttcagtgttgactcagttcccaagagtagcaagaaattcagctttgacaacctagatgattttgggcttaatggagcctttgacaaattaccgtcctttcaaatgggcatgtctgatctggatttttctagccctgacaagaaaaaagtgaagcacaccagttcaaatgcagatctttttgaaaagaaaaaggaaactgacaaggacaatttctccttttcttttgatttcaatgagttgggaaagtttagtcttgatggaaagctaggaattgaagaaaagagtactaatagatttaatggcaaatctgaccctgtctcctcagaggttaaaaaggatacacaaagaggccttttagccaagggcaatgctatccttgaagagaataatagtaaggataaaatgcatacacttgatactcgcacttcaagaccttctcatctgacgaatcatgagaatgtgaagaatgccagtcaaccaacttcaaatatcgatgttgctgattcatctgacaagatgcaagaacataccagtgtcaatcctgcaacaatggaacaaactaaagtagactcagtgctcaatgacaatcctggagagcatcctaaagagatatatgcaatgaaggcagctgttaacataccttctcaggatttctcctgcggtgccatatctagtgaagatccaacacaagggccagcagatcatgtgaacagtaaagatgcacctatagtgaactgtggtaaagttcatgtatcgagggagagtaatgatgatgagcagtcgaatggtttacaatccagggacaccagcattattaattccaatgtgtcaagaagaccgtcgggccaatttaactcccagaatgaggttcttgaggaaagtgtttcgcttaatgaaggaagtcaagacaaccaaagttttagtggcgctcctaagaagtttttaaagaagacatcacatgggacaacaaataccgaggaagagatttcaggtcccaagattctctcttgttcagtgcagagggaaatcagaagtgttgaacctgcaccgatgaaggagagaggaagcttctctcttttatccaagtctgtacatatgaaagcaaccagggttgaactaacttcagaaacagccttaaatcaatcatccagtgcaagtaaagtgataaaaaagatgactacacatcctacagacttgaagagggaacacatgcaagctaatgcagtccctcacaaatctaaaactgctttatcaaaaacatacagcaagctagcatcaaatgggctattggccacctccatgaatgccaaagttgacacgaatgccaaattaggccttgagcctcctatctcggggaagtcgtctctactgaatgctcgaagcagcacaccacatagcgctggacataaagttgttgcaagtcatgtgcttctaaaagctagcaatacttctgattcattgcaaggtgttccttccaaagataataaatcgtcaacaatttctcaactgacaggagcaagaatcacaaaattaggaatcagaagtctgaaatctgacatggccctagagaaagaatcagtacaagtgagtgggacaaagtgttccccggtaacaacatccagaatccttgactccattcctgaaggaaaacctgcattgcctagcccatccataatgcagaaagttcctgaggaatcagctctaaatccaaaagctcctaaagtgctcaaacacatcatgagatctccagctgtaagaaaatcacctagaactgttccggagttgggaaatgaaatgattctgggaagtggaactccaaaagctcatgtggataatgcaatctcctcacgtatgccacctgggatgggagccatttcagatctagagttgcctgtgttagaaaatgatggaaacatagaaaaagctgaggcttgtagaaaggagcttgaggatatatgcattctattgaaaaggaaacatgcagaagctaaagagctagcagttcgggctatcgttaacaacaatacgatgctgatgttaaaccacccgatgattgaggagaaaatttactctattcagaaatttgcgaacgacctgaaatccaagaagtacttatttgaggaagttggcaccattaactctcactgacgtgggacaaatgcagggagcaaatgacttatccagcggagcatggtgtgtttcaggaatatctctactgatggacgaagcgaaccttcggacgaaaaggcgtgtagagaagcttcgcacatgcgtgcgagtgaaagggtgttagctaaagttgatagcttcggcgacaatagagaggcttcgggtgcaagccaaaggaaaaggcgacgaaggccttaacccgcgcagccgaagatggagaaaatacgctactgccctaatgacgtctgtaaacattgaatggcacaattgtaatcctgtactaggtcggttcgtctcggttcgtctctcctataaatagatggacagtacctcgtataaagtacatttatccaggtgctacagcttcacatagcccagcctacgaaacaccttcgtgctatcttgcatcaagaagtcaaaggtatgattgtaagcttgtcttgtatgagaagagaaataaaatgttaaggcacacgagacgag

SEQ ID NO: 214530 - DNA, 2999 bp, Zea Mays
ctactttcattctactgctatgagtagcaattccccgcgcgcgctctctccgccccggcactaggccaacggcaatcaccactcaccaggtgccaaggtgtcttgtcggccccttcaccaagtgttagtcgggtccttcgccggcgacgggcaccaccagtatggacgaatcacgaaaaagagctgtctctactgcaaatggtaaaaatataagttcatcccttgatgaagactttggaaatgacttcctttcatcttggaagttaccaaaatcaggaaaagacacgattgacttcagtgttgactcagttcccaagagtagcaagaaattcagctttgacaacctagatgattttgggcttaatggagcctttgacaaattaccgtcctttcaaatgggcatgtctgatctggatttttctagccctgacaagaaaaaagtgaagcacaccagttcaaatgcagatctttttgaaaagaaaaaggaaactgacaaggacaatttctccttttcttttgatttcaatgagttgggaaagtttagtcttgatggaaagctaggaattgaagaaaagagtactaatagatttaatggcaaatctgaccctgtctcctcagaggttaaaaaggatacacaaagaggccttttagccaagggcaatgctatccttgaagagaataatagtaaggataaaatgcatacacttgatactcgcacttcaagaccttctcatctgacgaatcatgagaatgtgaagaatgccagtcaaccaacttcaaatatcgatgttgctgattcatctgacaagatgcaagaacataccagtgtcaatcctgcaacaatggaacaaactaaagtagactcagtgctcaatgacaatcctggagagcatcctaaagagatatatgcaatgaaggcagctgttaacataccttctcaggatttctcctgcggtgccatatctagtgaagatccaacacaagggccagcagatcatgtgaacagtaaagatgcacctatagtgaactgtggtaaagttcatgtatcgagggagagtaatgatgatgagcagtcgaatggtttacaatccagggacaccagcattattaattccaatgtgtcaagaagaccgtcgggccaatttaactcccagaatgaggttcttgaggaaagtgtttcgcttaatgaaggaagtcaagacaaccaaagttttagtggcgctcctaagaagtttttaaagaagacatcacatgggacaacaaataccgaggaagagatttcaggtcccaagattctctcttgttcagtgcagagggaaatcagaagtgttgaacctgcaccgatgaaggagagaggaagcttctctcttttatccaagtctgtacatatgaaagcaaccagggttgaactaacttcagaaacagccttaaatcaatcatccagtgcaagtaaagtgataaaaaagatgactacacatcctacagacttgaagagggaacacatgcaagctaatgcagtccctcacaaatctaaaactgctttatcaaaaacatacagcaagctagcatcaaatgggctattggccacctccatgaatgccaaagttgacacgaatgccaaattaggccttgagcctcctatctcggggaagtcgtctctactgaatgctcgaagcagcacaccacatagcgctggacataaagttgttgcaagtcatgtgcttctaaaagctagcaatacttctgattcattgcaaggtgttccttccaaagataataaatcgtcaacaatttctcaactgacaggagcaagaatcacaaaattaggaatcagaagtctgaaatctgacatggccctagagaaagaatcagtacaagtgagtgggacaaagtgttccccggtaacaacatccagaatccttgactccattcctgaaggaaaacctgcattgcctagcccatccataatgcagaaagttcctgaggaatcagctctaaatccaaaagctcctaaagtgctcaaacacatcatgagatctccagctgtaagaaaatcacctagaactgttccggagttgggaaatgaaatgattctgggaagtggaactccaaaagctcatgtggataatgcaatctcctcacgtatgccacctgggatgggagccatttcagatctagagttgcctgtgttagaaaatgatggaaacatagaaaaagctgaggcttgtagaaaggagcttgaggatatatgcattctattgaaaaggaaacatgcagaagctaaagagctagcagttcgggctatcgttaacaacaatacgatgctgatgttaaaccacccgatgattgaggagaaaatttactctattcagaaatttgcgaacgacctgaaatccaagaagtacttatttgaggaagttggcaccattaactctcactgacgtgggacaaatgcagggagcaaatgacttatccagcggagcatgggtaatgtaaatgcaacaaaagagctcaggcgtccagcgtaaatgcaatcttgaatgtgtttcaggaatatctctactgatggacgaagcgaaccttcggacgaaaaggcgtgtagagaagcttcgcacatgcgtgcgagtgaaagggtgttagctaaagttgatagcttcggcgacaatagagaggcttcgggtgcaagccaaaggaaaaggcgacgaaggccttaacccgcgcagccgaagatggagaaaatacgctactgccctaatgacgtctgtaaacattgaatggcacaattgtaatcctgtactaggtcggttcgtctcggttcgtctctcctataaatagatggacagtacctcgtataaagtacatttatccaggtgctacagcttcacatagcccagcctacgaaacaccttcgtgctatcttgcatcaagaagtcaaaggtatgattgtaagcttgtcttgtatgagaagagaaataaaatgttaaggcacacgagacgag

SEQ ID NO: 214531 - DNA, 2383 bp, Zea Mays
tttctaacgtattaccccctttttccttgaatgtggtctgagtttgttgacagtatggacgaatcacgaaaaagagctgtctctactgcaaatggtaaaaatataagttcatcccttgatgaagactttggaaatgacttcctttcatcttggaagttaccaaaatcaggaaaagacacgattgacttcagtgttgactcagttcccaagagtagcaagaaattcagctttgacaacctagatgattttgggcttaatggagcctttgacaaattaccgtcctttcaaatgggcatgtctgatctggatttttctagccctgacaagaaaaaagtgaagcacaccagttcaaatgcagatctttttgaaaagaaaaaggaaactgacaaggacaatttctccttttcttttgatttcaatgagttgggaaagtttagtcttgatggaaagctaggaattgaagaaaagagtactaatagatttaatggcaaatctgaccctgtctcctcagaggttaaaaaggatacacaaagaggccttttagccaagggcaatgctatccttgaagagaataatagtaaggataaaatgcatacacttgatactcgcacttcaagaccttctcatctgacgaatcatgagaatgtgaagaatgccagtcaaccaacttcaaatatcgatgttgctgattcatctgacaagatgcaagaacataccagtgtcaatcctgcaacaatggaacaaactaaagtagactcagtgctcaatgacaatcctggagagcatcctaaagagatatatgcaatgaaggcagctgttaacataccttctcaggatttctcctgcggtgccatatctagtgaagatccaacacaagggccagcagatcatgtgaacagtaaagatgcacctatagtgaactgtggtaaagttcatgtatcgagggagagtaatgatgatgagcagtcgaatggtttacaatccagggacaccagcattattaattccaatgtgtcaagaagaccgtcgggccaatttaactcccagaatgaggttcttgaggaaagtgtttcgcttaatgaaggaagtcaagacaaccaaagttttagtggcgctcctaagaagtttttaaagaagacatcacatgggacaacaaataccgaggaagagatttcaggtcccaagattctctcttgttcagtgcagagggaaatcagaagtgttgaacctgcaccgatgaaggagagaggaagcttctctcttttatccaagtctgtacatatgaaagcaaccagggttgaactaacttcagaaacagccttaaatcaatcatccagtgcaagtaaagtgataaaaaagatgactacacatcctacagacttgaagagggaacacatgcaagctaatgcagtccctcacaaatctaaaactgctttatcaaaaacatacagcaagctagcatcaaatgggctattggccacctccatgaatgccaaagttgacacgaatgccaaattaggccttgagcctcctatctcggggaagtcgtctctactgaatgctcgaagcagcacaccacatagcgctggacataaagttgttgcaagtcatgtgcttctaaaagctagcaatacttctgattcattgcaaggtgttccttccaaagataataaatcgtcaacaatttctcaactgacaggagcaagaatcacaaaattaggaatcagaagtctgaaatctgacatggccctagagaaagaatcagtacaagtgagtgggacaaagtgttccccggtaacaacatccagaatccttgactccattcctgaaggaaaacctgcattgcctagcccatccataatgcagaaagttcctgaggaatcagctctaaatccaaaagctcctaaagtgctcaaacacatcatgagatctccagctgtaagaaaatcacctagaactgttccggagttgggaaatgaaatgatatgcattctattgaaaaggaaacatgcagaagctaaagagctagcagttcgggctatcgttaacaacaatacgatgctgatgttaaaccacccgatgattgaggagaaaatatcctaagggggcgtttggatcccttcattttagaggaattggaattcactcaataaaataacttatttagtttggaatttgacattccaccactttccaaagtttagatataagtctatctcaaattcatggggtggaggatgggaaatgactttatgtattagtagaatttgtttctactctgtaacttacatgacactcttcgtctcactcttctatagtaaaaatgtagcacataaatatctctgacatcttgctaataatagtatacaaatatattttgcat

SEQ ID NO: 214532 - DNA, 2731 bp, Zea Mays
tttctaacgtattaccccctttttccttgaatgtggtctgagtttgttgacagtatggacgaatcacgaaaaagagctgtctctactgcaaatgatgaagactttggaaatgacttcctttcatcttggaagttaccaaaatcaggaaaagacacgattgacttcagtgttgactcagttcccaagagtagcaagaaattcagctttgacaacctagatgattttgggcttaatggagcctttgacaaattaccgtcctttcaaatgggcatgtctgatctggatttttctagccctgacaagaaaaaagtgaagcacaccagttcaaatgcagatctttttgaaaagaaaaaggaaactgacaaggacaatttctccttttcttttgatttcaatgagttgggaaagtttagtcttgatggaaagctaggaattgaagaaaagagtactaatagatttaatggcaaatctgaccctgtctcctcagaggttaaaaaggatacacaaagaggccttttagccaagggcaatgctatccttgaagagaataatagtaaggataaaatgcatacacttgatactcgcacttcaagaccttctcatctgacgaatcatgagaatgtgaagaatgccagtcaaccaacttcaaatatcgatgttgctgattcatctgacaagatgcaagaacataccagtgtcaatcctgcaacaatggaacaaactaaagtagactcagtgctcaatgacaatcctggagagcatcctaaagagatatatgcaatgaaggcagctgttaacataccttctcaggatttctcctgcggtgccatatctagtgaagatccaacacaagggccagcagatcatgtgaacagtaaagatgcacctatagtgaactgtggtaaagttcatgtatcgagggagagtaatgatgatgagcagtcgaatggtttacaatccagggacaccagcattattaattccaatgtgtcaagaagaccgtcgggccaatttaactcccagaatgaggttcttgaggaaagtgtttcgcttaatgaaggaagtcaagacaaccaaagttttagtggcgctcctaagaagtttttaaagaagacatcacatgggacaacaaataccgaggaagagatttcaggtcccaagattctctcttgttcagtgcagagggaaatcagaagtgttgaacctgcaccgatgaaggagagaggaagcttctctcttttatccaagtctgtacatatgaaagcaaccagggttgaactaacttcagaaacagccttaaatcaatcatccagtgcaagtaaagtgataaaaaagatgactacacatcctacagacttgaagagggaacacatgcaagctaatgcagtccctcacaaatctaaaactgctttatcaaaaacatacagcaagctagcatcaaatgggctattggccacctccatgaatgccaaagttgacacgaatgccaaattaggccttgagcctcctatctcggggaagtcgtctctactgaatgctcgaagcagcacaccacatagcgctggacataaagttgttgcaagtcatgtgcttctaaaagctagcaatacttctgattcattgcaaggtgttccttccaaagataataaatcgtcaacaatttctcaactgacaggagcaagaatcacaaaattaggaatcagaagtctgaaatctgacatggccctagagaaagaatcagtacaagtgagtgggacaaagtgttccccggtaacaacatccagaatccttgactccattcctgaaggaaaacctgcattgcctagcccatccataatgcagaaagttcctgaggaatcagctctaaatccaaaagctcctaaagtgctcaaacacatcatgagatctccagctgtaagaaaatcacctagaactgttccggagttgggaaatgaaatgattctgggaagtggaactccaaaagctcatgtggataatgcaatctcctcacgtatgccacctgggatgggagccatttcagatctagagttgcctgtgttagaaaatgatggaaacatagaaaaagctgaggcttgtagaaaggagcttgaggatatatgcattctattgaaaaggaaacatgcagaagctaaagagctagcagttcgggctatcgttaacaacaatacgatgctgatgttaaaccacccgatgattgaggagaaaatttactctattcagaaatttgcgaacgacctgaaatccaagaagtacttatttgaggaagttggcaccattaactctggagcaaatgacttatccagcggagcatgggtaatgtaaatgcaacaaaagagctcaggcgtccagcgtaaatgcaatcttgaagtaacttgaataactaccttcctcgtgcattctgctacatggttggcttctgtagatgcgtccgtttacactttacacagcgtagcaactgttgagtgacctaatacttctagtagtgagatatgaccttgtggactaaatgactagatgggcactgctgtactaggtaatacctggttccatctattccaattgcagttggtgacaaaacgttcacattggatttatgataggtagaagttgcaagagcacagtgtagacaaccatggtggttgatgactaggccgccctttctaccctgagtttgacgtatgcggtcaaaagctatagtaatttttgttgc

SEQ ID NO: 214533 - DNA, 4100 bp, Zea Mays
gccggctaggcgcagccgcgcggtcaccagcagcagaccgcaccgagtcgccaaccgcagcgccctgccacctccacgcatcgccactccgacaaacgagctgctgctgacttgcgtttgcgtcctgtctacacggaggctgaaacaggaggaaaggaggagaggaggacgaggtctacgagtggagtagagagctcgagaggctgcgagaaaggagtcgagtgtgtgactctatgcttctgtgaaaatgagtacagaggaggctgcgaagaagacagaaattgatggtagtggttcaggagggattacaaagagtgagatgatgagtgaaatgagaagtatgatccaggagctcatggggttagggttgattggtgctagggcaaatacaggtacatctgagttgaagttggaacttgtgcctaatgatgtgaagctagaaggtagtaagaattatctaagctggttcagaagagtgcgtgtactcctagggggcaagggagtggagcattatttggaggagacatgtgttgagccgattgataagctcggtgcagaatggagaatctggcatgcgacaaactctgtgatagttgcatggttattggcatccatgtctcccactgttagcaagagggtggaagccatgcgtactgcatcacaaatctggaagaccttgagtaatatatactctcgaaaggggaatgtgatggtgatgatggaaattcaaaacaaggcagatgcagtaaagcagatgggaagaccagtggaacaatatgctagtgagctccaacagttatggggagagctggatcattatgctcctctccaaatggtttgcccacaggatgcacaaatggttcataagtgggtagaggataggagagtgacccactttctaaagaatctggattctgagttcgagagcaggagagcggtcttttgtcaccaggagagtcttcctaccatggatgaggttgtgtctgccatgatagatgaagagagcagacttcgagtgatgagtagtggtaatcatgtgaagccagcatacgttgcaattgaggatagagaatgttataattgtggggaaaggggacacctgagttacaattgtcccaaccctagaggaaatggtggcaagggaggatctcgtggaggacgaggtggtactcgtggtcgtgggagctatggaagaggtcgcggaggtcgtggtagaggccgtggtggctccagggccaacatagctaccactgaagagagtctctctgttactctatctggggaacaagctaagcaatgggagcagtggcagaagggcaagtcttccgagtgcctcacttcacctgatgggcaagccaccaactccttcggtaactttgccaactacgcccacatgggcgaaggaggagtgattgttggaggtatgattccacgagaagtggagaaagggataactacgcaggtattgagtgatgatgaaagtagtggggatcatgatgatccaactattgatattcaggaggagacagaggatgatgaggcagtgattgttgggtcaatcccatgtcctatggcagggaagttgaatgagaaacagggggagcaacatgattgttccattggggcaaaggtgaatgacaaacagggggagcaacctatagtatactatcgaaagcggacgaagaagcagggggagcaaccacaacctggatgtgttgaagctccagtcccatatctctcttcagactcctctccagacccagctggtaatgtctctcgaatccatatttctcccattcctgaacatgaagaattacctcttgcgcaaagaagagttcctagattaaatgctgggaaacctccttctcgttattgttatgaacatgacattgctaagtatgtctcatactctagtgtctctcctgcatatagaactttcattgcatctctacaaacaatatctattccgaaggattggaggtgtgccaaacaggatccaaagtggaaggatgccatgaaggaagagctgcttgccctgcagaagaacaagacatgggaacttgttcaccttcctgaaggaaagaaggcggtggggtgcaagtgggtcttcacagtaaagcagactcctgaaggaaagattgacaggtacaaagcaagactggtggcgaagggatatagtcagacatatgggatcgactatgatgagacctttgcacctgtggcaaaaatgggcacagtgaggaccttaatctcatgtgcggccaactttggttggcctcttcatcaactggatgtgaagaatgcatttcttcatggtgatctgaaggaagaggtctatatggaaatcccacctggatttgcaaataaacagactattggaaaagtgtgtagacttaagaagtcgctctatggcctaaagcagtcaccacgtgcgtggtttgatagattcaggcgagttgtgtgtgatatgggttatcatcaatgcaatggagatcacacagtcttctacaaacatcagggctcgtgtatcactattctagcggtttatgttgatgatatagtgatcactggagatgatgcgaaggagatcaagaaactgaaggaaaggctaagtagagcctttgaggtaaaggaccttggaccacttcgatacttccttgggattgagatagctagatcatctcaaggaattattctctcccaaagaaagtatgtcctcgaccttttgtcagagacaggaatgcttgggtgtcgcccatgtggttcacccattgataggaatcaccaaacttgtgctgagtcaggtgaccctatagatcgggaaagatatcagagggtagttggtcgtttgatatatctttgccatacaagaccggacattgcttatgcagtaagtgtggtgagtaggtatatgcatgatcctagaactgggcatatgaagatagtttatcaaatcatgagatacctgaagggaacccctggcaagggattgtgttttagaccaaatcaacatatgaatttggatgggtattgtgatgcggactgggcgagcagtagggatgatcggagatccacttctggatattgtgtatttgtgggaggtaatctggtttcatggagaagcaagaagcaagctgtggtatctcgatccactgcagaggctgaacatagagcaatggctctagcagtttgtgaaatgatatggttgaagagtctcttgaaggagcttcaagtgttgaagaatgagacaatgttgctccattgtgacaatgtggcagcaatcaacatagcaagtaatccagttcagtttgatcgcatgaagcatgtggagattgataagttcttcatcaaagagaagattgatagtggggctttgaagttgaagtatgtaaaatctcgtaatcaagtagcggatagtctcacaaaaggtttaggtcctaaggataatgagttggcatgtaacaagatgagaatgttaaatatatttggcccatcttgagggggagtgttggtgtattatgaacaagttgaagggtctatttgtaaagtggtaaagtataatagaaaagagtgagggtgctgtggaagattaacacacaccagaaaatcaacaataaacaaaggaaaagaattaaatacctccatttttgcttaaaatttcttctaaatgtaccaataacgcggaaatggcatcgtcaaaaacttggtccctacctgccactcgatactttcacagctgatcagaagctcctttgtcagatgaacatattctcctgtgtttgaagcagtttgctcccagcggtggaagggcttcagtagagttgagcaacataactggcaaccagatgtaactgcaagatggtgctatatgcttctcaaactatgagaggcactgagagtgaagaataaagggcaagcaaacaattcagccatgagttaccagatcaagtaaatgcctaagcctctaatgtaagagctgcaggtgtgtcaagtagcgtccttgtccccattcacatatgtctatacacaaaaaaactgagctcatactacagaatgtagacttttcgagagcatgaacatccctagctggtagttgcata

SEQ ID NO: 214534 - DNA, 897 bp, Zea Mays
cgtcaaaaaatcttaaaacacatggctacatcagtcatatcaggttgtacaagcaaaaattgatgagtctgtctcagcataataaatacagatgctcggaatgtgtaaagataacacagacttggcatggcatatagtcaaaatttcaaaacttgaaaggagcaacgtctcgaaacttctatcacacgtcatccggcatagataacaagctgaagcagcattatcaaacttgctctcatggtatgcatttaagtgctagatgattgaacccttcgacttaatcctcatcctcaacaaccttagttcccaaacctttgagaccctccggagggatctcagctactgtgaccagagagtactgcccctccttggcgtcttcctcgtcgttcctcttgcgggcaatcctgacacggactcgcctcggcacactccggataccgctgctccagacgtgcttgttgagcttcacatcgatccggacatcggtggtacccatggtcttctgggcgaacttcctgatctccttgatggcattcggtgccttcttcttgaagaaaagcaagcgcctagcaggcggggttcgatttatccgggcgcacacagcacagatcgaggaacccttggatccgttcggatcaagcaaagatgtgcaaacgagatcaggttacggagggcgcggcgccggcggactcggcctcgaggtaccggcagatccgctcgacgacctccctccccttggcgctattctgcagaaacctctcggcgcaccgggtctcgaccttctcagcgacggcggcgagggccgcgagcgggcggcaccggatcgtggtctcctgcctgaactgcgtccagtcgtcgggccggtccggatgtggtctgtaggaggcgcgctcctcg

SEQ ID NO: 214535 - DNA, 2194 bp, Zea Mays
cccaaccatgccattgccatcggccgcccagagcgctctcgtcgtggcggccgtcgccatagccaccgccaccgtcctcctccccttcccacggacgccgccgcgggaccgcttcgccgacatggtgctggccaacggcaccatctacaccgcggaccccgcccgacccttcgccgacgccatgtccgtccgcggcggccgcgtgctccgcgtcgggacctacgagtccgtcaaggtcgcgtcgacgtttcgctctgccccttcctccatctgataccctgccctgtatgctgtgtgttgcttgcaggagctcaagggccctcgcactcgtgagctgaatctcagtgggaacgtggtgctgccggggttcatcgactcccatgttcacttcatagacggtggattgcagcatgcgctagcttcctaatgctactctctgatactctgcagctagcgagggtgccacttcgtggggtcagaagcaaagatgacttggttgccagggtcaaggaagctgtcagaggtagtgtgctagtattttgttccaatgcattttcctgccacaaactactgctgtgatgcaaagacagataagcaacctgggcagtggatcttgggcggaggttggaatgatgattttgggggagatggtctcccggctgctgtttggctggatgatatctcacctgataatccagtctggctctctcgcatggatggtcatatgggagtagccaactcattagctatgaagattgctgggattgacaaaaacacaaacgatccaattggtggaactatcatacgaacaactgaaggagaaatctataaatgggctcactctatggaaaaatgattttgagagtatgcttattcttcccaatgcccacatggtctcgtgtttccgatcttattagtgaacatggtcgatcgctaagtcagtggatccatctaggtggtgttaaagctttccttgatgggtctctgggttcttcaagcgcgttgttccatgagccttatgagggtgatccggataattatggtctccaaatgacagatttagacagcctacttaatagaacactagaatctgacaaatctggactccaggttgccatacatgcaattggggataaagctaatgacatactactggatatggttgacaagattgttgatttaaatggagcgaaggaccgtagattccggatcgaacatgcccaacatctggctccaggtgcagcaaaccgctttggcaagcatggtaccattgcatccgtgcagccagatcatctactagatgatgccgaccatgcttggagcaagattggggtggaaaggtctgagcgaagctcctacacatttcgatcactgttagatggcggtgcgcagctagcttttggttctgactggcctatttcagacatcaaccccttgcaagctatccgatccgcagtgttccgcaagcctcctggatgggaggtcccctggatccctgcggagcgcttgaccctggatgaatcactgaaagcgcacacgatgtctgctgcctacgcctgcttcctggaccacgccgtgggcagcctttctgaagggaaatacgccgattttgtggtggtaccttctacatcgtgggacgaattctccagcgatttgccggggcatgtcctggcgacgtacgtgagcggcaggcaagcttatccatgacagatagcagttgtgtaagtgttggagaccaaaaagagcagcgcggacagtccggccctgaggccggaaggccggacgatccgcggtccggacagtccgcggtgatggcgcggacggtctgcgcgtgcgcagagtcagttaggatttctagtttctcgcgggatttgttacctaaaaccgcgggattaactcggaaatctgttggaagcggatccagacctcccctttatatcgatgaagggctacggccgattgaactccccaacaatcgaacaaatcaagtctatttctcgtttttaccttacgcattaggaatagttctagtctagttctagtttagcctctcaatctccaaattcttcgcctctcttcgactctacgtcgattagaggagtctaggtcggcctgccgtgcctagacaacacctaggatctcttctccccgacggggtccctcccgggagcgagatccaggcgccgccggcgac

SEQ ID NO: 214536 - DNA, 2884 bp, Zea Mays
cccaaccatgccattgccatcggccgcccagagcgctctcgtcgtggcggccgtcgccatagccaccgccaccgtcctcctccccttcccacggacgccgccgcgggaccgcttcgccgacatggtgctggccaacggcaccatctacaccgcggaccccgcccgacccttcgccgacgccatgtccgtccgcggcggccgcgtgctccgcgtcgggacctacgagtccgtcaaggagctcaagggccctcgcactcgtgagctgaatctcagtgggaacgtggtgctgccggggttcatcgactcccatgttcacttcatagacggtggattgcagctagcgagggtgccacttcgtggggtcagaagcaaagatgacttggttgccagggtcaaggaagctgtcagaggtagtgtgctagtattttgttccaatgcattttcctgccacaaactactgctgtgatgcaaagacaggttcggttacctatgcccaaattcagttctgaatcatctcattctgtgtagtaacaatatccaaataaacaagagtagattctttgtcagagttatgctctgcttggtgttctccaattctacgtttgaatagacactatgcaatatgttctgcttgggtatggcaatctattcgaatgcccgtttctgtatatcatgctcccaacataagtttgataagcaacctgggcagtggatcttgggcggaggttggaatgatgattttgggggagatggtctcccggctgctgtttggctggatgatatctcacctgataatccagtctggctctctcgcatggatggtcatatgggagtagccaactcattagctatgaagattgctgggattgacaaaaacacaaacgatccaattggtggaactatcatacgaacaactgaaggaggtaacacaactaattaacatgggtcttagccctctgattgtaacttaatcagtgaagtgcacttgaaccaaactcaatcacttcagtgagcatttgaaagctatttacttttaaacatagatatgttctcgatgtaaaaataaatcaagaaacttgaaagcaaactgcatggtagctcatccgttgatctaataagtagctacaatgatcagaaggacctaatcataagctttgtatacagtttgtaacaatattcttgtactttatgccttatggtactgcaaaggttcattgaatcttgtggttaggaatgaccaactatctggcctctgttattacttgtagagcctactggtcttctagttaatactgctatgaaacccatatttgatgtcattcaaaatgtttctaaccatgaaagaagagaggctcttcttagagcaagtagacatgccctaatgaggggagtgactactgttgttgatgttggaagttacttccctggggcctcagctgagaaaacgtggcaagattttgcaggtattctgtaataccttcgcttgcattgcatggacaagaattagaaggattcacttgtcttgtttttatctatgaccttatttgtactcctggcatactgacacaagtattgataccactacagaaatctataaatgggctcactctatggaaaaatgattttgagagtatgcttattcttcccaatgcccacatggtctcgtgtttccgatcttattagtgaacatggtcgatcgctaagtcagtggatccatctaggtggtgttaaagctttccttgatgggtctctgggttcttcaagcgcgttgttccatgagccttatgagggtgatccggataattatggtctccaaatgacagatttagacagcctacttaatagaacactagaatctgacaaatctggactccaggttgccatacatgcaattggggataaagctaatgacatactactggatatggttgacaagattgttgatttaaatggagcgaaggaccgtagattccggatcgaacatgcccaacatctggctccaggtgcagcaaaccgctttggcaagcatggtaccattgcatccgtgcagccagatcatctactagatgatgccgaccatgcttggagcaagattggggtggaaagatttcagacatcaaccccttgcaagctatccgatccgcagtgttccgcaagcctcctggatgggaggtcccctggatccctgcggagcgcttgaccctggatgaatcactgaaagcgcacacgatgtctgctgcctacgcctgcttcctggaccacgccgtgggcagcctttctgaagggaaatacgccgattttgtggtggtaccttctacatcgtgggacgaattctccagcgatttgccggggcatgtcctggcgacgtacgtgagcggcaggcaagcttatccatgacagatagcagttgtgtaagtgttggagaccaaaaagagcagcgcggacagtccggccctgaggccggaaggccggacgatccgcggtccggacagtccgcggtgatggcgcggacggtctgcgcgtgcgcagagtcagttaggatttctagtttctcgcgggatttgttacctaaaaccgcgggattaactcggaaatctgttggaagcggatccagacctcccctttatatcgatgaagggctacggccgattgaactccccaacaatcgaacaaatcaagtctatttctcgtttttaccttacgcattaggaatagttctagtctagttctagtttagcctctcaatctccaaattcttcgcctctcttcgactctacgtcgattagaggagtctaggtcggcctgccgtgcctagacaacacctaggatctcttctccccgacggggtccctcccgggagcgagatccaggcgccgccggcgac

SEQ ID NO: 214537 - DNA, 2722 bp, Zea Mays
cccaaccatgccattgccatcggccgcccagagcgctctcgtcgtggcggccgtcgccatagccaccgccaccgtcctcctccccttcccacggacgccgccgcgggaccgcttcgccgacatggtgctggccaacggcaccatctacaccgcggaccccgcccgacccttcgccgacgccatgtccgtccgcggcggccgcgtgctccgcgtcgggacctacgagtccgagctcaagggccctcgcactcgtgagctgaatctcagtgggaacgtggtgctgccggggttcatcgactcccatgttcacttcatagacggtggattgcagctagcgagggtgccacttcgtggggtcagaagcaaagatgacttggttgccagggtcaaggaagctgtcagagataagcaacctgggcagtggatcttgggcggaggttggaatgatgattttgggggagatggtctcccggctgctgtttggctggatgatatctcacctgataatccagtctggctctctcgcatggatggtcatatgggagtagccaactcattagctatgaagattgctgggattgacaaaaacacaaacgatccaattggtggaactatcatacgaacaactgaaggaggtaacacaactaattaacatgggtcttagccctctgattgtaacttaatcagtgaagtgcacttgaaccaaactcaatcacttcagtgagcatttgaaagctatttacttttaaacatagatatgttctcgatgtaaaaataaatcaagaaacttgaaagcaaactgcatggtagctcatccgttgatctaataagtagctacaatgatcagaaggacctaatcataagctttgtatacagtttgtaacaatattcttgtactttatgccttatggtactgcaaaggttcattgaatcttgtggttaggaatgaccaactatctggcctctgttattacttgtagagcctactggtcttctagttaatactgctatgaaacccatatttgatgtcattcaaaatgtttctaaccatgaaagaagagaggctcttcttagagcaagtagacatgccctaatgaggggagtgactactgttgttgatgttggaagttacttccctggggcctcagctgagaaaacgtggcaagattttgcaggtattctgtaataccttcgcttgcattgcatggacaagaattagaaggattcacttgtcttgtttttatctatgaccttatttgtactcctggcatactgacacaagtattgataccactacagaaatctataaatgggctcactctatggaaaaatgattttgagagtatgcttattcttcccaatgcccacatggtctcgtgtttccgatcttattagtgaacatggtcgatcgctaagtcagtggatccatctaggtggtgttaaagctttccttgatgggtctctgggttcttcaagcgcgttgttccatgagccttatgagggtgatccggataattatggtctccaaatgacagatttagacagcctacttaatagaacactagaatctgacaaatctggactccaggttgccatacatgcaattggggataaagctaatgacatactactggatatggttgacaagattgttgatttaaatggagcgaaggaccgtagattccggactcactctgtttagtagaatctgaattgaatatctgcatttggaatcagatcgaacatgcccaacatctggctccaggtgcagcaaaccgctttggcaagcatggtaccattgcatccgtgcagccagatcatctactagatgatgccgaccatgcttggagcaagattggggtggaaaggtctgagcgaagctcctacacatttcgatcactgttagatggcggtgcgcagctagcttttggttctgactggcctatttcagacatcaaccccttgcaagctatccgatccgcagtgttccgcaagcctcctggatgggaggtcccctggatccctgcggagcgcttgaccctggatgaatcactgaaagcgcacacgatgtctgctgcctacgcctgcttcctggaccacgccgtgggcagcctttctgaagggaaatacgccgattttgtggtggtaccttctacatcgtgggacgaattctccagcgatttgccggggcatgtcctggcgacgtacgtgagcggcaggcaagcttatccatgacagatagcagttgtgtaagtgttggagaccaaaaagagcagcgcggacagtccggccctgaggccggaaggccggacgatccgcggtccggacagtccgcggtgatggcgcggacggtctgcgcgtgcgcagagtcagttaggatttctagtttctcgcgggatttgttacctaaaaccgcgggattaactcggaaatctgttggaagcggatccagacctcccctttatatcgatgaagggctacggccgattgaactccccaacaatcgaacaaatcaagtctatttctcgtttttaccttacgcattaggaatagttctagtctagttctagtttagcctctcaatctccaaattcttcgcctctcttcgactctacgtcgattagaggagtctaggtcggcctgccgtgcctagacaacacctaggatctcttctccccgacggggtccctcccgggagcgagatccaggcgccgccggcgac

SEQ ID NO: 214538 - DNA, 2924 bp, Zea Mays
cccaaccatgccattgccatcggccgcccagagcgctctcgtcgtggcggccgtcgccatagccaccgccaccgtcctcctccccttcccacggacgccgccgcgggaccgcttcgccgacatggtgctggccaacggcaccatctacaccgcggaccccgcccgacccttcgccgacgccatgtccgtccgcggcggccgcgtgctccgcgtcgggacctacgagtccgtcaaggagctcaagggccctcgcactcgtgagctgaatctcagtgggaacgtggtgctgccggggttcatcgactcccatgttcacttcatagacggtggattgcagctagcgagggtgccacttcgtggggtcagaagcaaagatgacttggttgccagggtcaaggaagctgtcagaggtagtgtgctagtattttgttccaatgcattttcctgccacaaactactgctgtgatgcaaagacaggttcggttacctatgcccaaattcagttctgaatcatctcattctgtgtagtaacaatatccaaataaacaagagtagattctttgtcagagttatgctctgcttggtgttctccaattctacgtttgaatagacactatgcaatatgttctgcttgggtatggcaatctattcgaatgcccgtttctgtatatcatgctcccaacataagtttgataagcaacctgggcagtggatcttgggcggaggttggaatgatgattttgggggagatggtctcccggctgctgtttggctggatgatatctcacctgataatccagtctggctctctcgcatggatggtcatatgggagtagccaactcattagctatgaagattgctgggattgacaaaaacacaaacgatccaattggtggaactatcatacgaacaactgaaggaggtaacacaactaattaacatgggtcttagccctctgattgtaacttaatcagtgaagtgcacttgaaccaaactcaatcacttcagtgagcatttgaaagctatttacttttaaacatagatatgttctcgatgtaaaaataaatcaagaaacttgaaagcaaactgcatggtagctcatccgttgatctaataagtagctacaatgatcagaaggacctaatcataagctttgtatacagtttgtaacaatattcttgtactttatgccttatggtactgcaaaggttcattgaatcttgtggttaggaatgaccaactatctggcctctgttattacttgtagagcctactggtcttctagttaatactgctatgaaacccatatttgatgtcattcaaaatgtttctaaccatgaaagaagagaggctcttcttagagcaagtagacatgccctaatgaggggagtgactactgttgttgatgttggaagttacttccctggggcctcagctgagaaaacgtggcaagattttgcaggtattctgtaataccttcgcttgcattgcatggacaagaattagaaggattcacttgtcttgtttttatctatgaccttatttgtactcctggcatactgacacaagtattgataccactacagaaatctataaatgggctcactctatggaaaaatgattttgagagtatgcttattcttcccaatgcccacatggtctcgtgtttccgatcttattagtgaacatggtcgatcgctaagtcagtggatccatctaggtggtgttaaagctttccttgatgggtctctgggttcttcaagcgcgttgttccatgagccttatgagggtgatccggataattatggtctccaaatgacagatttagacagcctacttaatagaacactagaatctgacaaatctggactccaggttgccatacatgcaattggggataaagctaatgacatactactggatatggttgacaagattgttgatttaaatggagcgaaggaccgtagattccggatcgaacatgcccaacatctggctccaggtgcagcaaaccgctttggcaagcatggtaccattgcatccgtgcagatcatctactagatgatgccgaccatgcttggagcaagattggggtggaaaggtctgagcgaagctcctacacatttcgatcactgttagatggcgatttcagacatcaaccccttgcaagctatccgatccgcagtgttccgcaagcctcctggatgggaggtcccctggatccctgcggagcgcttgaccctggatgaatcactgaaagcgcacacgatgtctgctgcctacgcctgcttcctggaccacgccgtgggcagcctttctgaagggaaatacgccgattttgtggtggtaccttctacatcgtgggacgaattctccagcgatttgccggggcatgtcctggcgacgtacgtgagcggcaggcaagcttatccatgacagatagcagttgtgtaagtgttggagaccaaaaagagcagcgcggacagtccggccctgaggccggaaggccggacgatccgcggtccggacagtccgcggtgatggcgcggacggtctgcgcgtgcgcagagtcagttaggatttctagtttctcgcgggatttgttacctaaaaccgcgggattaactcggaaatctgttggaagcggatccagacctcccctttatatcgatgaagggctacggccgattgaactccccaacaatcgaacaaatcaagtctatttctcgtttttaccttacgcattaggaatagttctagtctagttctagtttagcctctcaatctccaaattcttcgcctctcttcgactctacgtcgattagaggagtctaggtcggcctgccgtgcctagacaacacctaggatctcttctccccgacggggtccctcccgggagcgagatccaggcgccgccggcgac

SEQ ID NO: 214539 - DNA, 3196 bp, Zea Mays
cccaaccatgccattgccatcggccgcccagagcgctctcgtcgtggcggccgtcgccatagccaccgccaccgtcctcctccccttcccacggacgccgccgcgggaccgcttcgccgacatggtgctggccaacggcaccatctacaccgcggaccccgcccgacccttcgccgacgccatgtccgtccgcggcggccgcgtgctccgcgtcgggacctacgagtccgtcaaggagctcaagggccctcgcactcgtgagctgaatctcagtgggaacgtggtgctgccggggttcatcgactcccatgttcacttcatagacggtggattgcagctagcgagggtgccacttcgtggggtcagaagcaaagatgacttggttgccagggtcaaggaagctgtcagaggtagtgtgctagtattttgttccaatgcattttcctgccacaaactactgctgtgatgcaaagacaggttcggttacctatgcccaaattcagttctgaatcatctcattctgtgtagtaacaatatccaaataaacaagagtagattctttgtcagagttatgctctgcttggtgttctccaattctacgtttgaatagacactatgcaatatgttctgcttgggtatggcaatctattcgaatgcccgtttctgtatatcatgctcccaacataagtttggttagtatctaactgcttctgttttatcaagttaacgggttagtgttgccaaaagctttctaccaatattactaagatctattttcctaacagataagcaacctgggcagtggatcttgggcggaggttggaatgatgattttgggggagatggtctcccggctgctgtttggctggatgatatctcacctgataatccagtctggctctctcgcatggatggtcatatgggagtagccaactcattagctatgaagattgctgggattgacaaaaacacaaacgatccaattggtggaactatcatacgaacaactgaaggaggtaacacaactaattaacatgggtcttagccctctgattgtaacttaatcagtgaagtgcacttgaaccaaactcaatcacttcagtgagcatttgaaagctatttacttttaaacatagatatgttctcgatgtaaaaataaatcaagaaacttgaaagcaaactgcatggtagctcatccgttgatctaataagtagctacaatgatcagaaggacctaatcataagctttgtatacagtttgtaacaatattcttgtactttatgccttatggtactgcaaaggttcattgaatcttgtggttaggaatgaccaactatctggcctctgttattacttgtagagcctactggtcttctagttaatactgctatgaaacccatatttgatgtcattcaaaatgtttctaaccatgaaagaagagaggctcttcttagagcaagtagacatgccctaatgaggggagtgactactgttgttgatgttggaagttacttccctggggcctcagctgagaaaacgtggcaagattttgcaggtattctgtaataccttcgcttgcattgcatggacaagaattagaaggattcacttgtcttgtttttatctatgaccttatttgtactcctggcatactgacacaagtattgataccactacagaaatctataaatgggctcactctatggaaaaatgattttgagagtatgcttattcttcccaatgcccacatggtctcgtgtttccgatcttattagtgaacatggtcgatcgctaagtcagtggatccatctaggtggtgttaaagctttccttgatgggtctctgggttcttcaagcgcgttgttccatgagccttatgagggtgatccggataattatggtctccaaatgacagatttagacagcctacttaatagaacactagaatctgacaaatctggactccaggttgccatacatgcaattggggataaagctaatgacatactactggatatggttgacaagattgttgatttaaatggagcgaaggaccgtagattccggactcactctgtttagtagaatctgaattgaatatctgcatttggaatcagatcgaacatgcccaacatctggctccaggtgcagcaaaccgctttggcaagcatggtaccattgcatccgtgcagccagatcatctactagatgatgccgaccatgcttggagcaagattggggtggaaaggtctgagcgaagctcctacacatttcgatcactgttagatggcggtgcgcagctagcttttggttctgactggcctgtacgataattctgcagatgcttccagtaaccaaactctgtttttagttgccgtaatattcagccacctggtatactgttactgttttttcagatttcagacatcaaccccttgcaagctatccgatccgcagtgttccgcaagcctcctggatgggaggtcccctggatccctgcggagcgcttgaccctggatgaatcactgaaagcgcacacgatgtctgctgcctacgcctgcttcctggaccacgccgtgggcagcctttctgaagggaaatacgccgattttgtggtggtaccttctacatcgtgggacgaattctccagcgatttgccggggcatgtcctggcgacgtacgtgagcggcaggcaagcttatccatgacagatagcagttgtgtaagtgttggagaccaaaaagagcagcgcggacagtccggccctgaggccggaaggccggacgatccgcggtccggacagtccgcggtgatggcgcggacggtctgcgcgtgcgcagagtcagttaggatttctagtttctcgcgggatttgttacctaaaaccgcgggattaactcggaaatctgttggaagcggatccagacctcccctttatatcgatgaagggctacggccgattgaactccccaacaatcgaacaaatcaagtctatttctcgtttttaccttacgcattaggaatagttctagtctagttctagtttagcctctcaatctccaaattcttcgcctctcttcgactctacgtcgattagaggagtctaggtcggcctgccgtgcctagacaacacctaggatctcttctccccgacggggtccctcccgggagcgagatccaggcgccgccggcgac

SEQ ID NO: 214540 - DNA, 2250 bp, Zea Mays
cccaaccatgccattgccatcggccgcccagagcgctctcgtcgtggcggccgtcgccatagccaccgccaccgtcctcctccccttcccacggacgccgccgcgggaccgcttcgccgacatggtgctggccaacggcaccatctacaccgcggaccccgcccgacccttcgccgacgccatgtccgtccgcggcggccgcgtgctccgcgtcgggacctacgagtccgtcaaggagctcaagggccctcgcactcgtgagctgaatctcagtgggaacgtggtgctgccggggttcatcgactcccatgttcacttcatagacggtggattgcagcatgcgctagcttcctaatgctactctctgatactctgcagctagcgagggtgccacttcgtggggtcagaagcaaagatgacttggttgccagggtcaaggaagctgtcagagataagcaacctgggcagtggatcttgggcggaggttggaatgatgattttgggggagatggtctcccggctgctgtttggctggatgatatctcacctgataatccagtctggctctctcgcatggatggtcatatgggagtagccaactcattagctatgaagattgctgggattgacaaaaacacaaacgatccaattggtggaactatcatacgaacaactgaaggagagcctactggtcttctagttaatactgctatgaaacccatatttgatgtcattcaaaatgtttctaaccatgaaagaagagaggctcttcttagagcaagtagacatgccctaatgaggggagtgactactgttgttgatgttggaagttacttccctggggcctcagctgagaaaacgtggcaagattttgcagaaatctataaatgggctcactctatggaaaaatgattttgagagtatgcttattcttcccaatgcccacatggtctcgtgtttccgatcttattagtgaacatggtcgatcgctaagtcagtggatccatctaggtggtgttaaagctttccttgatgggtctctgggttcttcaagcgcgttgttccatgagccttatgagggtgatccggataattatggtctccaaatgacagatttagacagcctacttaatagaacactagaatctgacaaatctggactccaggttgccatacatgcaattggggataaagctaatgacatactactggatatggttgacaagattgttgatttaaatggagcgaaggaccgtagattccggatcgaacatgcccaacatctggctccaggtgcagcaaaccgctttggcaagcatggtaccattgcatccgtgcagccagatcatctactagatgatgccgaccatgcttggagcaagattggggtggaaaggtctgagcgaagctcctacacatttcgatcactgttagatggcggtgcgcagctagcttttggttctgactggcctatttcagacatcaaccccttgcaagctatccgatccgcagtgttccgcaagcctcctggatgggaggtcccctggatccctgcggagcgcttgaccctggatgaatcactgaaagcgcacacgatgtctgctgcctacgcctgcttcctggaccacgccgtgggcagcctttctgaagggaaatacgccgattttgtggtggtaccttctacatcgtgggacgaattctccagcgatttgccggggcatgtcctggcgacgtacgtgagcggcaggcaagcttatccatgacagatagcagttgtgtaagtgttggagaccaaaaagagcagcgcggacagtccggccctgaggccggaaggccggacgatccgcggtccggacagtccgcggtgatggcgcggacggtctgcgcgtgcgcagagtcagttaggatttctagtttctcgcgggatttgttacctaaaaccgcgggattaactcggaaatctgttggaagcggatccagacctcccctttatatcgatgaagggctacggccgattgaactccccaacaatcgaacaaatcaagtctatttctcgtttttaccttacgcattaggaatagttctagtctagttctagtttagcctctcaatctccaaattcttcgcctctcttcgactctacgtcgattagaggagtctaggtcggcctgccgtgcctagacaacacctaggatctcttctccccgacggggtccctcccgggagcgagatccaggcgccgccggcgac

SEQ ID NO: 214541 - DNA, 2411 bp, Zea Mays
gttcccatttcccaaccatgccattgccatcggccgcccagagcgctctcgtcgtggcggccgtcgccatagccaccgccaccgtcctcctccccttcccacggacgccgccgcgggaccgcttcgccgacatggtgctggccaacggcaccatctacaccgcggaccccgcccgacccttcgccgacgccatgtccgtccgcggcggccgcgtgctccgcgtcgggacctacgagtccgtcaaggtcgcgtcgacgtttcgctctgccccttcctccatctgataccctgccctgtatgctgtgtgttgcttgcaggagctcaagggccctcgcactcgtgagctgaatctcagtgggaacgtggtgctgccggggttcatcgactcccatgttcacttcatagacggtggattgcagcgagggtgccacttcgtggggtcagaagcaaagatgacttggttgccagggtcaaggaagctgtcagagataagcaacctgggcagtggatcttgggcggaggttggaatgatgattttgggggagatggtctcccggctgctgtttggctggatgatatctcacctgataatccagtctggctctctcgcatggatggtcatatgggagtagccaactcattagctatgaagattgctgggattgacaaaaacacaaacgatccaattggtggaactatcatacgaacaactgaaggagagcctactggtcttctagttaatactgctatgaaacccatatttgatgtcattcaaaatgtttctaaccatgaaagaagagaggctcttcttagagcaagtagacatgccctaatgaggggagtgactactgttgttgatgttggaagttacttccctggggcctcagctgagaaaacgtggcaagattttgcaggtattctgtaataccttcgcttgcattgcatggacaagaattagaaggattcacttgtcttgtttttatctatgaccttatttgtactcctggcatactgacacaagtattgataccactacagaaatctataaatgggctcactctatggaaaaatgattttgagagtatgcttattcttcccaatgcccacatggtctcgtgtttccgatcttattagtgaacatggtcgatcgctaagtcagtggatccatctaggtggtgttaaagctttccttgatgggtctctgggttcttcaagcgcgttgttccatgagccttatgagggtgatccggataattatggtctccaaatgacagatttagacagcctacttaatagaacactagaatctgacaaatctggactccaggttgccatacatgcaattggggataaagctaatgacatactactggatatggttgacaagattgttgatttaaatggagcgaaggaccgtagattccggatcgaacatgcccaacatctggctccaggtgcagcaaaccgctttggcaagcatggtaccattgcatccgtgcagccagatcatctactagatgatgccgaccatgcttggagcaagattggggtggaaaggtctgagcgaagctcctacacatttcgatcactgttagatggcggtgcgcagctagcttttggttctgactggcctatttcagacatcaaccccttgcaagctatccgatccgcagtgttccgcaagcctcctggatgggaggtcccctggatccctgcggagcgcttgaccctggatgaatcactgaaagcgcacacgatgtctgctgcctacgcctgcttcctggaccacgccgtgggcagcctttctgaagggaaatacgccgattttgtggtggtaccttctacatcgtgggacgaattctccagcgatttgccggggcatgtcctggcgacgtacgtgagcggcaggcaagcttatccatgacagatagcagttgtgtaagtgttggagaccaaaaagagcagcgcggacagtccggccctgaggccggaaggccggacgatccgcggtccggacagtccgcggtgatggcgcggacggtctgcgcgtgcgcagagtcagttaggatttctagtttctcgcgggatttgttacctaaaaccgcgggattaactcggaaatctgttggaagcggatccagacctcccctttatatcgatgaagggctacggccgattgaactccccaacaatcgaacaaatcaagtctatttctcgtttttaccttacgcattaggaatagttctagtctagttctagtttagcctctcaatctccaaattcttcgcctctcttcgactctacgtcgattagaggagtctaggtcggcctgccgtgcctagacaacacctaggatctcttctccccgacggggtccctcccgggagcgagatccaggcgccgccggcgac

SEQ ID NO: 214542 - DNA, 2914 bp, Zea Mays
gataccagttcccatttcccaaccatgccattgccatcggccgcccagagcgctctcgtcgtggcggccgtcgccatagccaccgccaccgtcctcctccccttcccacggacgccgccgcgggaccgcttcgccgacatggtgctggccaacggcaccatctacaccgcggaccccgcccgacccttcgccgacgccatgtccgtccgcggcggccgcgtgctccgcgtcgggacctacgagtccgtcaaggagctcaagggccctcgcactcgtgagctgaatctcagtgggaacgtggtgctgccggggttcatcgactcccatgttcacttcatagacggtggattgcagctagcgagggtgccacttcgtggggtcagaagcaaagatgacttggttgccagggtcaaggaagctgtcagaggtagtgtgctagtattttgttccaatgcattttcctgccacaaactactgctgtgatgcaaagacaggttcggttacctatgcccaaattcagttctgaatcatctcattctgtgtagtaacaatatccaaataaacaagagtagattctttgtcagagttatgctctgcttggtgttctccaattctacgtttgaatagacactatgcaatatgttctgcttgggtatggcaatctattcgaatgcccgtttctgtatatcatgctcccaacataagtttggttagtatctaactgcttctgttttatcaagttaacgggttagtgttgccaaaagctttctaccaatattactaagatctattttcctaacagataagcaacctgggcagtggatcttgggcggaggttggaatgatgattttgggggagatggtctcccggctgctgtttggctggatgatatctcacctgataatccagtctggctctctcgcatggatggtcatatgggagtagccaactcattagctatgaagattgctgggattgacaaaaacacaaacgatccaattggtggaactatcatacgaacaactgaaggaggtaacacaactaattaacatgggtcttagccctctgattgtaacttaatcagtgaagtgcacttgaaccaaactcaatcacttcagtgagcatttgaaagctatttacttttaaacatagatatgttctcgatgtaaaaataaatcaagaaacttgaaagcaaactgcatggtagctcatccgttgatctaataagtagctacaatgatcagaaggacctaatcataagctttgtatacagtttgtaacaatattcttgtactttatgccttatggtactgcaaaggttcattgaatcttgtggttaggaatgaccaactatctggcctctgttattacttgtagagcctactggtcttctagttaatactgctatgaaacccatatttgatgtcattcaaaatgtttctaaccatgaaagaagagaggctcttcttagagcaagtagacatgccctaatgaggggagtgactactgttgttgatgttggaagttacttccctggggcctcagctgagaaaacgtggcaagattttgcagaaatctataaatgggctcactctatggaaaaatgattttgagagtatgcttattcttcccaatgcccacatggtctcgtgtttccgatcttattagtgaacatggtcgatcgctaagtcagtggatccatctaggtggtgttaaagctttccttgatgggtctctgggttcttcaagcgcgttgttccatgagccttatgagggtgatccggataattatggtctccaaatgacagatttagacagcctacttaatagaacactagaatctgacaaatctggactccaggttgccatacatgcaattggggataaagctaatgacatactactggatatggttgacaagattgttgatttaaatggagcgaaggaccgtagattccggatcgaacatgcccaacatctggctccaggtgcagcaaaccgctttggcaagcatggtaccattgcatccgtgcagccagatcatctactagatgatgccgaccatgcttggagcaagattggggtggaaaggtctgagcgaagctcctacacatttcgatcactgttagatggcgatttcagacatcaaccccttgcaagctatccgatccgcagtgttccgcaagcctcctggatgggaggtcccctggatccctgcggagcgcttgaccctggatgaatcactgaaagcgcacacgatgtctgctgcctacgcctgcttcctggaccacgccgtgggcagcctttctgaagggaaatacgccgattttgtggtggtaccttctacatcgtgggacgaattctccagcgatttgccggggcatgtcctggcgacgtacgtgagcggcaggcaagcttatccatgacagatagcagttgtgtaagtgttggagaccaaaaagagcagcgcggacagtccggccctgaggccggaaggccggacgatccgcggtccggacagtccgcggtgatggcgcggacggtctgcgcgtgcgcagagtcagttaggatttctagtttctcgcgggatttgttacctaaaaccgcgggattaactcggaaatctgttggaagcggatccagacctcccctttatatcgatgaagggctacggccgattgaactccccaacaatcgaacaaatcaagtctatttctcgtttttaccttacgcattaggaatagttctagtctagttctagtttagcctctcaatctccaaattcttcgcctctcttcgactctacgtcgattagaggagtctaggtcggcctgccgtgcctagacaacacctaggatctcttctccccgacggggtccctcccgggagcgagatccaggcgccgccggcgac

SEQ ID NO: 214543 - DNA, 3685 bp, Zea Mays
tctagtcttccgtcgtctcccttctttccccttcgctcgcttctcttctttgccgtccagtcgtcgtcgtctcctcgtgggctcgcggccgtggcgcattaaggattcgaacccactcgtcaaagagaatccatccgcaaaatcgaaagcaacagcagctgattattaaagccccgctttttcaaaagccgcaagggctatacccctagttgtaaattggcggaaaggaaattcgcctcctcttctccaattgcagctgcagttgcgtgctcgagaggggtgaagaacctagaagccctgccagcgcgcggcgccggcgccttgtttactctgcgacggcacgctgattgcattggtactgttcttctcctgatcaccacacatgacaagggtcatccatgactccggagatgacatgcagaaggaggcacttgatttggtctcatctgacgttaatttccccaagggccatttcccagactataggattggaccaaacaaccaaatcattgatccagaggagacacatgaggctgtacctctcaaggagattgttgcaaaggaaacagcgcagctgctagagcagcacaagcgtctttctgtgcgtgatctcaaggagaaatttgagaagggtctatctggcgcttccaagctttctgaagaggccaagcggcgagaagccgcttcattagacaggcaggttcttcttaagaagctcagagatgttttagacacactgaaaggccgtgtggctggtcgaaacagagacgatgctgaggaagctatctcactggtggaggcactagctgtccagttgacacaacgagaaggggagttaatttatgagaaggctgaagtaaaaaaattggctaacttccttaagcaggctactgaagatgcacgcaaagtggctgaagaggaaagggcccttgcactggctgaaattgaaaaggctagagctgcgatcgaaaaagttgagaaagcatggcgtgtacatgattttgcgtcaagtagcagagagaaggcggaaatagaggaacttaggaaagaggtccgagaggctaggagaataaaaatgctacaccagccaagcaaggtcatggacatggagtttgagcttcaggcactgcggactctcatctcagagaagactcagctatgcaatcagctaaagaaagagcttgccatgatcaagaggttagaagacgatagttctggcctctttgagcttgaaggttctaatacccttggatcacagctttgtattatcccgcgagttgatggtgcttcaaacatcacgaactgtccaattcagtggtatcgtgtaatttctggaggcactagagaactcatatcaggagcaacaaaatttatgtatgccccagaaccgtttgatgttggccgattgttgcaagcagagatagttttgaatgcagacaaaattatagttcagacagatggccctgtagataacgctgcaggacttgaacgttatgtggactcactaatgaaaaggacggatattgagttcaatgtagtagtaacccaaatgaatgggaaggattactcgtcgaattctgttcatgtatttcacattggaaagctgagaataaaacttcgaaaaggatggtccacaaaagcaagagagtcgtattccactacgatgaagttatgcgggagccgtggtggtggtaatgctgcagctagggcagttttctggcaccctaggaaaggctcgtcctacactctagccttcgaaacagacagggacaggaatgctgcgattatgattgctcgcaagttcgcttcgaattgcaatatcgctctcgctggcccaggcgaccaagtccatgtcaacatcatcggatccgcggtggctgcgcacgccggcggggaagaggagtcgcgggcggcgcgcctccagtcttttttcgcctccgtgctctccgggctcttcggccaggccgaggccgaggacgaggacgaggacgaagagatgcccacgcgcaaccacaacgctgccgcggctgccgctccgcagcatcaccatcacaaccgaggtggtgctcccgctcttggaaagagcaaggccgtgcccggccgagctgatgccatgaaccggcgagcccccctcggcgatattggcaacctcgtcagcgtccgcccagccgaagggaaacctcagctgcaggagcagatcaatcgccccatcacgcgaagcttcggcgctcagctcgtgaagaacgtgcaggcgaatgccgcaatcaagaatgccgcaatcctacccgcgaggcatgcgccgaggcaggaaaggaaggctcctgccaagcagccgcctcctgaggatgtcatagtactcagctccgactctgaacagagcaggacgcagttggagagcagcgctagctccgtccggtcgaggaagaaggtcatcaacaccctttcttctgtgctctcggctcgctcaaaggctgcctgtggaatcactgataagagacggcaagtagcagtgatcgaagacatcgacaagttggacgtcaacaatgagctcgcagttgtggaatacattgaggacatctacacgttctacaagattgctcagcatgacagacggccatgtgattatatagacacccaagtcgagatcaaccctaagatgagggctatcctggctggttggataattgaagtacaccacaagttcgagctgatgccggaaactctctacttgaccatgtacatcatcgatcagtacctctcgctgcaaccagtcctgcgaagggagctgcagctggtcggtgtttcagctatgctgatcgcctgcaagtacgaggagatttgggccccagaggtgaacgatttcattcttatatcagacagtgcatacagcagggagcagatcctttcgatggagaagggaatcctgaatagcctggagtggaacctcactgtccctacagtatacatgttccttgttcgttttctgaaggcggcagccttgggcaacaaagttgagaaagagatggagaatatggtcttcttcttcgctgaactggcgctgatgcagtacggcttggtgacgcggctgccttcgctggtcgctgcttcggttgtctacgcagccaggctcactctcaagagggctcccctctggaccgacaccctcaagcaccacacgggcttcagagagtcagagacagagctaatcgagtgcacgaagttgctggtcagcgcacactcgtccgccgctgacagcaagctgaggtctgtatacaagaagtattccagtgagcagttcggaggtgtcgcgcttcgcccacccgcagccgcagtggagatcaagtgccaccagcccataatggaggtccataaggccttgtctcatcaagcgtggataagatgaagtaaaacaagcaccagggagtgggtaaagctggcagcacttgccattgcgagtccggactcgcaatggcccctccgatggcgtctctctctccttccactccgggaggatctcggcggcgtcgcccgcactcgcagggcggccccagtaggtagcataacaataactgcgggtttattttggcttaacatttgaacactaacttcatcaatacaaacagaaatgaggctgtcctagttagttgtttgaaaaaaaaacttgtggtattatgaaaaatccaaa

SEQ ID NO: 214544 - DNA, 3659 bp, Zea Mays
cttccgtcgtctcccttctttccccttcgctcgcttctcttctttgccgtccagtcgtcgtcgtctcctcgtgggctcgcggccgtggcgcattaaggattcgaacccactcgtcaaagagaatccatccgcaaaatcgaaagcaacagcagctgattattaaagccccgctttttcaaaagccgcaagggctatacccctagttgtaaattggcggaaaggaaattcgcctcctcttctccaattgcagctgcagttgcgtgctcgagaggggtgaagaacctagaagccctgccagcgcgcggcgccggcgccttgtttactctgcgacggcacgctgattgcattggtactgttcttctcctgatcaccacacatgacaagggtcatccatgactccggagatgacatgcagaaggaggcacttgatttggtctcatctgacgttaatttccccaagggccatttcccagactataggattggaccaaacaaccaaatcattgatccagaggagacacatgaggctgtacctctcaaggagattgttgcaaaggaaacagcgcagctgctagagcagcacaagcgtctttctgtgcgtgatctcaaggagaaatttgagaagggtctatctggcgcttccaagctttctgaagaggccaagcggcgagaagccgcttcattagacaggcaggttcttcttaagaagctcagagatgttttagacacactgaaaggccgtgtggctggtcgaaacagagacgatgctgaggaagctatctcactggtggaggcactagctgtccagttgacacaacgagaaggggagttaatttatgagaaggctgaagtaaaaaaattggctaacttccttaagcaggctactgaagatgcacgcaaagtggctgaagaggaaagggcccttgcactggctgaaattgaaaaggctagagctgcgatcgaaaaagttgagaaagcatggcgtgtacatgattttgcgtcaagtagcagagagaaggcggaaatagaggaacttaggaaagaggtccgagaggctaggagaataaaaatgctacaccagccaagcaaggtcatggacatggagtttgagcttcaggcactgcggactctcatctcagagaagactcagctatgcaatcagctaaagaaagagcttgccatgatcaagaggttagaagacgatagttctggcctctttgagcttgaaggttctaatacccttggatcacagctttgtattatcccgcgagttgatggtgcttcaaacatcacgaactgtccaattcagtggtatcgtgtaatttctggaggcactagagaactcatatcaggagcaacaaaatttatgtatgccccagaaccgtttgatgttggccgattgttgcaagcagagatagttttgaatgcagacaaaattatagttcagacagatggccctgtagataacgctgcaggacttgaacgttatgtggactcactaatgaaaaggacggatattgagttcaatgtagtagtaacccaaatgaatgggaaggattactcgtcgaattctgttcatgtatttcacattggaaagctgagaataaaacttcgaaaaggatggtccacaaaagcaagagagtcgtattccactacgatgaagttatgcgggagccgtggtggtggtaatgctgcagctagggcagttttctggcaccctaggaaaggctcgtcctacactctagccttcgaaacagacagggacaggaatgctgcgattatgattgctcgcaagttcgcttcgaattgcaatatcgctctcgctggcccaggcgaccaagtccatgtcaacatcatcggatccgcggtggctgcgcacgccggcggggaagaggagtcgcgggcggcgcgcctccagtcttttttcgcctccgtgctctccgggctcttcggccaggccgaggccgaggacgaggacgaggacgaagagatgcccacgcgcaaccacaacgctgccgcggctgccgctccgcagcatcaccatcacaaccgaggtggtgctcccgctcttggaaagagcaaggccgtgcccggccgagctgatgccatgaaccggcgagcccccctcggcgatattggcaacctcgtcagcgtccgcccagccgaagggaaacctcagctgcaggagcagatcaatcgccccatcacgcgaagcttcggcgctcagctcgtgaagaacgtgcaggcgaatgccgcaatcaagaatgccgcaatcctacccgcgaggcatgcgccgaggcaggaaaggaaggctcctgccaagcagccgcctcctgaggatgtcatagtactcagctccgactctgaacagagcaggacgcagttggagagcagcgctagctccgtccggtcgaggaagaaggtcatcaacaccctttcttctgtgctctcggctcgctcaaaggctgcctgtggaatcactgataagagacggcaagtagcagtgatcgaagacatcgacaagttggacgtcaacaatgagctcgcagttgtggaatacattgaggacatctacacgttctacaagattgctcagcatgacagacggccatgtgattatatagacacccaagtcgagatcaaccctaagatgagggctatcctggctggttggataattgaagtacaccacaagttcgagctgatgccggaaactctctacttgaccatgtacatcatcgatcagtacctctcgctgcaaccagtcctgcgaagggagctgcagctggtcggtgtttcagctatgctgatcgcctgcaagtacgaggagatttgggccccagaggtgaacgatttcattcttatatcagacagtgcatacagcagggagcagatcctttcgatggagaagggaatcctgaatagcctggagtggaacctcactgtccctacagtatacatgttccttgttcgttttctgaaggcggcagccttgggcaacaaagttgagaaagagaatatggtcttcttcttcgctgaactggcgctgatgcagtacggcttggtgacgcggctgccttcgctggtcgctgcttcggttgtctacgcagccaggctcactctcaagagggctcccctctggaccgacaccctcaagcaccacacgggcttcagagagtcagagacagagctaatcgagtgcacgaagttgctggtcagcgcacactcgtccgccgctgacagcaagctgaggtctgtatacaagaagtattccagtgagcagttcggaggtgtcgcgcttcgcccacccgcagccgcagtggagatcaagtaaacgaagataacttcgtgctagtgtttgttagtataatgtaatggaaggcgagcctgacattcgctagggtctatccgtctatgtttgcttgtcggggtagtcaagaaagtttgaatgcttgaggcagccgtttgtttggtaggctgttctcagagtccaggtgttatctgacttgtgatggcatgttgtgtttcatgtgatggatatcattagaatcctaatctagtacgatatctattcatgaatataaatggtatttattcatttgttcataaatctgaattgaaaatggccctacacttttgaaaactaaaatagaataaaa

SEQ ID NO: 214545 - DNA, 4907 bp, Zea Mays
attttttccacgacaattcaatgacgatgaagagttgaatcgcatacagacactcggacagtacagtacagtatgcccacaataggccgtattttccgtgaaaggaaaggtccaatctgaaaaatactctcatttttctttttgttctcttcttcttctatcctcctcgtcttcctcgtgacttctccaaggtgaaaccctagctgctgcttccgccactcacgccgctcgccgccgacgccgactatcgccggaaacaggtcaacaggagagcccgttcaagtccgggacccctcaattgtccttttctctctctccccgcccaacttcccctgctctgccgccgcctccccagtccggcgtgcatcagcagcgacatcagagtcggcgatgggaggcgtcaccgacgttctcgtccccttatgttgatgaagtggcgtgccgtggagattcctttttgaccgatttcttgccggttttttccttttctccgtcgtgcaagatcagtcctttctttttttctccgtccacggttcgatcaggttttaccttctcttcgtcgtgcaagatcaatccttcattttctccgtcgtgcaagggggtcagttgaatcagatgctccacgttacgtccacccttgagctcgatggcagaaggaagcagtagccataggaggagtgcattctcccctgggctggctgtgttattatctggcgatgaagctaagattagctcccagaagtcgcacctggtgtcctatcatgacgaaattgggcaccaggctgttgagaggacgatagagcacatctttgatctccctcacaagtcagtggtccggcctcctggaccagttgacacaggcttcgtgcactcagtggtgaggaatcaagctagaaaatttgatcttgactgggaaaactgcattcggggataccatcgcagcgtcttcattgtggacaaaggtgctgggcagaggaaggtggttcttgatgattcgagcatttgtggtagcttcaggaatgtccggggaccttcacttgttgagagttccgcccctttcagcagtgccagggctaatgcttgtgtgtggaaaggcaaatggatgtatgaggtgacccttgagacgtctggagttcagcagcttggatgggctactctctcttgtcctttcactgatcagaaaggtgttggtgatgctgatgattcatattcctttgatggccggagggtgactaagtggaacaatgacccaaagccatatggccagccatgggcagtaggtgatgtcatcggttgctgcatcaacttggatgcaggagaaatttccttttacaggaacgggacttctcttggtgttgcatttgatggaattcgcagcgtggaacctaagaagggatattatgctgcagtatccctctcggaaggagagcgttgtcatcttaatttcggctcacatccattcaggtatcctgttgatgggtttgatccattagaggcgccaccacgctcttggtcgtttgtcacataccttcttagatgcctgttccggttgctagaagttcacaacctggagaaatctgaatcagcatacttcgagaaactgaggagggtgaaaaaatttgcaccactacaagaactctttggacccatttcagaagggatctgtgcagaaattttcagtgctattgaagcaagccaggggtgccttgagtatattgcctggggctcgttgatcactctactcttagatgttttcagaactcgtgagccgcatgatttctcatgccttgatcaggttcttgaccttttcctccggttcccaggttgcacttcattatttcaggagctcattgtggccctttcttgcatgtgcaaagttgcaccacttgtgttgacagaatgcccatattctgggtcatatccatttttagcgctggtttgccaccttcttaggcataaggatgtaatgtgtttatggtggaaagcagaagatttcgttttctcgtttgaaggcttccttacaaggaagattccaaataagcaggatctacagtgccttgtgccatctgtttggtggcctggttcttctgaggatgaagttagcatgacactgacgatgacaacactctcagatgcaataaaaaagattgaggagatgcatcgtgaactttgcagcttggtaatatgctttattccaccaatgtctacgcctcagcctccaggctctgtatttaggtcctttgtacaaagtttggtgctcaaagctagaggtggagatcataggatggttgtcaatgggactttcaacaacactgtgcttgtttcattgtacacagtaatcctgcatttgttgtctgaaggattttctatggattctgctggatctgcatcatcctctaaagcgaactttgggaatggtgttggatttcttcacaaaggtggaaaacgcaagtttccgacacaattatttttcaggaatgatgcctatcacagtgtaattcctagaatcggtggaccaccaagtattttgatgcatcaccaatttgatgctgtggaaaatgaagtgcagtgggatgaaggctgcatgaatgatgaagagacacgtgttacacacactacagcacagaagccttgttgctgctcagtgacagatgttgctgttggcctaagatacaaagaaactgctaagtatgtgccatcaacttcaaaaggctcatgtaagcctatgcctgaaagatctcctcatgttgctgctgagtgcaatggtagaggtctgagtgatgagatcgaagacaaacctagcacaagtgctcaatcagaaattgaatatggataccaatcactgcatagtcttgaaaacatgccaatggcaactcaatcttcgtcggaaacacttaaagaagaagagctgcttgatgttatgttgttgttatatcatctcggcatctcaccaaattttaggcaggcattttatttcatgtctcagcagtcgcagtccatttctttactagaagaaactgacaggcagatacgagaaaaatcatgctcagagcaagtaaggcgtttgaaagaagcccggaatagctatcacgaggatttggtagattgtgtacggcattgtgtttggtaccgggccacccttttctcccagtggaagcaaaggggaatgtacgcaacttgcatgtgggtcgtggagcttcttttggtccttagtaactcaaatagcatgttccactatgttcctgagttctatgtggaatcactggtggattgtttccatgcactgcgaaggagcgatcctccttttgtttcccctgcattatttctcatgcaagggttggcctcgtttgtcactttggttgtcaagcacttcgatgatacaaggatatataaagaattcatgcttgttttcgagaacaatcgggaggctataaataaaatgcctagatcactgttatcagcttttgacaacagatcatggattcctgttacaaacatactttcccggttctgcaaaggctcaggatttgcttcctataagaatggtgaatccgcatcatctgcaacttttcaggttctactgagggagacatgtattcatgaacaagagctgttcttttcctttcttaatcgacttttcaatacactcagctggacaatgaccgagttctctatgtccatccgggagatgcaagataaaaaccaggttgctgatttgcagcagaggaagtgcagtgtaatttttgatatctcatgtagccttgcgagaatcttggaattctgtacccgagagattccttgtgcttttctcatgggaccagatatgaatttgcggaggttgactgaattggttgtctttattctcaaccacatcatatcagtagctgatgcagagttctttgacatgacactaagacggccagggcagcatcaagagaaaacaaatcgtactatgatcttggctcctcttgtgggcattatcctcagtcttatggaatgtagcagcacatcagaacgaagggagctaaatgatgtgattgcagtgttcgccagcatggattgccctgccacaatccattttgggctgcagtacctactgagctacaactggagcaatgttcttcgaggggattcatcccttgcaaagctagcgcagcttaaagagttctcccattacttccgacgcattacagcgtccgtggatggtgaagaagaagaccatagcctaaacgcgggcgatgaagacgacgaccacacttgttgcatttgctacaactgtgattccgatgcaacattccagccatgccatcaccggtcctgctttggctgcataagcaggcatctcctgaacaaccagaggtgtttcttctgcaatgcagtggtaacatcggttactagatagccgattcgcgagcgatgcgctgctctactcattgcctctttcggtatcgtgatccgaaggaagatggtgccactgatttgtcttatctattttgcttgacctgagggctggggcgctggcgtcccagagatctttccattgcttttccaggaagaacgcgttacctttgtgcacgagggtcagaagcggttcttcgttttccttgctgtatatgtaaaggccagggggagattccacgactgtaaatatgatgagatatgaaacagaaaagggggtggcagatcaacatcgaccttctgtaattagccagaataaaagaactagatgctttatattgagcagagctctcgtctttttgatcctccccacggtgtagtatcaagaatgaataaatcttctgtttcttgtctggttgtagcatgccagcatctgtaagttgtaacaattcagtgaatttatttaccttcagcaaaaagggtaaaaaggttgcctcttcaagttgttt

SEQ ID NO: 214546 - DNA, 4772 bp, Zea Mays
ctcgtcttcctcgtgacttctccaaggtgaaaccctagctgctgcttccgccactcacgccgctcgccgccgacgccgactatcgccggaaacaggtcaacaggagagcccgttcaagtccgggacccctcaattgtccttttctctctctccccgcccaacttcccctgctctgccgccgcctccccagtccggcgtgcatcagcagcgacatcagagtcggcgatgggaggcgtcaccgacgttctcgtccccttatgttgatgaagtggcgtgccgtggagattcctttttgaccgatttcttgccggttttttccttttctccgtcgtgcaagatcagtcctttctttttttctccgtccacggttcgatcaggttttaccttctcttcgtcgtgcaagatcaatccttcattttctccgtcgtgcaagggggtcagttgaatcagatgctccacgttacgtccacccttgagctcgatggcagaaggaagcagtagccataggaggagtgcattctcccctgggctggctgtgttattatctggcgatgaagctaagattagctcccagaagtcgcacctggtgtcctatcatgacgaaattgggcaccaggctgttgagaggacgatagagcacatctttgatctccctcacaagtcagtggtccggcctcctggaccagttgacacaggcttcgtgcactcagtggtgaggaatcaagctagaaaatttgatcttgactgggaaaactgcattcggggataccatcgcagcgtcttcattgtggacaaaggtgctgggcagaggaaggtggttcttgatgattcgagcatttgtggtagcttcaggaatgtccggggaccttcacttgttgagagttccgcccctttcagcagtgccagggctaatgcttgtgtgtggaaaggcaaatggatgtatgaggtgacccttgagacgtctggagttcagcagcttggatgggctactctctcttgtcctttcactgatcagaaaggtgttggtgatgctgatgattcatattcctttgatggccggagggtgactaagtggaacaatgacccaaagccatatggccagccatgggcagtaggtgatgtcatcggttgctgcatcaacttggatgcaggagaaatttccttttacaggaacgggacttctcttggtgttgcatttgatggaattcgcagcgtggaacctaagaagggatattatgctgcagtatccctctcggaaggagagcgttgtcatcttaatttcggctcacatccattcaggtatcctgttgatgggtttgatccattagaggcgccaccacgctcttggtcgtttgtcacataccttcttagatgcctgttccggttgctagaagttcacaacctggagaaatctgaatcagcatacttcgagaaactgaggagggtgaaaaaatttgcaccactacaagaactctttggacccatttcagaagggatctgtgcagaaattttcagtgctattgaagcaagccaggggtgccttgagtatattgcctggggctcgttgatcactctactcttagatgttttcagaactcgtgagccgcatgatttctcatgccttgatcaggttcttgaccttttcctccggttcccaggttgcacttcattatttcaggagctcattgtggccctttcttgcatgtgcaaagttgcaccacttgtgttgacagaatgcccatattctgggtcatatccatttttagcgctggtttgccaccttcttaggcataaggatgtaatgtgtttatggtggaaagcagaagatttcgttttctcgtttgaaggcttccttacaaggaagattccaaataagcaggatctacagtgccttgtgccatctgtttggtggcctggttcttctgaggatgaagttagcatgacactgacgatgacaacactctcagatgcaataaaaaagattgaggagatgcatcgtgaactttgcagcttggtaatatgctttattccaccaatgtctacgcctcagcctccaggctctgtatttaggtcctttgtacaaagtttggtgctcaaagctagaggtggagatcataggatggttgtcaatgggactttcaacaacactgtgcttgtttcattgtacacagtaatcctgcatttgttgtctgaaggattttctatggattctgctggatctgcatcatcctctaaagcgaactttgggaatggtgttggatttcttcacaaaggtggaaaacgcaagtttccgacacaattatttttcaggaatgatgcctatcacagtgtaattcctagaatcggtggaccaccaagtattttgatgcatcaccaatttgatgctgtggaaaatgaagtgcagtgggatgaaggctgcatgaatgatgaagagacacgtgttacacacactacagcacagaagccttgttgctgctcagtgacagatgttgctgttggcctaagatacaaagaaactgctaagtatgtgccatcaacttcaaaaggctcatgtaagcctatgcctgaaagatctcctcatgttgctgctgagtgcaatggtagaggtctgagtgatgagatcgaagacaaacctagcacaagtgctcaatcagaaattgaatatggataccaatcactgcatagtcttgaaaacatgccaatggcaactcaatcttcgtcggaaacacttaaagaagaagagctgcttgatgttatgttgttgttatatcatctcggcatctcaccaaattttaggcagtcgcagtccatttctttactagaagaaactgacaggcagatacgagaaaaatcatgctcagagcaagtaaggcgtttgaaagaagcccggaatagctatcacgaggatttggtagattgtgtacggcattgtgtttggtaccgggccacccttttctcccagtggaagcaaaggggaatgtacgcaacttgcatgtgggtcgtggagcttcttttggtccttagtaactcaaatagcatgttccactatgttcctgagttctatgtggaatcactggtggattgtttccatgcactgcgaaggagcgatcctccttttgtttcccctgcattatttctcatgcaagggttggcctcgtttgtcactttggttgtcaagcacttcgatgatacaaggatagtgaaccctgacttgaaagatcttcttcttcaatcaatatcagttctcgtacagtataaagaattcatgcttgttttcgagaacaatcgggaggctataaataaaatgcctagatcactgttatcagcttttgacaacagatcatggattcctgttacaaacatactttcccggttctgcaaaggctcaggatttgcttcctataagaatggtgaatccgcatcatctgcaacttttcaggttctactgagggagacatgtattcatgaacaagagctgttcttttcctttcttaatcgacttttcaatacactcagctggacaatgaccgagttctctatgtccatccgggagatgcaagataaaaaccaggttgctgatttgcagcagaggaagtgcagtgtaatttttgatatctcatgtagccttgcgagaatcttggaattctgtacccgagagattccttgtgcttttctcatgggaccagatatgaatttgcggaggttgactgaattggttgtctttattctcaaccacatcatatcagtagctgatgcagagttctttgacatgacactaagacggccagggcagcatcaagagaaaacaaatcgtactatgatcttggctcctcttgtgggcattatcctcagtcttatggaatgtagcagcacatcagaacgaagggagctaaatgatgtgattgcagtgttcgccagcatggattgccctgccacaatccattttgggctgcagtacctactgagctacaactggagcaatgttcttcgaggggattcatcccttgcaaagctagcgcagcttaaagagttctcccattacttccgacgcattacagcgtccgtggatggtgaagaagaagaccatagcctaaacgcgggcgatgaagacgacgaccacacttgttgcatttgctacaactgtgattccgatgcaacattccagccatgccatcaccggtcctgctttggctgcataagcaggcatctcctgaacaaccagaggtgtttcttctgcaatgcagtggtaacatcggttactagatagccgattcgcgagcgatgcgctgctctactcattgcctctttcggtatcgtgatccgaaggaagatggtgccactgatttgtcttatctattttgcttgacctgagggctggggcgctggcgtcccagagatctttccattgcttttccaggaagaacgcgttacctttgtgcacgagggtcagaagcggttcttcgttttccttgctgtatatgtaaaggccagggggagattccacgactgtaaatatgatgagatatgaaacagaaaagggggtggcagatcaacatcgaccttctgtaattagccagaataaaagaactagatgctttatattgagcagagctctcgtctttttgatcctccccacggtgtagtatcaagaatgaataaatcttctgtttcttgtctggttgtagcatgccagcatctgtaagttgtaacaattcagtgaatttatttaccttcagcaaaaagggtaaaaaggttgcctcttcaagttgttt

SEQ ID NO: 214547 - DNA, 4818 bp, Zea Mays
gacttctccaaggtgaaaccctagctgctgcttccgccactcacgccgctcgccgccgacgccgactatcgccggaaacaggtcaacaggagagcccgttcaagtccgggacccctcaattgtccttttctctctctccccgcccaacttcccctgctctgccgccgcctccccagtccggcgtgcatcagcagcgacatcagagtcggcgatgggaggcgtcaccgacgttctcgtccccttatgttgatgaagtggcgtgccgtggagattcctttttgaccgatttcttgccggttttttccttttctccgtcgtgcaagatcagtcctttctttttttctccgtccacggttcgatcaggttttaccttctcttcgtcgtgcaagatcaatccttcattttctccgtcgtgcaagggggtcagttgaatcagatgctccacgttacgtccacccttgagctcgatggcagaaggaagcagtagccataggaggagtgcattctcccctgggctggctgtgttattatctggcgatgaagctaagattagctcccagaagtcgcacctggtgtcctatcatgacgaaattgggcaccaggctgttgagaggacgatagagcacatctttgatctccctcacaagtcagtggtccggcctcctggaccagttgacacaggcttcgtgcactcagtggtgaggaatcaagctagaaaatttgatcttgactgggaaaactgcattcggggataccatcgcagcgtcttcattgtggacaaaggtgctgggcagaggaaggtggttcttgatgattcgagcatttgtggtagcttcaggaatgtccggggaccttcacttgttgagagttccgcccctttcagcagtgccagggctaatgcttgtgtgtggaaaggcaaatggatgtatgaggtgacccttgagacgtctggagttcagcagcttggatgggctactctctcttgtcctttcactgatcagaaaggtgttggtgatgctgatgattcatattcctttgatggccggagggtgactaagtggaacaatgacccaaagccatatggccagccatgggcagtaggtgatgtcatcggttgctgcatcaacttggatgcaggagaaatttccttttacaggaacgggacttctcttggtgttgcatttgatggaattcgcagcgtggaacctaagaagggatattatgctgcagtatccctctcggaaggagagcgttgtcatcttaatttcggctcacatccattcaggtatcctgttgatgggtttgatccattagaggcgccaccacgctcttggtcgtttgtcacataccttcttagatgcctgttccggttgctagaagttcacaacctggagaaatctgaatcagcatacttcgagaaactgaggagggtgaaaaaatttgcaccactacaagaactctttggacccatttcagaagggatctgtgcagaaattttcagtgctattgaagcaagccaggggtgccttgagtatattgcctggggctcgttgatcactctactcttagatgttttcagaactcgtgagccgcatgatttctcatgccttgatcaggttcttgaccttttcctccggttcccaggttgcacttcattatttcaggagctcattgtggccctttcttgcatgtgcaaagttgcaccacttgtgttgacagaatgcccatattctgggtcatatccatttttagcgctggtttgccaccttcttaggcataaggatgtaatgtgtttatggtggaaagcagaagatttcgttttctcgtttgaaggcttccttacaaggaagattccaaataagcaggatctacagtgccttgtgccatctgtttggtggcctggttcttctgaggatgaagttagcatgacactgacgatgacaacactctcagatgcaataaaaaagattgaggagatgcatcgtgaactttgcagcttggtaatatgctttattccaccaatgtctacgcctcagcctccaggctctgtatttaggtcctttgtacaaagtttggtgctcaaagctagaggtggagatcataggatggttgtcaatgggactttcaacaacactgtgcttgtttcattgtacacagtaatcctgcatttgttgtctgaaggattttctatggattctgctggatctgcatcatcctctaaagcgaactttgggaatggtgttggatttcttcacaaaggtggaaaacgcaagtttccgacacaattatttttcaggaatgatgcctatcacagtgtaattcctagaatcggtggaccaccaagtattttgatgcatcaccaatttgatgctgtggaaaatgaagtgcagtgggatgaaggctgcatgaatgatgaagagacacgtgttacacacactacagcacagaagccttgttgctgctcagtgacagatgttgctgttggcctaagatacaaagaaactgctaagtatgtgccatcaacttcaaaaggctcatgtaagcctatgcctgaaagatctcctcatgttgctgctgagtgcaatggtagaggtctgagtgatgagatcgaagacaaacctagcacaagtgctcaatcagaaattgaatatggataccaatcactgcatagtcttgaaaacatgccaatggcaactcaatcttcgtcggaaacacttaaagaagaagagctgcttgatgttatgttgttgttatatcatctcggcatctcaccaaattttaggcaggcattttatttcatgtctcagcagtcgcagtccatttctttactagaagaaactgacaggcagatacgagaaaaatcatgctcagagcaagtaaggcgtttgaaagaagcccggaatagctatcacgaggatttggtagattgtgtacggcattgtgtttggtaccgggccacccttttctcccagtggaagcaaaggggaatgtacgcaacttgcatgtgggtcgtggagcttcttttggtccttagtaactcaaatagcatgttccactatgttcctgagttctatgtggaatcactggtggattgtttccatgcactgcgaaggagcgatcctccttttgtttcccctgcattatttctcatgcaagggttggcctcgtttgtcactttggttgtcaagcacttcgatgatacaaggatagtgaaccctgacttgaaagatcttcttcttcaatcaatatcagttctcgtacagtataaagaattcatgcttgttttcgagaacaatcgggaggctataaataaaatgcctagatcactgttatcagcttttgacaacagatcatggattcctgttacaaacatactttcccggttctgcaaaggctcaggatttgcttcctataagaatggtgaatccgcatcatctgcaacttttcagctggacaatgaccgagttctctatgtccatccgggagatgcaagataaaaaccaggttgctgatttgcagcagaggaagtgcagtgtaatttttgatatctcatgtagccttgcgagaatcttggaattctgtacccgagagattccttgtgcttttctcatgggaccagatatgaatttgcggaggttgactgaattggttgtctttattctcaaccacatcatatcagtagctgatgcagagttctttgacatgacactaagacggccagggcagcatcaagagaaaacaaatcgtactatgatcttggctcctcttgtgggcattatcctcagtcttatggaatgtagcagcacatcagaacgaagggagctaaatgatgtgattgcagtgttcgccagcatggattgccctgccacaatccattttgggctgcagtacctactgagctacaactggagcaatgttcttcgaggggattcatcccttgcaaagctagcgcagcttaaagagttctcccattacttccgacgcattacagcgtccgtggatggtgaagaagaagaccatagcctaaacgcgggcgatgaagacgacgaccacacttgttgcatttgctacaactgtgattccgatgcaacattccagccatgccatcaccggtcctgctttggctgcataagcaggcatctcctgaacaaccagaggtgtttcttctgcaatgcagtggtaacatcggttactagatagccgattcgcgagcgatgcgctgctctactcattgcctctttcggtatcgtgatccgaaggaagatggtgccactgatttgtcttatctattttgcttgacctgagggctggggcgctggcgtcccagagatctttccattgcttttccaggaagaacgcgttacctttgtgcacgagggtcagaagcggttcttcgttttccttgctgtatatgtaaaggccaggtaatagtagaaaggattcaataacattgccgcagaaggaggtttctgtacacggtgggaagccagtaccaccgaaaggaatttcatggaatcgcaatttttgtagggtgtagggggagattccacgactgtaaatatgatgagatatgaaacagaaaagggggtggcagatcaacatcgaccttctgtaattagccagaataaaagaactagatgctttatattgagcagagctctcgtctttttgatcctccccacggtgtagtatcaagaatgaataaatcttctgtttcttgtctggttgtagcatgccagcatctgtaagttgtaacaattcagtgaatttatttaccttcagcaaaaagggtaaaaaggttgcctcttcaagttgttt

SEQ ID NO: 214548 - DNA, 4149 bp, Zea Mays
gaaaaaccctagagacgcccgcaggcagtcgctctcgcgcggcggctctccccgcctcgttcgcccctaccgcgccatcaacgtgcctccccgccgcccctgtcctccccatgcccgccgctcccacccgagatggttagcgcccctcctccttccggtcccttcccctgcctcggccggccagccatggattcaccaagcgggctctggtggcggccggcgccgtcgtcgtgtcctccattcccgtcaaccccctcgatgtcgccaagatatgtttaccagacgaattgatatctaggctatttatgtggttactaattttgactcctctaagacatatttacacagggttggtcgttatgggagatatgggcaccttggtttggcagtgaacttgaccacttacaaagattgtttcaacttatatagtattgataaaaaaaacttggaacggaaattaagacaatacccccacaaattgacctgtttgtatactgccaatgatgatagcgacagcttcatgagcgtcaggcacattttatttattttgacctgtttgtatactaacttaacacaagcttttttgtcaataacgtgggattcggaattttctgagctttgtgtagtggaggaggaggagaggcccatgtcggtggagctggaacccatcgccagcgagcagcagcttaactaggtccttggagaggcgtagcagctccagctcctcatcgtcctgctctggtaaccccactttcctagatcggtttgtgcctgtagggtgttcttgttaaagtttgcttgtaatgtctgtgagattgcaatcatggtcgtgtatgattgcggtgttcacagattttgtttgcttgttcctagatagtcatttatgtggtgcaaatttagcatcttggatgaagtgaaaatggacaattttgttcatttgttattaggttctggcacttggacttggtatttagtaactgagaatttacttatttagtagttatacagcccgtgtcattgtcgttgggcgaatgaatttcatcgtcagtctattgcatgaatgataaatgcatgtcggtggccttttgccgaatctaccattttgtttgttcctcatctccattcctatctgcttgtttattggtagtagaagtagaactgctatttatggctgaggcctgagggaaaaaataatcaaatgttcaaccaacttcatttttttcttgagtgcatgggttgcagcctttggctagcttatgatctcgtgtggtctatttaccatataaataaatagcagcattagttcaatttgatgttcatagttctctctctctaaagagtcatatgttagattcatgggaaatacttgaactatacatttttttaatgtatcagatgtgtgaattatcatgtccggatcaatttcaaccaaccaacagttcctttagcaaatttgtcaggcatatttatgcacttgttcgcataactgagactatattatttttataagactaaggtcagactattgatggtttggtttgggtggcaccttgttcttcgttccttgccatttccatgccatccttttattatatacatacatttatttggagataaaatttgatgtcaagagaaacttgtctttctttcactctccaactcatcttcgtagtttgattctcatgggaggaccctgtttccatcatgctgcatctttttatctgataaagtgatatttcttagagcatcaaggttcgacaaccaacatattctcgtgtgaggaaatggaaaagtgatgtcttgaggacattttttatcttttgatgttgataattgttcatattattatggttcaacaactcctagcaccaagtcattctgtatgatctgttaacttgatagaagttaacatcatttgattttaagaaatgtaatcatatttcctgattgctcagaattgacttgttcatcatttttcaatgtccctaattggtattagatttttgtgatcttgtgtcatattctgtgatcaacaatgtacaatttgttgaataggctgttgttgaaaaagctgtatattatgctcttgtatggatcaataggctgttggctgtcggtcatgacatcgccatcaagacagataggaaagttatattttttcctaactatatatgctcttacctattcctgttctccatagtacaaaagatgatattgattttgtggctggtttcatttgttggaatgctcttcaactttcttacgctcatttacattggtgagttctctgtccatgttaattttaagtgagtatgtaactatatgctctcatacgctttagggatccgctacgagcagcctacacatttatcatctgttcccatgcttatttttccttttttttattagtgatgggaatcgtatatccataaatagatctggagactggagcagtttttgttgggataaactttgtactggaccggagcatcttatctctggatgtgagtgccatgaaagtgatacccaacaaacaactaactctggaacacctttggtatgtcgggtaggcgcaaagccagcaagacaacaactgcttgagcagctttggccagttttgcttgccaccatgaatagccatatgttggccatcacatgcttttctctgcggtaaattgctggcttaaatgcatgctgcttgaaccctataatcagatagaccatcccgaatgcaagtcaaggcctgatagtggtctttctgcaattacagagctggaccctggttatataacaggtaaaacgtatggcttactttctttttcttagcactgacttcacaaagttgtagccatgagttgtaatatctagagactctaatatctattacatgataattttagattatatcatactccatgttgagtgaaaagttcattttggaaaacatttttgcaagttctgagctgaagtggctgaaacatggctgaaacagaaaatgtttttttacacgagatcatcaaactaatgaccataggtgctacaacaaagtattgattaggagagaatcatgttctttattcatgtctaagctgaacaatgtggaataatttgtgcaggtacagttatctgtatctcactcacactactgcttctttcaaagtaatctacgttcatctgtttccaaatggcaactccccatatttgctttgatattagcattgtgttctacgcttcagaatagtcctgttagacagggtgcattcagtactcatgtttgttagtgcattctgaagctacccatttcatttattcatgaagagagaaagggaagggaaaacaccttgcactgatattattttattgggcaaggtttcaggtcctctctcttcagtatggaaagaatgggtcaaatggtgtgtagagtttggcattgaagctaatgcaattatcgctgttccgtatgattggagactgcccccatcaatgcttgaggagagagatctgtactttcacaaattaaagtttgtaacacttgcctcaacttgttatgaagcaaccaaatgctatacatctgttaggatcagtaagagttaatggcccagtgacggattcaaggtatcctgctcaccaacagatcccacaagcatacggttaccgccaaatgcctgcaaggttggacagtaccaacccatcacaggccatgggaggttacacgctgcagtcacagaaggaaacattatttgaagagttgccattttgaagagttactcgaatccaatattttgctcttttgaattccttggtgtacactggcaaatattagcatatttgaagagttgccatttcgatcatcatcttcatttgtactttttgggtcagatctaataaagcatcagcattaaatttacaatgatcacctaaatccatggtttttattgcctagagctggtaatgtttctctggttttgcattagttgcttgaaaattgaaagtatctgtatacttctctattgtattttactgcacataatggatttgtttgatgtgtagggattttaaggtatgtaaaatatcttaacttttaaaagatgtgaataagaacataaaatagtaattagtattttgaattttaatgtatcttatcgtaac

SEQ ID NO: 214549 - DNA, 3726 bp, Zea Mays
gaaaaaccctagagacgcccgcaggcagtcgctctcgcgcggcggctctccccgcctcgttcgcccctaccgcgccatcaacgtgcctccccgccgcccctgtcctccccatgcccgccgctcccacccgagatggttagcgcccctcctccttccggtcccttcccctgcctcggccggccagccatggattcaccaagcgggctctggtggcggccggcgccgtcgtcgtgtcctccattcccgtcaaccccctcgatgtcgccaagatatgtttaccagacgaattgatatctaggctatttatgtggttactaattttgactcctctaagacatatttacacagggttggtcgttatgggagatatgggcaccttggtttggcagtgaacttgaccacttacaaagattgtttcaacttatatagtattgataaaaaaaacttggaacggaaattaagacaatacccccacaaattgacctgtttgtatactgccaatgatgatagcgacagcttcatgagcgtcaggcacattttatttattttgacctgtttgtatactaacttaacacaagcttttttgtcaataacgtgggattcggaattttctgagctttgtgtagtggaggaggaggagaggcccatgtcggtggagctggaacccatcgccagcgagcagcagcttaactaggtccttggagaggcgtagcagctccagctcctcatcgtcctgctctggtaaccccactttcctagatcggtttgtgcctgtagggtgttcttgttaaagtttgcttgtaatgtctgtgagattgcaatcatggtcgtgtatgattgcggtgttcacagattttgtttgcttgttcctagatagtcatttatgtggtgcaaatttagcatcttggatgaagtgaaaatggacaattttgttcatttgttattaggttctggcacttggacttggtatttagtaactgagaatttacttatttagtagttatacagcccgtgtcattgtcgttgggcgaatgaatttcatcgtcagtctattgcatgaatgataaatgcatgtcggtggccttttgccgaatctaccattttgtttgttcctcatctccattcctatctgcttgtttattggtagtagaagtagaactgctatttatggctgaggcctgagggaaaaaataatcaaatgttcaaccaacttcatttttttcttgagtgcatgggttgcagcctttggctagcttatgatctcgtgtggtctatttaccatataaataaatagcagcattagttcaatttgatgttcatagttctctctctctaaagagtcatatgttagattcatgggaaatacttgaactatacatttttttaatgtatcagatgtgtgaattatcatgtccggatcaatttcaaccaaccaacagttcctttagcaaatttgtcaggcatatttatgcacttgttcgcataactgagactatattatttttataagactaaggtcagactattgatggtttggtttgggtggcaccttgttcttcgttccttgccatttccatgccatccttttattatatacatacatttatttggagataaaatttgatgtcaagagaaacttgtctttctttcactctccaactcatcttcgtagtttgattctcatgggaggaccctgtttccatcatgctgcatctttttatctgataaagtgatatttcttagagcatcaaggttcgacaaccaacatattctcgtgtgaggaaatggaaaagtgatgtcttgaggacattttttatcttttgatgttgataattgttcatattattatggttcaacaactcctagcaccaagtcattctgtatgatctgttaacttgatagaagttaacatcatttgattttaagaaatgtaatcatatttcctgattgctcagaattgacttgttcatcatttttcaatgtccctaattggtattagatttttgtgatcttgtgtcatattctgtgatcaacaatgtacaatttgttgaataggctgttgttgaaaaagctgtatattatgctcttgtatggatcaataggctgttggctgtcggtcatgacatcgccatcaagacagataggaaagttatattttttcctaactatatatgctcttacctattcctgttctccatagtacaaaagatgatattgattttgtggctggtttcatttgttggaatgctcttcaactttcttacgctcatttacattggtgagttctctgtccatgttaattttaagtgagtatgtaactatatgctctcatacgctttagggatccgctacgagcagcctacacatttatcatctgttcccatgcttatttttccttttttttattagtgatgggaatcgtatatccataaatagatctggagactggagcagtttttgttgggataaactttgtactggaccggagcatcttatctctggatgtgagtgccatgaaagtgatacccaacaaacaactaactctggaacacctttggtatgtcgggtaggcgcaaagccagcaagacaacaactgcttgagcagctttggccagttttgcttgccaccatgaatagccatatgttggccatcacatggtaccttgttcgtcccaaactagaccagagcattacaagcaatgactgccatatctaaaattgaaaacatgtgcggcttataagtatcctaaatttgctccacttctaagtatccaagatctactggttttgatgcgttccattgcttgcagcttttctctgcggtaaattgctggcttaaatgcatgctgcttgaaccctataatcagatagaccatcccgaatgcaagtcaaggcctgatagtggtctttctgcaattacagagctggaccctggttatataacaggtttcaggtcctctctcttcagtatggaaagaatgggtcaaatggtgtgtagagtttggcattgaagctaatgcaattatcgctgttccgtatgattggagactgcccccatcaatgcttgaggagagagatctgtactttcacaaattaaagtttgtaacacttgcctcaacttgttatgaagcaaccaaatgctatacatctgttaggatcagtaagagttaatggcccagtgacggattcaaggtatcctgctcaccaacagatcccacaagcatacggttaccgccaaatgcctgcaaggttggacagtaccaacccatcacaggccatgggaggttacacgctgcagtcacagaaggaaacattatttgaagagttgccattttgaagagttactcgaatccaatattttgctcttttgaattccttggtgtacactggcaaatattagcatatttgaagagttgccatttcgatcatcatcttcatttgtactttttgggtcagatctaataaagcatcagcattaaatttacaatgatcacctaaatccatggtttttattgcctagagctggtaatgtttctctggttttgcattagttgcttgaaaattgaaagtatctgtatacttctctattgtattttactgcacataatggatttgtttgatgtgtagggattttaaggtatgtaaaatatcttaacttttaaaagatgtgaataagaacataaaatagtaattagtattttgaattttaatgtatcttatcgtaac

SEQ ID NO: 214550 - DNA, 1352 bp, Zea Mays
aaaaaccctagagacgcccgcaggcagtcgctctcgcgcggcggctctccccgcctcgttcgcccctaccgcgccatcaacgtgcctccccgccgcccctgtcctccccatgcccgccgctcccacccgagatggttagcgcccctcctccttccggtcccttcccctgcctcggccggccagccatggattcaccaagcgggctctggtggcggccggcgccgtcgtcgtgtcctccattcccgtcaaccccctcgatgtcgccaagatatgtttaccagacgaattgatatctaggctatttatgtggttactaattttgactcctctaagacatatttacacagggttggtcgttatgggagatatgggcaccttggtttggcagtgaacttgaccacttacaaagattgtttcaacttatatagtattgataaaaaaaacttggaacggaaattaagacaatacccccacaaattgacctgtttgtatactgccaatgatgatagcgacagcttcatgagcgtcagtggaggaggaggagaggcccatgtcggtggagctggaacccatcgccagcgagcagcagcttaactaggtccttggagaggcgtagcagctccagctcctcatcgtcctgctctgcttttctctgcggtaaattgctggcttaaatgcatgctgcttgaaccctataatcagatagaccatcccgaatgcaagtcaaggcctgatagtggtctttctgcaattacagagctggaccctggttatataacaggatcagtaagagttaatggcccagtgacggattcaaggtatcctgctcaccaacagatcccacaagcatacggttaccgccaaatgcctgcaaggttggacagtaccaacccatcacaggccatgggaggttacacgctgcagtcacagaaggaaacattatttgaagagttgccattttgaagagttactcgaatccaatattttgctcttttgaattccttggtgtacactggcaaatattagcatatttgaagagttgccatttcgatcatcatcttcatttgtactttttgggtcagatctaataaagcatcagcattaaatttacaatgatcacctaaatccatggtttttattgcctagagctggtaatgtttctctggttttgcattagttgcttgaaaattgaaagtatctgtatacttctctattgtattttactgcacataatggatttgtttgatgtgtagggattttaaggtatgtaaaatatcttaacttttaaaagatgtgaataagaacataaaatagtaattagtattttgaattttaatgtatcttatcgtaac

SEQ ID NO: 214551 - DNA, 2103 bp, Zea Mays
ccgcaggcagtcgctctcgcgcggcggctctccccgcctcgttcgcccctaccgcgccatcaacgtgcctccccgccgcccctgtcctccccatgcccgccgctcccacccgagatggttagcgcccctcctccttccggtcccttcccctgcctcggccggccagccatggattcaccaagcgggctctggtggcggccggcgccgtcgtcgtgtcctccattcccgtcaaccccctcgatgtcgccaagatatgtttaccagacgaattgatatctaggctatttatgtggttactaattttgactcctctaagacatatttacacagggttggtcgttatgggagatatgggcaccttggtttggcagtgaacttgaccacttacaaagattgtttcaacttatatagtattgataaaaaaaacttggaacggaaattaagacaatacccccacaaattgacctgtttgtatactgccaatgatgatagcgacagcttcatgagcgtcaggcacattttatttattttgacctgtttgtatactaacttaacacaagcttttttgtcaataacgtgggattcggaattttctgagctttgtgtagtggaggaggaggagaggcccatgtcggtggagctggaacccatcgccagcgagcagcagcttaactaggtccttggagaggcgtagcagctccagctcctcatcgtcctgctctggctgttgttgaaaaagctgtatattatgctcttgtatggatcaataggctgttggctgtcggtcatgacatcgccatcaagacagataggaaagttatattttttcctaactatatatgctcttacctattcctgttctccatagtacaaaagatgatattgattttgtggctggtttcatttgttggaatgctcttcaactttcttacgctcatttacattggtgagttctctgtccatgttaattttaagtgagtatgtaactatatgctctcatacgctttagggatccgctacgagcagcctacacatttatcatctgttcccatgcttatttttccttttttttattagtgatgggaatcgtatatccataaatagatctggagactggagcagtttttgttgggataaactttgtactggaccggagcatcttatctctggatgtgagtgccatgaaagtgatacccaacaaacaactaactctggaacacctttggtatgtcgggtaggcgcaaagccagcaagacaacaactgcttgagcagctttggccagttttgcttgccaccatgaatagccatatgttggccatcacatggtaccttgttcgtcccaaactagaccagagcattacaagcaatgactgccatatctaaaattgaaaacatcttttctctgcggtaaattgctggcttaaatgcatgctgcttgaaccctataatcagatagaccatcccgaatgcaagtcaaggcctgatagtggtctttctgcaattacagagctggaccctggttatataacaggatcagtaagagttaatggcccagtgacggattcaaggtatcctgctcaccaacagatcccacaagcatacggttaccgccaaatgcctgcaaggttggacagtaccaacccatcacaggccatgggaggttacacgctgcagtcacagaaggaaacattatttgaagagttgccattttgaagagttactcgaatccaatattttgctcttttgaattccttggtgtacactggcaaatattagcatatttgaagagttgccatttcgatcatcatcttcatttgtactttttgggtcagatctaataaagcatcagcattaaatttacaatgatcacctaaatccatggtttttattgcctagagctggtaatgtttctctggttttgcattagttgcttgaaaattgaaagtatctgtatacttctctattgtattttactgcacataatggatttgtttgatgtgtagggattttaaggtatgtaaaatatcttaacttttaaaagatgtgaataagaacataaaatagtaattagtattttgaattttaatgtatcttatcgtaac

SEQ ID NO: 214552 - DNA, 3701 bp, Zea Mays
caggcagtcgctctcgcgcggcggctctccccgcctcgttcgcccctaccgcgccatcaacgtgcctccccgccgcccctgtcctccccatgcccgccgctcccacccgagatggttagcgcccctcctccttccggtcccttcccctgcctcggccggccagccatggattcaccaagcgggctctggtggcggccggcgccgtcgtcgtgtcctccattcccgtcaaccccctcgatgtcgccaagatatgtttaccagacgaattgatatctaggctatttatgtggttactaattttgactcctctaagacatatttacacagggttggtcgttatgggagatatgggcaccttggtttggcagtgaacttgaccacttacaaagattgtttcaacttatatagtattgataaaaaaaacttggaacggaaattaagacaatacccccacaaattgacctgtttgtatactgccaatgatgatagcgacagcttcatgagcgtcaggcacattttatttattttgacctgtttgtatactaacttaacacaagcttttttgtcaataacgtgggattcggaattttctgagctttgtgtagtggaggaggaggagaggcccatgtcggtggagctggaacccatcgccagcgagcagcagcttaactaggtccttggagaggcgtagcagctccagctcctcatcgtcctgctctggtaaccccactttcctagatcggtttgtgcctgtagggtgttcttgttaaagtttgcttgtaatgtctgtgagattgcaatcatggtcgtgtatgattgcggtgttcacagattttgtttgcttgttcctagatagtcatttatgtggtgcaaatttagcatcttggatgaagtgaaaatggacaattttgttcatttgttattaggttctggcacttggacttggtatttagtaactgagaatttacttatttagtagttatacagcccgtgtcattgtcgttgggcgaatgaatttcatcgtcagtctattgcatgaatgataaatgcatgtcggtggccttttgccgaatctaccattttgtttgttcctcatctccattcctatctgcttgtttattggtagtagaagtagaactgctatttatggctgaggcctgagggaaaaaataatcaaatgttcaaccaacttcatttttttcttgagtgcatgggttgcagcctttggctagcttatgatctcgtgtggtctatttaccatataaataaatagcagcattagttcaatttgatgttcatagttctctctctctaaagagtcatatgttagattcatgggaaatacttgaactatacatttttttaatgtatcagatgtgtgaattatcatgtccggatcaatttcaaccaaccaacagttcctttagcaaatttgtcaggcatatttatgcacttgttcgcataactgagactatattatttttataagactaaggtcagactattgatggtttggtttgggtggcaccttgttcttcgttccttgccatttccatgccatccttttattatatacatacatttatttggagataaaatttgatgtcaagagaaacttgtctttctttcactctccaactcatcttcgtagtttgattctcatgggaggaccctgtttccatcatgctgcatctttttatctgataaagtgatatttcttagagcatcaaggttcgacaaccaacatattctcgtgtgaggaaatggaaaagtgatgtcttgaggacattttttatcttttgatgttgataattgttcatattattatggttcaacaactcctagcaccaagtcattctgtatgatctgttaacttgatagaagttaacatcatttgattttaagaaatgtaatcatatttcctgattgctcagaattgacttgttcatcatttttcaatgtccctaattggtattagatttttgtgatcttgtgtcatattctgtgatcaacaatgtacaatttgttgaataggctgttgttgaaaaagctgtatattatgctcttgtatggatcaataggctgttggctgtcggtcatgacatcgccatcaagacagataggaaagttatattttttcctaactatatatgctcttacctattcctgttctccatagtacaaaagatgatattgattttgtggctggtttcatttgttggaatgctcttcaactttcttacgctcatttacattggtgagttctctgtccatgttaattttaagtgagtatgtaactatatgctctcatacgctttagggatccgctacgagcagcctacacatttatcatctgttcccatgcttatttttccttttttttattagtgatgggaatcgtatatccataaatagatctggagactggagcagtttttgttgggataaactttgtactggaccggagcatcttatctctggatgtgagtgccatgaaagtgatacccaacaaacaactaactctggaacacctttggtatgtcgggtaggcgcaaagccagcaagacaacaactgcttgagcagctttggccagttttgcttgccaccatgaatagccatatgttggccatcacatggtaccttgttcgtcccaaactagaccagagcattacaagcaatgactgccatatctaaaattgaaaacatgtgcggcttataagtatcctaaatttgctccacttctaagtatccaagatctactggttttgatgcgttccattgcttgcagcttttctctgcggtaaattgctggcttaaatgcatgctgcttgaaccctataatcagatagaccatcccgaatgcaagtcaaggcctgatagtggtctttctgcaattacagagctggaccctggttatataacaggtcctctctcttcagtatggaaagaatgggtcaaatggtgtgtagagtttggcattgaagctaatgcaattatcgctgttccgtatgattggagactgcccccatcaatgcttgaggagagagatctgtactttcacaaattaaagtttgtaacacttgcctcaacttgttatgaagcaaccaaatgctatacatctgttagcaggatcagtaagagttaatggcccagtgacggattcaaggtatcctgctcaccaacagatcccacaagcatacggttaccgccaaatgcctgcaaggttggacagtaccaacccatcacaggccatgggaggttacacgctgcagtcacagaaggaaacattatttgaagagttgccattttgaagagttactcgaatccaatattttgctcttttgaattccttggtgtacactggcaaatattagcatatttgaagagttgccatttcgatcatcatcttcatttgtactttttgggtcagatctaataaagcatcagcattaaatttacaatgatcacctaaatccatggtttttattgcctagagctggtaatgtttctctggttttgcattagttgcttgaaaattgaaagtatctgtatacttctctattgtattttactgcacataatggatttgtttgatgtgtagggattttaaggtatgtaaaatatcttaacttttaaaagatgtgaataagaacataaaatagtaattagtattttgaattttaatgtatcttatcgtaac

SEQ ID NO: 214553 - DNA, 2561 bp, Zea Mays
aggcagtcgctctcgcgcggcggctctccccgcctcgttcgcccctaccgcgccatcaacgtgcctccccgccgcccctgtcctccccatgcccgccgctcccacccgagatggttagcgcccctcctccttccggtcccttcccctgcctcggccggccagccatggattcaccaagcgggctctggtggcggccggcgccgtcgtcgtgtcctccattcccgtcaaccccctcgatgtcgccaaggagcaggacgatgcagtggggcagcatctctaatcatttaaggtctactcaaatgcactcaccaaattaatggagccaataacccaggcagcagttacatttcacctacaaaacacagttaaatataaacttatacattgcctgttttttgtgtgtttgccagcttcaaattaaccagtccattatattatgcaactctgtgaatagaattgagctactggctaagaaaataactgaactcggttattcatgcttcacattcatgctaagagcctaagatgttgcaagacaacagaaactgagtgtttcatgagtttcataatggtgcttgcagaaaccttttgtgcacagatatgtttaccagacgaattgatatctaggctatttatgtggttactaattttgactcctctaagacatatttacacagggttggtcgttatgggagatatgggcaccttggtttggcagtgaacttgaccacttacaaagattgtttcaacttatatagtattgataaaaaaaacttggaacggaaattaagacaatacccccacaaattgacctgtttgtatactgccaatgatgatagcgacagcttcatgagcgtcaggcacattttatttattttgacctgtttgtatactaacttaacacaagcttttttgtcaataacgtgggattcggaattttctgagctttgtgtagtggaggaggaggagaggcccatgtcggtggagctggaacccatcgccagcgagcagcagcttaactaggtccttggagaggcgtagcagctccagctcctcatcgtcctgctctgcttttctctgcggtaaattgctggcttaaatgcatgctgcttgaaccctataatcagatagaccatcccgaatgcaagtcaaggcctgatagtggtctttctgcaattacagagctggaccctggttatataacaggtaaaacgtatggcttactttctttttcttagcactgacttcacaaagttgtagccatgagttgtaatatctagagactctaatatctattacatgataattttagattatatcatactccatgttgagtgaaaagttcattttggaaaacatttttgcaagttctgagctgaagtggctgaaacatggctgaaacagaaaatgtttttttacacgagatcatcaaactaatgaccataggtgctacaacaaagtattgattaggagagaatcatgttctttattcatgtctaagctgaacaatgtggaataatttgtgcaggtacagttatctgtatctcactcacactactgcttctttcaaagtaatctacgttcatctgtttccaaatggcaactccccatatttgctttgatattagcattgtgttctacgcttcagaatagtcctgttagacagggtgcattcagtactcatgtttgttagtgcattctgaagctacccatttcatttattcatgaagagagaaagggaagggaaaacaccttgcactgatattattttattgggcaaggtttcaggtcctctctcttcagtatggaaagaatgggtcaaatggtgtgtagagtttggcattgaagctaatgcaattatcgctgttccgtatgattggagactgcccccatcaatgcttgaggagagagatctgtactttcacaaattaaagtttgtaacacttgcctcaacttgttatgaagcaaccaaatgctatacatctgttaggatcagtaagagttaatggcccagtgacggattcaaggtatcctgctcaccaacagatcccacaagcatacggttaccgccaaatgcctgcaaggttggacagtaccaacccatcacaggccatgggaggttacacgctgcagtcacagaaggaaacattatttgaagagttgccattttgaagagttactcgaatccaatattttgctcttttgaattccttggtgtacactggcaaatattagcatatttgaagagttgccatttcgatcatcatcttcatttgtactttttgggtcagatctaataaagcatcagcattaaatttacaatgatcacctaaatccatggtttttattgcctagagctggtaatgtttctctggttttgcattagttgcttgaaaattgaaagtatctgtatacttctctattgtattttactgcacataatggatttgtttgatgtgtagggattttaaggtatgtaaaatatcttaacttttaaaagatgtgaataagaacataaaatagtaattagtattttgaattttaatgtatcttatcgtaac

SEQ ID NO: 214554 - DNA, 3796 bp, Zea Mays
gcagtcgctctcgcgcggcggctctccccgcctcgttcgcccctaccgcgccatcaacgtgcctccccgccgcccctgtcctccccatgcccgccgctcccacccgagatggttagcgcccctcctccttccggtcccttcccctgcctcggccggccagccatggattcaccaagcgggctctggtggcggccggcgccgtcgtcgtgtcctccattcccgtcaaccccctcgatgtcgccaaggagcaggacgatgcagtggggcagcatctctaatcatttaagcttcaaattaaccagtccattatattatgcaactctgtgaatagaattgagctactggctaagaaaataactgaactcggttattcatgcttcacattcatgctaagagcctaagatgttgcaagacaacagaaactgagtgtttcatgagtttcataatggtgcttgcagaaaccttttgtgcacagatatgtttaccagacgaattgatatctaggctatttatgtggttactaattttgactcctctaagacatatttacacagggttggtcgttatgggagatatgggcaccttggtttggcagtgaacttgaccacttacaaagattgtttcaacttatatagtattgataaaaaaaacttggaacggaaattaagacaatacccccacaaattgacctgtttgtatactgccaatgatgatagcgacagcttcatgagcgtcaggcacattttatttattttgacctgtttgtatactaacttaacacaagcttttttgtcaataacgtgggattcggaattttctgagctttgtgtagtggaggaggaggagaggcccatgtcggtggagctggaacccatcgccagcgagcagcagcttaactaggtccttggagaggcgtagcagctccagctcctcatcgtcctgctctggtaaccccactttcctagatcggtttgtgcctgtagggtgttcttgttaaagtttgcttgtaatgtctgtgagattgcaatcatggtcgtgtatgattgcggtgttcacagattttgtttgcttgttcctagatagtcatttatgtggtgcaaatttagcatcttggatgaagtgaaaatggacaattttgttcatttgttattaggttctggcacttggacttggtatttagtaactgagaatttacttatttagtagttatacagcccgtgtcattgtcgttgggcgaatgaatttcatcgtcagtctattgcatgaatgataaatgcatgtcggtggccttttgccgaatctaccattttgtttgttcctcatctccattcctatctgcttgtttattggtagtagaagtagaactgctatttatggctgaggcctgagggaaaaaataatcaaatgttcaaccaacttcatttttttcttgagtgcatgggttgcagcctttggctagcttatgatctcgtgtggtctatttaccatataaataaatagcagcattagttcaatttgatgttcatagttctctctctctaaagagtcatatgttagattcatgggaaatacttgaactatacatttttttaatgtatcagatgtgtgaattatcatgtccggatcaatttcaaccaaccaacagttcctttagcaaatttgtcaggcatatttatgcacttgttcgcataactgagactatattatttttataagactaaggtcagactattgatggtttggtttgggtggcaccttgttcttcgttccttgccatttccatgccatccttttattatatacatacatttatttggagataaaatttgatgtcaagagaaacttgtctttctttcactctccaactcatcttcgtagtttgattctcatgggaggaccctgtttccatcatgctgcatctttttatctgataaagtgatatttcttagagcatcaaggttcgacaaccaacatattctcgtgtgaggaaatggaaaagtgatgtcttgaggacattttttatcttttgatgttgataattgttcatattattatggttcaacaactcctagcaccaagtcattctgtatgatctgttaacttgatagaagttaacatcatttgattttaagaaatgtaatcatatttcctgattgctcagaattgacttgttcatcatttttcaatgtccctaattggtattagatttttgtgatcttgtgtcatattctgtgatcaacaatgtacaatttgttgaataggctgttgttgaaaaagctgtatattatgctcttgtatggatcaataggctgttggctgtcggtcatgacatcgccatcaagacagataggaaagttatattttttcctaactatatatgctcttacctattcctgttctccatagtacaaaagatgatattgattttgtggctggtttcatttgttggaatgctcttcaactttcttacgctcatttacattggtgagttctctgtccatgttaattttaagtgagtatgtaactatatgctctcatacgctttagggatccgctacgagcagcctacacatttatcatctgttcccatgcttatttttccttttttttattagtgatgggaatcgtatatccataaatagatctggagactggagcagtttttgttgggataaactttgtactggaccggagcatcttatctctggatgtgagtgccatgaaagtgatacccaacaaacaactaactctggaacacctttggtatgtcgggtaggcgcaaagccagcaagacaacaactgcttgagcagctttggccagttttgcttgccaccatgaatagccatatgttggccatcacatggtaccttgttcgtcccaaactagaccagagcattacaagcaatgactgccatatctaaaattgaaaacatcttttctctgcggtaaattgctggcttaaatgcatgctgcttgaaccctataatcagatagaccatcccgaatgcaagtcaaggcctgatagtggtctttctgcaattacagagctggaccctggttatataacaggtttcaggtcctctctcttcagtatggaaagaatgggtcaaatggtgtgtagagtttggcattgaagctaatgcaattatcgctgttccgtatgattggagactgcccccatcaatgcttgaggagagagatctgtactttcacaaattaaacaggatcagtaagagttaatggcccagtgacggattcaaggtatcctgctcaccaacagatcccacaagcatacggttaccgccaaatgcctgcaaggttggacagtaccaacccatcacaggccatgggaggttacacgctgcagtcacagaaggaaacattatttgaagagttgccattttgaagagttactcgaatccaatattttgctcttttgaattccttggtgtacactggcaaatattagcatatttgaagagttgccatttcgatcatcatcttcatttgtactttttgggtcagatctaataaagcatcagcattaaatttacaatgatcacctaaatccatggtttttattgcctagagctggtaatgtttctctggttttgcattagttgcttgaaaattgaaagtatctgtatacttctctattgtattttactgcacataatggatttgtttgatgtgtagggattttaaggtatgtaaaatatcttaacttttaaaagatgtgaataagaacataaaatagtaattagtattttgaattttaatgtatcttatcgtaac

SEQ ID NO: 214555 - DNA, 3871 bp, Zea Mays
gcagtcgctctcgcgcggcggctctccccgcctcgttcgcccctaccgcgccatcaacgtgcctccccgccgcccctgtcctccccatgcccgccgctcccacccgagatggttagcgcccctcctccttccggtcccttcccctgcctcggccggccagccatggattcaccaagcgggctctggtggcggccggcgccgtcgtcgtgtcctccattcccgtcaaccccctcgatgtcgccaaggagcaggacgatgcagtggggcagcatctctaatcatttaagcttcaaattaaccagtccattatattatgcaactctgtgaatagaattgagctactggctaagaaaataactgaactcggttattcatgcttcacattcatgctaagagcctaagatgttgcaagacaacagaaactgagtgtttcatgagtttcataatggtgcttgcagaaaccttttgtgcacagatatgtttaccagacgaattgatatctaggctatttatgtggttactaattttgactcctctaagacatatttacacagggttggtcgttatgggagatatgggcaccttggtttggcagtgaacttgaccacttacaaagattgtttcaacttatatagtattgataaaaaaaacttggaacggaaattaagacaatacccccacaaattgacctgtttgtatactgccaatgatgatagcgacagcttcatgagcgtcaggcacattttatttattttgacctgtttgtatactaacttaacacaagcttttttgtcaataacgtgggattcggaattttctgagctttgtgtagtggaggaggaggagaggcccatgtcggtggagctggaacccatcgccagcgagcagcagcttaactaggtccttggagaggcgtagcagctccagctcctcatcgtcctgctctggtaaccccactttcctagatcggtttgtgcctgtagggtgttcttgttaaagtttgcttgtaatgtctgtgagattgcaatcatggtcgtgtatgattgcggtgttcacagattttgtttgcttgttcctagatagtcatttatgtggtgcaaatttagcatcttggatgaagtgaaaatggacaattttgttcatttgttattaggttctggcacttggacttggtatttagtaactgagaatttacttatttagtagttatacagcccgtgtcattgtcgttgggcgaatgaatttcatcgtcagtctattgcatgaatgataaatgcatgtcggtggccttttgccgaatctaccattttgtttgttcctcatctccattcctatctgcttgtttattggtagtagaagtagaactgctatttatggctgaggcctgagggaaaaaataatcaaatgttcaaccaacttcatttttttcttgagtgcatgggttgcagcctttggctagcttatgatctcgtgtggtctatttaccatataaataaatagcagcattagttcaatttgatgttcatagttctctctctctaaagagtcatatgttagattcatgggaaatacttgaactatacatttttttaatgtatcagatgtgtgaattatcatgtccggatcaatttcaaccaaccaacagttcctttagcaaatttgtcaggcatatttatgcacttgttcgcataactgagactatattatttttataagactaaggtcagactattgatggtttggtttgggtggcaccttgttcttcgttccttgccatttccatgccatccttttattatatacatacatttatttggagataaaatttgatgtcaagagaaacttgtctttctttcactctccaactcatcttcgtagtttgattctcatgggaggaccctgtttccatcatgctgcatctttttatctgataaagtgatatttcttagagcatcaaggttcgacaaccaacatattctcgtgtgaggaaatggaaaagtgatgtcttgaggacattttttatcttttgatgttgataattgttcatattattatggttcaacaactcctagcaccaagtcattctgtatgatctgttaacttgatagaagttaacatcatttgattttaagaaatgtaatcatatttcctgattgctcagaattgacttgttcatcatttttcaatgtccctaattggtattagatttttgtgatcttgtgtcatattctgtgatcaacaatgtacaatttgttgaataggctgttgttgaaaaagctgtatattatgctcttgtatggatcaataggctgttggctgtcggtcatgacatcgccatcaagacagataggaaagttatattttttcctaactatatatgctcttacctattcctgttctccatagtacaaaagatgatattgattttgtggctggtttcatttgttggaatgctcttcaactttcttacgctcatttacattggtgagttctctgtccatgttaattttaagtgagtatgtaactatatgctctcatacgctttagggatccgctacgagcagcctacacatttatcatctgttcccatgcttatttttccttttttttattagtgatgggaatcgtatatccataaatagatctggagactggagcagtttttgttgggataaactttgtactggaccggagcatcttatctctggatgtgagtgccatgaaagtgatacccaacaaacaactaactctggaacacctttggtatgtcgggtaggcgcaaagccagcaagacaacaactgcttgagcagctttggccagttttgcttgccaccatgaatagccatatgttggccatcacatggtaccttgttcgtcccaaactagaccagagcattacaagcaatgactgccatatctaaaattgaaaacatgtgcggcttataagtatcctaaatttgctccacttctaagtatccaagatctactggttttgatgcgttccattgcttgcagcttttctctgcggtaaattgctggcttaaatgcatgctgcttgaaccctataatcagatagaccatcccgaatgcaagtcaaggcctgatagtggtctttctgcaattacagagctggaccctggttatataacaggtcctctctcttcagtatggaaagaatgggtcaaatggtgtgtagagtttggcattgaagctaatgcaattatcgctgttccgtatgattggagactgcccccatcaatgcttgaggagagagatctgtactttcacaaattaaacaggatcagtaagagttaatggcccagtgacggattcaaggtatcctgctcaccaacagatcccacaagcatacggttaccgccaaatgcctgcaaggttggacagtaccaacccatcacaggccatgggaggttacacgctgcagtcacagaaggaaacattatttgaagagttgccattttgaagagttactcgaatccaatattttgctcttttgaattccttggtgtacactggcaaatattagcatatttgaagagttgccatttcgatcatcatcttcatttgtactttttgggtcagatctaataaagcatcagcattaaatttacaatgatcacctaaatccatggtttttattgcctagagctggtaatgtttctctggttttgcattagttgcttgaaaattgaaagtatctgtatacttctctattgtattttactgcacataatggatttgtttgatgtgtagggattttaaggtatgtaaaatatcttaacttttaaaagatgtgaataagaacataaaatagtaattagtattttgaattttaatgtatcttatcgtaac

SEQ ID NO: 214556 - DNA, 3396 bp, Zea Mays
gcagtcgctctcgcgcggcggctctccccgcctcgttcgcccctaccgcgccatcaacgtgcctccccgccgcccctgtcctccccatgcccgccgctcccacccgagatggttagcgcccctcctccttccggtcccttcccctgcctcggccggccagccatggattcaccaagcgggctctggtggcggccggcgccgtcgtcgtgtcctccattcccgtcaaccccctcgatgtcgccaaggagcaggacgatgcagtggggcagcatctctaatcatttaagcttcaaattaaccagtccattatattatgcaactctgtgaatagaattgagctactggctaagaaaataactgaactcggttattcatgcttcacattcatgctaagagcctaagatgttgcaagacaacagaaactgagtgtttcatgagtttcataatggtgcttgcagaaaccttttgtgcacagatatgtttaccagacgaattgatatctaggctatttatgtggttactaattttgactcctctaagacatatttacacagggttggtcgttatgggagatatgggcaccttggtttggcagtgaacttgaccacttacaaagattgtttcaacttatatagtattgataaaaaaaacttggaacggaaattaagacaatacccccacaaattgacctgtttgtatactgccaatgatgatagcgacagcttcatgagcgtcaggcacattttatttattttgacctgtttgtatactaacttaacacaagcttttttgtcaataacgtgggattcggaattttctgagctttgtgtagtggaggaggaggagaggcccatgtcggtggagctggaacccatcgccagcgagcagcagcttaactaggtccttggagaggcgtagcagctccagctcctcatcgtcctgctctggtaaccccactttcctagatcggtttgtgcctgtagggtgttcttgttaaagtttgcttgtaatgtctgtgagattgcaatcatggtcgtgtatgattgcggtgttcacagattttgtttgcttgttcctagatagtcatttatgtggtgcaaatttagcatcttggatgaagtgaaaatggacaattttgttcatttgttattaggttctggcacttggacttggtatttagtaactgagaatttacttatttagtagttatacagcccgtgtcattgtcgttgggcgaatgaatttcatcgtcagtctattgcatgaatgataaatgcatgtcggtggccttttgccgaatctaccattttgtttgttcctcatctccattcctatctgcttgtttattggtagtagaagtagaactgctatttatggctgaggcctgagggaaaaaataatcaaatgttcaaccaacttcatttttttcttgagtgcatgggttgcagcctttggctagcttatgatctcgtgtggtctatttaccatataaataaatagcagcattagttcaatttgatgttcatagttctctctctctaaagagtcatatgttagattcatgggaaatacttgaactatacatttttttaatgtatcagatgtgtgaattatcatgtccggatcaatttcaaccaaccaacagttcctttagcaaatttgtcaggcatatttatgcacttgttcgcataactgagactatattatttttataagactaaggtcagactattgatggtttggtttgggtggcaccttgttcttcgttccttgccatttccatgccatccttttattatatacatacatttatttggagataaaatttgatgtcaagagaaacttgtctttctttcactctccaactcatcttcgtagtttgattctcatgggaggaccctgtttccatcatgctgcatctttttatctgataaagtgatatttcttagagcatcaaggttcgacaaccaacatattctcgtgtgaggaaatggaaaagtgatgtcttgaggacattttttatcttttgatgttgataattgttcatattattatggttcaacaactcctagcaccaagtcattctgtatgatctgttaacttgatagaagttaacatcatttgattttaagaaatgtaatcatatttcctgattgctcagaattgacttgttcatcatttttcaatgtccctaattggtattagatttttgtgatcttgtgtcatattctgtgatcaacaatgtacaatttgttgaataggctgttgttgaaaaagctgtatattatgctcttgtatggatcaataggctgttggctgtcggtcatgacatcgccatcaagacagataggaaagttatattttttcctaactatatatgctcttacctattcctgttctccatagtacaaaagatgatattgattttgtggctggtttcatttgttggaatgctcttcaactttcttacgctcatttacattgcttttctctgcggtaaattgctggcttaaatgcatgctgcttgaaccctataatcagatagaccatcccgaatgcaagtcaaggcctgatagtggtctttctgcaattacagagctggaccctggttatataacaggtcctctctcttcagtatggaaagaatgggtcaaatggtgtgtagagtttggcattgaagctaatgcaattatcgctgttccgtatgattggagactgcccccatcaatgcttgaggagagagatctgtactttcacaaattaaagtttgtaacacttgcctcaacttgttatgaagcaaccaaatgctatacatctgttagcaggatcagtaagagttaatggcccagtgacggattcaaggtatcctgctcaccaacagatcccacaagcatacggttaccgccaaatgcctgcaaggttggacagtaccaacccatcacaggccatgggaggttacacgctgcagtcacagaaggaaacattatttgaagagttgccattttgaagagttactcgaatccaatattttgctcttttgaattccttggtgtacactggcaaatattagcatatttgaagagttgccatttcgatcatcatcttcatttgtactttttgggtcagatctaataaagcatcagcattaaatttacaatgatcacctaaatccatggtttttattgcctagagctggtaatgtttctctggttttgcattagttgcttgaaaattgaaagtatctgtatacttctctattgtattttactgcacataatggatttgtttgatgtgtagggattttaaggtatgtaaaatatcttaacttttaaaagatgtgaataagaacataaaatagtaattagtattttgaattttaatgtatcttatcgtaac

SEQ ID NO: 214557 - DNA, 3053 bp, Zea Mays
cgcggcggctctccccgcctcgttcgcccctaccgcgccatcaacgtgcctccccgccgcccctgtcctccccatgcccgccgctcccacccgagatggttagcgcccctcctccttccggtcccttcccctgcctcggccggccagccatggattcaccaagcgggctctggtggcggccggcgccgtcgtcgtgtcctccattcccgtcaaccccctcgatgtcgccaagatatgtttaccagacgaattgatatctaggctatttatgtggttactaattttgactcctctaagacatatttacacagggttggtcgttatgggagatatgggcaccttggtttggcagtgaacttgaccacttacaaagattgtttcaacttatatagtattgataaaaaaaacttggaacggaaattaagacaatacccccacaaattgacctgtttgtatactgccaatgatgatagcgacagcttcatgagctggaggaggaggagaggcccatgtcggtggagctggaacccatcgccagcgagcagcagcttaactaggtccttggagaggcgtagcagctccagctcctcatcgtcctgctctggtaaccccactttcctagatcggtttgtgcctgtagggtgttcttgttaaagtttgcttgtaatgtctgtgagattgcaatcatggtcgtgtatgattgcggtgttcacagattttgtttgcttgttcctagatagtcatttatgtggtgcaaatttagcatcttggatgaagtgaaaatggacaattttgttcatttgttattaggttctggcacttggacttggtatttagtaactgagaatttacttatttagtagttatacagcccgtgtcattgtcgttgggcgaatgaatttcatcgtcagtctattgcatgaatgataaatgcatgtcggtggccttttgccgaatctaccattttgtttgttcctcatctccattcctatctgcttgtttattggtagtagaagtagaactgctatttatggctgaggcctgagggaaaaaataatcaaatgttcaaccaacttcatttttttcttgagtgcatgggttgcagcctttggctagcttatgatctcgtgtggtctatttaccatataaataaatagcagcattagttcaatttgatgttcatagttctctctctctaaagagtcatatgttagattcatgggaaatacttgaactatacatttttttaatgtatcagatgtgtgaattatcatgtccggatcaatttcaaccaaccaacagttcctttagcaaatttgtcaggcatatttatgcacttgttcgcataactgagactatattatttttataagactaaggtcagactattgatggtttggtttgggtggcaccttgttcttcgttccttgccatttccatgccatccttttattatatacatacatttatttggagataaaatttgatgtcaagagaaacttgtctttctttcactctccaactcatcttcgtagtttgattctcatgggaggaccctgtttccatcatgctgcatctttttatctgataaagtgatatttcttagagcatcaaggttcgacaaccaacatattctcgtgtgaggaaatggaaaagtgatgtcttgaggacattttttatcttttgatgttgataattgttcatattattatggttcaacaactcctagcaccaagtcattctgtatgatctgttaacttgatagaagttaacatcatttgattttaagaaatgtaatcatatttcctgattgctcagaattgacttgttcatcatttttcaatgtccctaattggtattagatttttgtgatcttgtgtcatattctgtgatcaacaatgtacaatttgttgaataggctgttgttgaaaaagctgtatattatgctcttgtatggatcaataggctgttggctgtcggtcatgacatcgccatcaagacagataggaaagttatattttttcctaactatatatgctcttacctattcctgttctccatagtacaaaagatgatattgattttgtggctggtttcatttgttggaatgctcttcaactttcttacgctcatttacattgcttttctctgcggtaaattgctggcttaaatgcatgctgcttgaaccctataatcagatagaccatcccgaatgcaagtcaaggcctgatagtggtctttctgcaattacagagctggaccctggttatataacaggtcctctctcttcagtatggaaagaatgggtcaaatggtgtgtagagtttggcattgaagctaatgcaattatcgctgttccgtatgattggagactgcccccatcaatgcttgaggagagagatctgtactttcacaaattaaagtttgtaacacttgcctcaacttgttatgaagcaaccaaatgctatacatctgttagcaggatcagtaagagttaatggcccagtgacggattcaaggtatcctgctcaccaacagatcccacaagcatacggttaccgccaaatgcctgcaaggttggacagtaccaacccatcacaggccatgggaggttacacgctgcagtcacagaaggaaacattatttgaagagttgccattttgaagagttactcgaatccaatattttgctcttttgaattccttggtgtacactggcaaatattagcatatttgaagagttgccatttcgatcatcatcttcatttgtactttttgggtcagatctaataaagcatcagcattaaatttacaatgatcacctaaatccatggtttttattgcctagagctggtaatgtttctctggttttgcattagttgcttgaaaattgaaagtatctgtatacttctctattgtattttactgcacataatggatttgtttgatgtgtagggattttaaggtatgtaaaatatcttaacttttaaaagatgtgaataagaacataaaatagtaattagtattttgaattttaatgtatcttatcgtaac

SEQ ID NO: 214558 - DNA, 1489 bp, Zea Mays
cgcggcggctctccccgcctcgttcgcccctaccgcgccatcaacgtgcctccccgccgcccctgtcctccccatgcccgccgctcccacccgagatggttagcgcccctcctccttccggtcccttcccctgcctcggccggccagccatggattcaccaagcgggctctggtggcggccggcgccgtcgtcgtgtcctccattcccgtcaaccccctcgatgtcgccaagatatgtttaccagacgaattgatatctaggctatttatgtggttactaattttgactcctctaagacatatttacacagggttggtcgttatgggagatatgggcaccttggtttggcagtgaacttgaccacttacaaagattgtttcaacttatatagtattgataaaaaaaacttggaacggaaattaagacaatacccccacaaattgacctgtttgtatactgccaatgatgatagcgacagcttcatgagcgtcaggcacattttatttattttgacctgtttgtatactaacttaacacaagcttttttgtcaataacgtgggattcggaattttctgagctttgtgtagtggaggaggaggagaggcccatgtcggtggagctggaacccatcgccagcgagcagcagcttaactaggtccttggagaggcgtagcagctccagctcctcatcgtcctgctctgtacaaaagatgatattgattttgtggctggtttcatttgttggaatgctcttcaactttcttacgctcatttacattgcttttctctgcggtaaattgctggcttaaatgcatgctgcttgaaccctataatcagatagaccatcccgaatgcaagtcaaggcctgatagtggtctttctgcaattacagagctggaccctggttatataacaggatcagtaagagttaatggcccagtgacggattcaaggtatcctgctcaccaacagatcccacaagcatacggttaccgccaaatgcctgcaaggttggacagtaccaacccatcacaggccatgggaggttacacgctgcagtcacagaaggaaacattatttgaagagttgccattttgaagagttactcgaatccaatattttgctcttttgaattccttggtgtacactggcaaatattagcatatttgaagagttgccatttcgatcatcatcttcatttgtactttttgggtcagatctaataaagcatcagcattaaatttacaatgatcacctaaatccatggtttttattgcctagagctggtaatgtttctctggttttgcattagttgcttgaaaattgaaagtatctgtatacttctctattgtattttactgcacataatggatttgtttgatgtgtagggattttaaggtatgtaaaatatcttaacttttaaaagatgtgaataagaacataaaatagtaattagtattttgaattttaatgtatcttatcgtaac

SEQ ID NO: 214559 - DNA, 1525 bp, Zea Mays
cgcggcggctctccccgcctcgttcgcccctaccgcgccatcaacgtgcctccccgccgcccctgtcctccccatgcccgccgctcccacccgagatggttagcgcccctcctccttccggtcccttcccctgcctcggccggccagccatggattcaccaagcgggctctggtggcggccggcgccgtcgtcgtgtcctccattcccgtcaaccccctcgatgtcgccaagatatgtttaccagacgaattgatatctaggctatttatgtggttactaattttgactcctctaagacatatttacacagggttggtcgttatgggagatatgggcaccttggtttggcagtgaacttgaccacttacaaagattgtttcaacttatatagtattgataaaaaaaacttggaacggaaattaagacaatacccccacaaattgacctgtttgtatactgccaatgatgatagcgacagcttcatgagcgtcagtggaggaggaggagaggcccatgtcggtggagctggaacccatcgccagcgagcagcagcttaactaggtccttggagaggcgtagcagctccagctcctcatcgtcctgctctgcttttctctgcggtaaattgctggcttaaatgcatgctgcttgaaccctataatcagatagaccatcccgaatgcaagtcaaggcctgatagtggtctttctgcaattacagagctggaccctggttatataacaggtttcaggtcctctctcttcagtatggaaagaatgggtcaaatggtgtgtagagtttggcattgaagctaatgcaattatcgctgttccgtatgattggagactgcccccatcaatgcttgaggagagagatctgtactttcacaaattaaagtttgtaacacttgcctcaacttgttatgaagcaaccaaatgctatacatctgttaggatcagtaagagttaatggcccagtgacggattcaaggtatcctgctcaccaacagatcccacaagcatacggttaccgccaaatgcctgcaaggttggacagtaccaacccatcacaggccatgggaggttacacgctgcagtcacagaaggaaacattatttgaagagttgccattttgaagagttactcgaatccaatattttgctcttttgaattccttggtgtacactggcaaatattagcatatttgaagagttgccatttcgatcatcatcttcatttgtactttttgggtcagatctaataaagcatcagcattaaatttacaatgatcacctaaatccatggtttttattgcctagagctggtaatgtttctctggttttgcattagttgcttgaaaattgaaagtatctgtatacttctctattgtattttactgcacataatggatttgtttgatgtgtagggattttaaggtatgtaaaatatcttaacttttaaaagatgtgaataagaacataaaatagtaattagtattttgaattttaatgtatcttatcgtaac

SEQ ID NO: 214560 - DNA, 2017 bp, Zea Mays
cgcggcggctctccccgcctcgttcgcccctaccgcgccatcaacgtgcctccccgccgcccctgtcctccccatgcccgccgctcccacccgagatggttagcgcccctcctccttccggtcccttcccctgcctcggccggccagccatggattcaccaagcgggctctggtggcggccggcgccgtcgtcgtgtcctccattcccgtcaaccccctcgatgtcgccaagatatgtttaccagacgaattgatatctaggctatttatgtggttactaattttgactcctctaagacatatttacacagggttggtcgttatgggagatatgggcaccttggtttggcagtgaacttgaccacttacaaagattgtttcaacttatatagtattgataaaaaaaacttggaacggaaattaagacaatacccccacaaattgacctgtttgtatactgccaatgatgatagcgacagcttcatgagcgtcaggcacattttatttattttgacctgtttgtatactaacttaacacaagcttttttgtcaataacgtgggattcggaattttctgagctttgtgtagtggaggaggaggagaggcccatgtcggtggagctggaacccatcgccagcgagcagcagcttaactaggtccttggagaggcgtagcagctccagctcctcatcgtcctgctctgtgatgggaatcgtatatccataaatagatctggagactggagcagtttttgttgggataaactttgtactggaccggagcatcttatctctggatgtgagtgccatgaaagtgatacccaacaaacaactaactctggaacacctttggtatgtcgggtaggcgcaaagccagcaagacaacaactgcttgagcagctttggccagttttgcttgccaccatgaatagccatatgttggccatcacatggtaccttgttcgtcccaaactagaccagagcattacaagcaatgactgccatatctaaaattgaaaacatgtgcggcttataagtatcctaaatttgctccacttctaagtatccaagatctactggttttgatgcgttccattgcttgcagcttttctctgcggtaaattgctggcttaaatgcatgctgcttgaaccctataatcagatagaccatcccgaatgcaagtcaaggcctgatagtggtctttctgcaattacagagctggaccctggttatataacaggtcctctctcttcagtatggaaagaatgggtcaaatggtgtgtagagtttggcattgaagctaatgcaattatcgctgttccgtatgattggagactgcccccatcaatgcttgaggagagagatctgtactttcacaaattaaagtttgtaacacttgcctcaacttgttatgaagcaaccaaatgctatacatctgttagcaggatcagtaagagttaatggcccagtgacggattcaaggtatcctgctcaccaacagatcccacaagcatacggttaccgccaaatgcctgcaaggttggacagtaccaacccatcacaggccatgggaggttacacgctgcagtcacagaaggaaacattatttgaagagttgccattttgaagagttactcgaatccaatattttgctcttttgaattccttggtgtacactggcaaatattagcatatttgaagagttgccatttcgatcatcatcttcatttgtactttttgggtcagatctaataaagcatcagcattaaatttacaatgatcacctaaatccatggtttttattgcctagagctggtaatgtttctctggttttgcattagttgcttgaaaattgaaagtatctgtatacttctctattgtattttactgcacataatggatttgtttgatgtgtagggattttaaggtatgtaaaatatcttaacttttaaaagatgtgaataagaacataaaatagtaattagtattttgaattttaatgtatcttatcgtaac

SEQ ID NO: 214561 - DNA, 1521 bp, Zea Mays
cgcggcggctctccccgcctcgttcgcccctaccgcgccatcaacgtgcctccccgccgcccctgtcctccccatgcccgccgctcccacccgagatggttagcgcccctcctccttccggtcccttcccctgcctcggccggccagccatggattcaccaagcgggctctggtggcggccggcgccgtcgtcgtgtcctccattcccgtcaaccccctcgatgtcgccaagatatgtttaccagacgaattgatatctaggctatttatgtggttactaattttgactcctctaagacatatttacacagggttggtcgttatgggagatatgggcaccttggtttggcagtgaacttgaccacttacaaagattgtttcaacttatatagtattgataaaaaaaacttggaacggaaattaagacaatacccccacaaattgacctgtttgtatactgccaatgatgatagcgacagcttcatgagcgtcagtggaggaggaggagaggcccatgtcggtggagctggaacccatcgccagcgagcagcagcttaactaggtccttggagaggcgtagcagctccagctcctcatcgtcctgctctgcttttctctgcggtaaattgctggcttaaatgcatgctgcttgaaccctataatcagatagaccatcccgaatgcaagtcaaggcctgatagtggtctttctgcaattacagagctggaccctggttatataacaggtcctctctcttcagtatggaaagaatgggtcaaatggtgtgtagagtttggcattgaagctaatgcaattatcgctgttccgtatgattggagactgcccccatcaatgcttgaggagagagatctgtactttcacaaattaaagtttgtaacacttgcctcaacttgttatgaagcaaccaaatgctatacatctgttagcaggatcagtaagagttaatggcccagtgacggattcaaggtatcctgctcaccaacagatcccacaagcatacggttaccgccaaatgcctgcaaggttggacagtaccaacccatcacaggccatgggaggttacacgctgcagtcacagaaggaaacattatttgaagagttgccattttgaagagttactcgaatccaatattttgctcttttgaattccttggtgtacactggcaaatattagcatatttgaagagttgccatttcgatcatcatcttcatttgtactttttgggtcagatctaataaagcatcagcattaaatttacaatgatcacctaaatccatggtttttattgcctagagctggtaatgtttctctggttttgcattagttgcttgaaaattgaaagtatctgtatacttctctattgtattttactgcacataatggatttgtttgatgtgtagggattttaaggtatgtaaaatatcttaacttttaaaagatgtgaataagaacataaaatagtaattagtattttgaattttaatgtatcttatcgtaac

SEQ ID NO: 214562 - DNA, 1516 bp, Zea Mays
cgcggcggctctccccgcctcgttcgcccctaccgcgccatcaacgtgcctccccgccgcccctgtcctccccatgcccgccgctcccacccgagatggttagcgcccctcctccttccggtcccttcccctgcctcggccggccagccatggattcaccaagcgggctctggtggcggccggcgccgtcgtcgtgtcctccattcccgtcaaccccctcgatgtcgccaagatatgtttaccagacgaattgatatctaggctatttatgtggttactaattttgactcctctaagacatatttacacagggttggtcgttatgggagatatgggcaccttggtttggcagtgaacttgaccacttacaaagattgtttcaacttatatagtattgataaaaaaaacttggaacggaaattaagacaatacccccacaaattgacctgtttgtatactgccaatgatgatagcgacagcttcatgagctggaggaggaggagaggcccatgtcggtggagctggaacccatcgccagcgagcagcagcttaactaggtccttggagaggcgtagcagctccagctcctcatcgtcctgctctgcttttctctgcggtaaattgctggcttaaatgcatgctgcttgaaccctataatcagatagaccatcccgaatgcaagtcaaggcctgatagtggtctttctgcaattacagagctggaccctggttatataacaggtcctctctcttcagtatggaaagaatgggtcaaatggtgtgtagagtttggcattgaagctaatgcaattatcgctgttccgtatgattggagactgcccccatcaatgcttgaggagagagatctgtactttcacaaattaaagtttgtaacacttgcctcaacttgttatgaagcaaccaaatgctatacatctgttagcaggatcagtaagagttaatggcccagtgacggattcaaggtatcctgctcaccaacagatcccacaagcatacggttaccgccaaatgcctgcaaggttggacagtaccaacccatcacaggccatgggaggttacacgctgcagtcacagaaggaaacattatttgaagagttgccattttgaagagttactcgaatccaatattttgctcttttgaattccttggtgtacactggcaaatattagcatatttgaagagttgccatttcgatcatcatcttcatttgtactttttgggtcagatctaataaagcatcagcattaaatttacaatgatcacctaaatccatggtttttattgcctagagctggtaatgtttctctggttttgcattagttgcttgaaaattgaaagtatctgtatacttctctattgtattttactgcacataatggatttgtttgatgtgtagggattttaaggtatgtaaaatatcttaacttttaaaagatgtgaataagaacataaaatagtaattagtattttgaattttaatgtatcttatcgtaac

SEQ ID NO: 214563 - DNA, 1464 bp, Zea Mays
cgcggcggctctccccgcctcgttcgcccctaccgcgccatcaacgtgcctccccgccgcccctgtcctccccatgcccgccgctcccacccgagatggttagcgcccctcctccttccggtcccttcccctgcctcggccggccagccatggattcaccaagcgggctctggtggcggccggcgccgtcgtcgtgtcctccattcccgtcaaccccctcgatgtcgccaagatatgtttaccagacgaattgatatctaggctatttatgtggttactaattttgactcctctaagacatatttacacagggttggtcgttatgggagatatgggcaccttggtttggcagtgaacttgaccacttacaaagattgtttcaacttatatagtattgataaaaaaaacttggaacggaaattaagacaatacccccacaaattgacctgtttgtatactgccaatgatgatagcgacagcttcatgagcgtcagtggaggaggaggagaggcccatgtcggtggagctggaacccatcgccagcgagcagcagcttaactaggtccttggagaggcgtagcagctccagctcctcatcgtcctgctctgcttttctctgcggtaaattgctggcttaaatgcatgctgcttgaaccctataatcagatagaccatcccgaatgcaagtcaaggcctgatagtggtctttctgcaattacagagctggaccctggttatataacaggtcctctctcttcagtatggaaagaatgggtcaaatggtgtgtagagtttggcattgaagctaatgcaattatcgctgttccgtatgattggagactgcccccatcaatgcttgaggagagagatctgtactttcacaaattaaacaggatcagtaagagttaatggcccagtgacggattcaaggtatcctgctcaccaacagatcccacaagcatacggttaccgccaaatgcctgcaaggttggacagtaccaacccatcacaggccatgggaggttacacgctgcagtcacagaaggaaacattatttgaagagttgccattttgaagagttactcgaatccaatattttgctcttttgaattccttggtgtacactggcaaatattagcatatttgaagagttgccatttcgatcatcatcttcatttgtactttttgggtcagatctaataaagcatcagcattaaatttacaatgatcacctaaatccatggtttttattgcctagagctggtaatgtttctctggttttgcattagttgcttgaaaattgaaagtatctgtatacttctctattgtattttactgcacataatggatttgtttgatgtgtagggattttaaggtatgtaaaatatcttaacttttaaaagatgtgaataagaacataaaatagtaattagtattttgaattttaatgtatcttatcgtaac

SEQ ID NO: 214564 - DNA, 3625 bp, Zea Mays
cgcggcggctctccccgcctcgttcgcccctaccgcgccatcaacgtgcctccccgccgcccctgtcctccccatgcccgccgctcccacccgagatggttagcgcccctcctccttccggtcccttcccctgcctcggccggccagccatggattcaccaagcgggctctggtggcggccggcgccgtcgtcgtgtcctccattcccgtcaaccccctcgatgtcgccaagatatgtttaccagacgaattgatatctaggctatttatgtggttactaattttgactcctctaagacatatttacacagggttggtcgttatgggagatatgggcaccttggtttggcagtgaacttgaccacttacaaagattgtttcaacttatatagtattgataaaaaaaacttggaacggaaattaagacaatacccccacaaattgacctgtttgtatactgccaatgatgatagcgacagcttcatgagcgtcaggcacattttatttattttgacctgtttgtatactaacttaacacaagcttttttgtcaataacgtgggattcggaattttctgagctttgtgtagtggaggaggaggagaggcccatgtcggtggagctggaacccatcgccagcgagcagcagcttaactaggtccttggagaggcgtagcagctccagctcctcatcgtcctgctctggtaaccccactttcctagatcggtttgtgcctgtagggtgttcttgttaaagtttgcttgtaatgtctgtgagattgcaatcatggtcgtgtatgattgcggtgttcacagattttgtttgcttgttcctagatagtcatttatgtggtgcaaatttagcatcttggatgaagtgaaaatggacaattttgttcatttgttattaggttctggcacttggacttggtatttagtaactgagaatttacttatttagtagttatacagcccgtgtcattgtcgttgggcgaatgaatttcatcgtcagtctattgcatgaatgataaatgcatgtcggtggccttttgccgaatctaccattttgtttgttcctcatctccattcctatctgcttgtttattggtagtagaagtagaactgctatttatggctgaggcctgagggaaaaaataatcaaatgttcaaccaacttcatttttttcttgagtgcatgggttgcagcctttggctagcttatgatctcgtgtggtctatttaccatataaataaatagcagcattagttcaatttgatgttcatagttctctctctctaaagagtcatatgttagattcatgggaaatacttgaactatacatttttttaatgtatcagatgtgtgaattatcatgtccggatcaatttcaaccaaccaacagttcctttagcaaatttgtcaggcatatttatgcacttgttcgcataactgagactatattatttttataagactaaggtcagactattgatggtttggtttgggtggcaccttgttcttcgttccttgccatttccatgccatccttttattatatacatacatttatttggagataaaatttgatgtcaagagaaacttgtctttctttcactctccaactcatcttcgtagtttgattctcatgggaggaccctgtttccatcatgctgcatctttttatctgataaagtgatatttcttagagcatcaaggttcgacaaccaacatattctcgtgtgaggaaatggaaaagtgatgtcttgaggacattttttatcttttgatgttgataattgttcatattattatggttcaacaactcctagcaccaagtcattctgtatgatctgttaacttgatagaagttaacatcatttgattttaagaaatgtaatcatatttcctgattgctcagaattgacttgttcatcatttttcaatgtccctaattggtattagatttttgtgatcttgtgtcatattctgtgatcaacaatgtacaatttgttgaataggctgttgttgaaaaagctgtatattatgctcttgtatggatcaataggctgttggctgtcggtcatgacatcgccatcaagacagataggaaagttatattttttcctaactatatatgctcttacctattcctgttctccatagtacaaaagatgatattgattttgtggctggtttcatttgttggaatgctcttcaactttcttacgctcatttacattggtgagttctctgtccatgttaattttaagtgagtatgtaactatatgctctcatacgctttagggatccgctacgagcagcctacacatttatcatctgttcccatgcttatttttccttttttttattagtgatgggaatcgtatatccataaatagatctggagactggagcagtttttgttgggataaactttgtactggaccggagcatcttatctctggatgtgagtgccatgaaagtgatacccaacaaacaactaactctggaacacctttggtatgtcgggtaggcgcaaagccagcaagacaacaactgcttgagcagctttggccagttttgcttgccaccatgaatagccatatgttggccatcacatggtaccttgttcgtcccaaactagaccagagcattacaagcaatgactgccatatctaaaattgaaaacatgtgcggcttataagtatcctaaatttgctccacttctaagtatccaagatctactggttttgatgcgttccattgcttgcagcttttctctgcggtaaattgctggcttaaatgcatgctgcttgaaccctataatcagatagaccatcccgaatgcaagtcaaggcctgatagtggtctttctgcaattacagagctggaccctggttatataacaggtcctctctcttcagtatggaaagaatgggtcaaatggtgtgtagagtttggcattgaagctaatgcaattatcgctgttccgtatgattggagactgcccccatcaatgcttgaggagagagatctgtactttcacaaattaaagatcagtaagagttaatggcccagtgacggattcaaggtatcctgctcaccaacagatcccacaagcatacggttaccgccaaatgcctgcaaggttggacagtaccaacccatcacaggccatgggaggttacacgctgcagtcacagaaggaaacattatttgaagagttgccattttgaagagttactcgaatccaatattttgctcttttgaattccttggtgtacactggcaaatattagcatatttgaagagttgccatttcgatcatcatcttcatttgtactttttgggtcagatctaataaagcatcagcattaaatttacaatgatcacctaaatccatggtttttattgcctagagctggtaatgtttctctggttttgcattagttgcttgaaaattgaaagtatctgtatacttctctattgtattttactgcacataatggatttgtttgatgtgtagggattttaaggtatgtaaaatatcttaacttttaaaagatgtgaataagaacataaaatagtaattagtattttgaattttaatgtatcttatcgtaac

SEQ ID NO: 214565 - DNA, 1828 bp, Zea Mays
ctcgttcgcccctaccgcgccatcaacgtgcctccccgccgcccctgtcctccccatgcccgccgctcccacccgagatggttagcgcccctcctccttccggtcccttcccctgcctcggccggccagccatggattcaccaagcgggctctggtggcggccggcgccgtcgtcgtgtcctccattcccgtcaaccccctcgatgtcgccaaggagcaggacgatgcagtggggcagcatctctaatcatttaagcttcaaattaaccagtccattatattatgcaactctgtgaatagaattgagctactggctaagaaaataactgaactcggttattcatgcttcacattcatgctaagagcctaagatgttgcaagacaacagaaactgagtgtttcatgagtttcataatggtgcttgcagaaaccttttgtgcacagatatgtttaccagacgaattgatatctaggctatttatgtggttactaattttgactcctctaagacatatttacacagggttggtcgttatgggagatatgggcaccttggtttggcagtgaacttgaccacttacaaagattgtttcaacttatatagtattgataaaaaaaacttggaacggaaattaagacaatacccccacaaattgacctgtttgtatactgccaatgatgatagcgacagcttcatgagcgtcaggcacattttatttattttgacctgtttgtatactaacttaacacaagcttttttgtcaataacgtgggattcggaattttctgagctttgtgtagtggaggaggaggagaggcccatgtcggtggagctggaacccatcgccagcgagcagcagcttaactaggtccttggagaggcgtagcagctccagctcctcatcgtcctgctctgcttttctctgcggtaaattgctggcttaaatgcatgctgcttgaaccctataatcagatagaccatcccgaatgcaagtcaaggcctgatagtggtctttctgcaattacagagctggaccctggttatataacaggtcctctctcttcagtatggaaagaatgggtcaaatggtgtgtagagtttggcattgaagctaatgcaattatcgctgttccgtatgattggagactgcccccatcaatgcttgaggagagagatctgtactttcacaaattaaagtttgtaacacttgcctcaacttgttatgaagcaaccaaatgctatacatctgttagcaggatcagtaagagttaatggcccagtgacggattcaaggtatcctgctcaccaacagatcccacaagcatacggttaccgccaaatgcctgcaaggttggacagtaccaacccatcacaggccatgggaggttacacgctgcagtcacagaaggaaacattatttgaagagttgccattttgaagagttactcgaatccaatattttgctcttttgaattccttggtgtacactggcaaatattagcatatttgaagagttgccatttcgatcatcatcttcatttgtactttttgggtcagatctaataaagcatcagcattaaatttacaatgatcacctaaatccatggtttttattgcctagagctggtaatgtttctctggttttgcattagttgcttgaaaattgaaagtatctgtatacttctctattgtattttactgcacataatggatttgtttgatgtgtagggattttaaggtatgtaaaatatcttaacttttaaaagatgtgaataagaacataaaatagtaattagtattttgaattttaatgtatcttatcgtaac

SEQ ID NO: 214566 - DNA, 1890 bp, Zea Mays
gcgccatcaacgtgcctccccgccgcccctgtcctccccatgcccgccgctcccacccgagatggttagcgcccctcctccttccggtcccttcccctgcctcggccggccagccatggattcaccaagcgggctctggtggcggccggcgccgtcgtcgtgtcctccattcccgtcaaccccctcgatgtcgccaaggagcaggacgatgcagtggggcagcatctctaatcatttaagcttcaaattaaccagtccattatattatgcaactctgtgaatagaattgagctactggctaagaaaataactgaactcggttattcatgcttcacattcatgctaagagcctaagatgttgcaagacaacagaaactgagtgtttcatgagtttcataatggtgcttgcagaaaccttttgtgcacagatatgtttaccagacgaattgatatctaggctatttatgtggttactaattttgactcctctaagacatatttacacagggttggtcgttatgggagatatgggcaccttggtttggcagtgaacttgaccacttacaaagattgtttcaacttatatagtattgataaaaaaaacttggaacggaaattaagacaatacccccacaaattgacctgtttgtatactgccaatgatgatagcgacagcttcatgagcgtcaggcacattttatttattttgacctgtttgtatactaacttaacacaagcttttttgtcaataacgtgggattcggaattttctgagctttgtgtagtggaggaggaggagaggcccatgtcggtggagctggaacccatcgccagcgagcagcagcttaactaggtccttggagaggcgtagcagctccagctcctcatcgtcctgctctgtacaaaagatgatattgattttgtggctggtttcatttgttggaatgctcttcaactttcttacgctcatttacattgcttttctctgcggtaaattgctggcttaaatgcatgctgcttgaaccctataatcagatagaccatcccgaatgcaagtcaaggcctgatagtggtctttctgcaattacagagctggaccctggttatataacaggtcctctctcttcagtatggaaagaatgggtcaaatggtgtgtagagtttggcattgaagctaatgcaattatcgctgttccgtatgattggagactgcccccatcaatgcttgaggagagagatctgtactttcacaaattaaagtttgtaacacttgcctcaacttgttatgaagcaaccaaatgctatacatctgttagcaggatcagtaagagttaatggcccagtgacggattcaaggtatcctgctcaccaacagatcccacaagcatacggttaccgccaaatgcctgcaaggttggacagtaccaacccatcacaggccatgggaggttacacgctgcagtcacagaaggaaacattatttgaagagttgccattttgaagagttactcgaatccaatattttgctcttttgaattccttggtgtacactggcaaatattagcatatttgaagagttgccatttcgatcatcatcttcatttgtactttttgggtcagatctaataaagcatcagcattaaatttacaatgatcacctaaatccatggtttttattgcctagagctggtaatgtttctctggttttgcattagttgcttgaaaattgaaagtatctgtatacttctctattgtattttactgcacataatggatttgtttgatgtgtagggattttaaggtatgtaaaatatcttaacttttaaaagatgtgaataagaacataaaatagtaattagtattttgaattttaatgtatcttatcgtaac

SEQ ID NO: 214567 - DNA, 1656 bp, Zea Mays
catcaacgtgcctccccgccgcccctgtcctccccatgcccgccgctcccacccgagatggttagcgcccctcctccttccggtcccttcccctgcctcggccggccagccatggattcaccaagcgggctctggtggcggccggcgccgtcgtcgtgtcctccattcccgtcaaccccctcgatgtcgccaaggagcaggacgatgcagtggggcagcatctctaatcatttaagcttcaaattaaccagtccattatattatgcaactctgtgaatagaattgagctactggctaagaaaataactgaactcggttattcatgcttcacattcatgctaagagcctaagatgttgcaagacaacagaaactgagtgtttcatgagtttcataatggtgcttgcagaaaccttttgtgcacagatatgtttaccagacgaattgatatctaggctatttatgtggttactaattttgactcctctaagacatatttacacagggttggtcgttatgggagatatgggcaccttggtttggcagtgaacttgaccacttacaaagattgtttcaacttatatagtattgataaaaaaaacttggaacggaaattaagacaatacccccacaaattgacctgtttgtatactgccaatgatgatagcgacagcttcatgagcgtcagtggaggaggaggagaggcccatgtcggtggagctggaacccatcgccagcgagcagcagcttaactaggtccttggagaggcgtagcagctccagctcctcatcgtcctgctctgcttttctctgcggtaaattgctggcttaaatgcatgctgcttgaaccctataatcagatagaccatcccgaatgcaagtcaaggcctgatagtggtctttctgcaattacagagctggaccctggttatataacaggtcctctctcttcagtatggaaagaatgggtcaaatggtgtgtagagtttggcattgaagctaatgcaattatcgctgttccgtatgattggagactgcccccatcaatgcttgaggagagagatctgtactttcacaaattaaacaggatcagtaagagttaatggcccagtgacggattcaaggtatcctgctcaccaacagatcccacaagcatacggttaccgccaaatgcctgcaaggttggacagtaccaacccatcacaggccatgggaggttacacgctgcagtcacagaaggaaacattatttgaagagttgccattttgaagagttactcgaatccaatattttgctcttttgaattccttggtgtacactggcaaatattagcatatttgaagagttgccatttcgatcatcatcttcatttgtactttttgggtcagatctaataaagcatcagcattaaatttacaatgatcacctaaatccatggtttttattgcctagagctggtaatgtttctctggttttgcattagttgcttgaaaattgaaagtatctgtatacttctctattgtattttactgcacataatggatttgtttgatgtgtagggattttaaggtatgtaaaatatcttaacttttaaaagatgtgaataagaacataaaatagtaattagtattttgaattttaatgtatcttatcgtaac

SEQ ID NO: 214568 - DNA, 2478 bp, Zea Mays
tgtcctccccatgcccgccgctcccacccgagatggttagcgcccctcctccttccggtcccttcccctgcctcggccggccagccatggattcaccaagcgggctctggtggcggccggcgccgtcgtcgtgtcctccattcccgtcaaccccctcgatgtcgccaaggagcaggacgatgcagtggggcagcatctctaatcatttaagcttcaaattaaccagtccattatattatgcaactctgtgaatagaattgagctactggctaagaaaataactgaactcggttattcatgcttcacattcatgctaagagcctaagatgttgcaagacaacagaaactgagtgtttcatgagtttcataatggtgcttgcagaaaccttttgtgcacagatatgtttaccagacgaattgatatctaggctatttatgtggttactaattttgactcctctaagacatatttacacagggttggtcgttatgggagatatgggcaccttggtttggcagtgaacttgaccacttacaaagattgtttcaacttatatagtattgataaaaaaaacttggaacggaaattaagacaatacccccacaaattgacctgtttgtatactgccaatgatgatagcgacagcttcatgagcgtcaggcacattttatttattttgacctgtttgtatactaacttaacacaagcttttttgtcaataacgtgggattcggaattttctgagctttgtgtagtggaggaggaggagaggcccatgtcggtggagctggaacccatcgccagcgagcagcagcttaactaggtccttggagaggcgtagcagctccagctcctcatcgtcctgctctggctgttgttgaaaaagctgtatattatgctcttgtatggatcaataggctgttggctgtcggtcatgacatcgccatcaagacagataggaaagttatattttttcctaactatatatgctcttacctattcctgttctccatagtacaaaagatgatattgattttgtggctggtttcatttgttggaatgctcttcaactttcttacgctcatttacattggtgagttctctgtccatgttaattttaagtgagtatgtaactatatgctctcatacgctttagggatccgctacgagcagcctacacatttatcatctgttcccatgcttatttttccttttttttattagtgatgggaatcgtatatccataaatagatctggagactggagcagtttttgttgggataaactttgtactggaccggagcatcttatctctggatgtgagtgccatgaaagtgatacccaacaaacaactaactctggaacacctttggtatgtcgggtaggcgcaaagccagcaagacaacaactgcttgagcagctttggccagttttgcttgccaccatgaatagccatatgttggccatcacatggtaccttgttcgtcccaaactagaccagagcattacaagcaatgactgccatatctaaaattgaaaacatgtgcggcttataagtatcctaaatttgctccacttctaagtatccaagatctactggttttgatgcgttccattgcttgcagcttttctctgcggtaaattgctggcttaaatgcatgctgcttgaaccctataatcagatagaccatcccgaatgcaagtcaaggcctgatagtggtctttctgcaattacagagctggaccctggttatataacaggtcctctctcttcagtatggaaagaatgggtcaaatggtgtgtagagtttggcattgaagctaatgcaattatcgctgttccgtatgattggagactgcccccatcaatgcttgaggagagagatctgtactttcacaaattaaagatcagtaagagttaatggcccagtgacggattcaaggtatcctgctcaccaacagatcccacaagcatacggttaccgccaaatgcctgcaaggttggacagtaccaacccatcacaggccatgggaggttacacgctgcagtcacagaaggaaacattatttgaagagttgccattttgaagagttactcgaatccaatattttgctcttttgaattccttggtgtacactggcaaatattagcatatttgaagagttgccatttcgatcatcatcttcatttgtactttttgggtcagatctaataaagcatcagcattaaatttacaatgatcacctaaatccatggtttttattgcctagagctggtaatgtttctctggttttgcattagttgcttgaaaattgaaagtatctgtatacttctctattgtattttactgcacataatggatttgtttgatgtgtagggattttaaggtatgtaaaatatcttaacttttaaaagatgtgaataagaacataaaatagtaattagtattttgaattttaatgtatcttatcgtaac

SEQ ID NO: 214569 - DNA, 1534 bp, Zea Mays
attatattatgcaactctgtgaatagaattgagctactggctaagaaaataactgaactcggttattcatgcttcacattcatgctaagagcctaagatgttgcaagacaacagaaactgagtgtttcatgagtttcataatggtgcttgcagaaaccttttgtgcacagatatgtttaccagacgaattgatatctaggctatttatgtggttactaattttgactcctctaagacatatttacacagggttggtcgttatgggagatatgggcaccttggtttggcagtgaacttgaccacttacaaagattgtttcaacttatatagtattgataaaaaaaacttggaacggaaattaagacaatacccccacaaattgacctgtttgtatactgccaatgatgatagcgacagcttcatgagcgtcagtggaggaggaggagaggcccatgtcggtggagctggaacccatcgccagcgagcagcagcttaactaggtccttggagaggcgtagcagctccagctcctcatcgtcctgctctgtacaaaagatgatattgattttgtggctggtttcatttgttggaatgctcttcaactttcttacgctcatttacattgcttttctctgcggtaaattgctggcttaaatgcatgctgcttgaaccctataatcagatagaccatcccgaatgcaagtcaaggcctgatagtggtctttctgcaattacagagctggaccctggttatataacaggtcctctctcttcagtatggaaagaatgggtcaaatggtgtgtagagtttggcattgaagctaatgcaattatcgctgttccgtatgattggagactgcccccatcaatgcttgaggagagagatctgtactttcacaaattaaagtttgtaacacttgcctcaacttgttatgaagcaaccaaatgctatacatctgttaggatcagtaagagttaatggcccagtgacggattcaaggtatcctgctcaccaacagatcccacaagcatacggttaccgccaaatgcctgcaaggttggacagtaccaacccatcacaggccatgggaggttacacgctgcagtcacagaaggaaacattatttgaagagttgccattttgaagagttactcgaatccaatattttgctcttttgaattccttggtgtacactggcaaatattagcatatttgaagagttgccatttcgatcatcatcttcatttgtactttttgggtcagatctaataaagcatcagcattaaatttacaatgatcacctaaatccatggtttttattgcctagagctggtaatgtttctctggttttgcattagttgcttgaaaattgaaagtatctgtatacttctctattgtattttactgcacataatggatttgtttgatgtgtagggattttaaggtatgtaaaatatcttaacttttaaaagatgtgaataagaacataaaatagtaattagtattttgaattttaatgtatcttatcgtaac

SEQ ID NO: 214570 - DNA, 3446 bp, Zea Mays
aaataactgaactcggttattcatgcttcacattcatgctaagagcctaagatgttgcaagacaacagaaactgagtgtttcatgagtttcataatggtgcttgcagaaaccttttgtgcacagatatgtttaccagacgaattgatatctaggctatttatgtggttactaattttgactcctctaagacatatttacacagggttggtcgttatgggagatatgggcaccttggtttggcagtgaacttgaccacttacaaagattgtttcaacttatatagtattgataaaaaaaacttggaacggaaattaagacaatacccccacaaattgacctgtttgtatactgccaatgatgatagcgacagcttcatgagcgtcaggcacattttatttattttgacctgtttgtatactaacttaacacaagcttttttgtcaataacgtgggattcggaattttctgagctttgtgtagtggaggaggaggagaggcccatgtcggtggagctggaacccatcgccagcgagcagcagcttaactaggtccttggagaggcgtagcagctccagctcctcatcgtcctgctctggtaaccccactttcctagatcggtttgtgcctgtagggtgttcttgttaaagtttgcttgtaatgtctgtgagattgcaatcatggtcgtgtatgattgcggtgttcacagattttgtttgcttgttcctagatagtcatttatgtggtgcaaatttagcatcttggatgaagtgaaaatggacaattttgttcatttgttattaggttctggcacttggacttggtatttagtaactgagaatttacttatttagtagttatacagcccgtgtcattgtcgttgggcgaatgaatttcatcgtcagtctattgcatgaatgataaatgcatgtcggtggccttttgccgaatctaccattttgtttgttcctcatctccattcctatctgcttgtttattggtagtagaagtagaactgctatttatggctgaggcctgagggaaaaaataatcaaatgttcaaccaacttcatttttttcttgagtgcatgggttgcagcctttggctagcttatgatctcgtgtggtctatttaccatataaataaatagcagcattagttcaatttgatgttcatagttctctctctctaaagagtcatatgttagattcatgggaaatacttgaactatacatttttttaatgtatcagatgtgtgaattatcatgtccggatcaatttcaaccaaccaacagttcctttagcaaatttgtcaggcatatttatgcacttgttcgcataactgagactatattatttttataagactaaggtcagactattgatggtttggtttgggtggcaccttgttcttcgttccttgccatttccatgccatccttttattatatacatacatttatttggagataaaatttgatgtcaagagaaacttgtctttctttcactctccaactcatcttcgtagtttgattctcatgggaggaccctgtttccatcatgctgcatctttttatctgataaagtgatatttcttagagcatcaaggttcgacaaccaacatattctcgtgtgaggaaatggaaaagtgatgtcttgaggacattttttatcttttgatgttgataattgttcatattattatggttcaacaactcctagcaccaagtcattctgtatgatctgttaacttgatagaagttaacatcatttgattttaagaaatgtaatcatatttcctgattgctcagaattgacttgttcatcatttttcaatgtccctaattggtattagatttttgtgatcttgtgtcatattctgtgatcaacaatgtacaatttgttgaataggctgttgttgaaaaagctgtatattatgctcttgtatggatcaataggctgttggctgtcggtcatgacatcgccatcaagacagataggaaagttatattttttcctaactatatatgctcttacctattcctgttctccatagtacaaaagatgatattgattttgtggctggtttcatttgttggaatgctcttcaactttcttacgctcatttacattgtgatgggaatcgtatatccataaatagatctggagactggagcagtttttgttgggataaactttgtactggaccggagcatcttatctctggatgtgagtgccatgaaagtgatacccaacaaacaactaactctggaacacctttggtatgtcgggtaggcgcaaagccagcaagacaacaactgcttgagcagctttggccagttttgcttgccaccatgaatagccatatgttggccatcacatggtaccttgttcgtcccaaactagaccagagcattacaagcaatgactgccatatctaaaattgaaaacatgtgcggcttataagtatcctaaatttgctccacttctaagtatccaagatctactggttttgatgcgttccattgcttgcagcttttctctgcggtaaattgctggcttaaatgcatgctgcttgaaccctataatcagatagaccatcccgaatgcaagtcaaggcctgatagtggtctttctgcaattacagagctggaccctggttatataacaggtcctctctcttcagtatggaaagaatgggtcaaatggtgtgtagagtttggcattgaagctaatgcaattatcgctgttccgtatgattggagactgcccccatcaatgcttgaggagagagatctgtactttcacaaattaaagtttgtaacacttgcctcaacttgttatgaagcaaccaaatgctatacatctgttagcaggatcagtaagagttaatggcccagtgacggattcaaggtatcctgctcaccaacagatcccacaagcatacggttaccgccaaatgcctgcaaggttggacagtaccaacccatcacaggccatgggaggttacacgctgcagtcacagaaggaaacattatttgaagagttgccattttgaagagttactcgaatccaatattttgctcttttgaattccttggtgtacactggcaaatattagcatatttgaagagttgccatttcgatcatcatcttcatttgtactttttgggtcagatctaataaagcatcagcattaaatttacaatgatcacctaaatccatggtttttattgcctagagctggtaatgtttctctggttttgcattagttgcttgaaaattgaaagtatctgtatacttctctattgtattttactgcacataatggatttgtttgatgtgtagggattttaaggtatgtaaaatatcttaacttttaaaagatgtgaataagaacataaaatagtaattagtattttgaattttaatgtatcttatcgtaac

SEQ ID NO: 214571 - DNA, 1505 bp, Zea Mays
tgaactcggttattcatgcttcacattcatgctaagagcctaagatgttgcaagacaacagaaactgagtgtttcatgagtttcataatggtgcttgcagaaaccttttgtgcacagatatgtttaccagacgaattgatatctaggctatttatgtggttactaattttgactcctctaagacatatttacacagggttggtcgttatgggagatatgggcaccttggtttggcagtgaacttgaccacttacaaagattgtttcaacttatatagtattgataaaaaaaacttggaacggaaattaagacaatacccccacaaattgacctgtttgtatactgccaatgatgatagcgacagcttcatgagcgtcaggcacattttatttattttgacctgtttgtatactaacttaacacaagcttttttgtcaataacgtgggattcggaattttctgagctttgtgtagtggaggaggaggagaggcccatgtcggtggagctggaacccatcgccagcgagcagcagcttaactaggtccttggagaggcgtagcagctccagctcctcatcgtcctgctctgcttttctctgcggtaaattgctggcttaaatgcatgctgcttgaaccctataatcagatagaccatcccgaatgcaagtcaaggcctgatagtggtctttctgcaattacagagctggaccctggttatataacaggtttcaggtcctctctcttcagtatggaaagaatgggtcaaatggtgtgtagagtttggcattgaagctaatgcaattatcgctgttccgtatgattggagactgcccccatcaatgcttgaggagagagatctgtactttcacaaattaaagtttgtaacacttgcctcaacttgttatgaagcaaccaaatgctatacatctgttaggatcagtaagagttaatggcccagtgacggattcaaggtatcctgctcaccaacagatcccacaagcatacggttaccgccaaatgcctgcaaggttggacagtaccaacccatcacaggccatgggaggttacacgctgcagtcacagaaggaaacattatttgaagagttgccattttgaagagttactcgaatccaatattttgctcttttgaattccttggtgtacactggcaaatattagcatatttgaagagttgccatttcgatcatcatcttcatttgtactttttgggtcagatctaataaagcatcagcattaaatttacaatgatcacctaaatccatggtttttattgcctagagctggtaatgtttctctggttttgcattagttgcttgaaaattgaaagtatctgtatacttctctattgtattttactgcacataatggatttgtttgatgtgtagggattttaaggtatgtaaaatatcttaacttttaaaagatgtgaataagaacataaaatagtaattagtattttgaattttaatgtatcttatcgtaac

SEQ ID NO: 214572 - DNA, 1440 bp, Zea Mays
ctcggttattcatgcttcacattcatgctaagagcctaagatgttgcaagacaacagaaactgagtgtttcatgagtttcataatggtgcttgcagaaaccttttgtgcacagatatgtttaccagacgaattgatatctaggctatttatgtggttactaattttgactcctctaagacatatttacacagggttggtcgttatgggagatatgggcaccttggtttggcagtgaacttgaccacttacaaagattgtttcaacttatatagtattgataaaaaaaacttggaacggaaattaagacaatacccccacaaattgacctgtttgtatactgccaatgatgatagcgacagcttcatgagcgtcaggcacattttatttattttgacctgtttgtatactaacttaacacaagcttttttgtcaataacgtgggattcggaattttctgagctttgtgtagtggaggaggaggagaggcccatgtcggtggagctggaacccatcgccagcgagcagcagcttaactaggtccttggagaggcgtagcagctccagctcctcatcgtcctgctctgatagaccatcccgaatgcaagtcaaggcctgatagtggtctttctgcaattacagagctggaccctggttatataacaggtcctctctcttcagtatggaaagaatgggtcaaatggtgtgtagagtttggcattgaagctaatgcaattatcgctgttccgtatgattggagactgcccccatcaatgcttgaggagagagatctgtactttcacaaattaaagtttgtaacacttgcctcaacttgttatgaagcaaccaaatgctatacatctgttagcaggatcagtaagagttaatggcccagtgacggattcaaggtatcctgctcaccaacagatcccacaagcatacggttaccgccaaatgcctgcaaggttggacagtaccaacccatcacaggccatgggaggttacacgctgcagtcacagaaggaaacattatttgaagagttgccattttgaagagttactcgaatccaatattttgctcttttgaattccttggtgtacactggcaaatattagcatatttgaagagttgccatttcgatcatcatcttcatttgtactttttgggtcagatctaataaagcatcagcattaaatttacaatgatcacctaaatccatggtttttattgcctagagctggtaatgtttctctggttttgcattagttgcttgaaaattgaaagtatctgtatacttctctattgtattttactgcacataatggatttgtttgatgtgtagggattttaaggtatgtaaaatatcttaacttttaaaagatgtgaataagaacataaaatagtaattagtattttgaattttaatgtatcttatcgtaac

SEQ ID NO: 214573 - DNA, 1412 bp, Zea Mays
ctaagatgttgcaagacaacagaaactgagtgtttcatgagtttcataatggtgcttgcagaaaccttttgtgcacagatatgtttaccagacgaattgatatctaggctatttatgtggttactaattttgactcctctaagacatatttacacagggttggtcgttatgggagatatgggcaccttggtttggcagtgaacttgaccacttacaaagattgtttcaacttatatagtattgataaaaaaaacttggaacggaaattaagacaatacccccacaaattgacctgtttgtatactgccaatgatgatagcgacagcttcatgagcgtcaggcacattttatttattttgacctgtttgtatactaacttaacacaagcttttttgtcaataacgtgggattcggaattttctgagctttgtgtagtggaggaggaggagaggcccatgtcggtggagctggaacccatcgccagcgagcagcagcttaactaggtccttggagaggcgtagcagctccagctcctcatcgtcctgctctgcttttctctgcggtaaattgctggcttaaatgcatgctgcttgaaccctataatcagatagaccatcccgaatgcaagtcaaggcctgatagtggtctttctgcaattacagagctggaccctggttatataacaggtttcaggtcctctctcttcagtatggaaagaatgggtcaaatggtgtgtagagtttggcattgaagctaatgcaattatcgctgttccgtatgattggagactgcccccatcaatgcttgaggagagagatctgtactttcacaaattaaacaggatcagtaagagttaatggcccagtgacggattcaaggtatcctgctcaccaacagatcccacaagcatacggttaccgccaaatgcctgcaaggttggacagtaccaacccatcacaggccatgggaggttacacgctgcagtcacagaaggaaacattatttgaagagttgccattttgaagagttactcgaatccaatattttgctcttttgaattccttggtgtacactggcaaatattagcatatttgaagagttgccatttcgatcatcatcttcatttgtactttttgggtcagatctaataaagcatcagcattaaatttacaatgatcacctaaatccatggtttttattgcctagagctggtaatgtttctctggttttgcattagttgcttgaaaattgaaagtatctgtatacttctctattgtattttactgcacataatggatttgtttgatgtgtagggattttaaggtatgtaaaatatcttaacttttaaaagatgtgaataagaacataaaatagtaattagtattttgaattttaatgtatcttatcgtaac

SEQ ID NO: 214574 - DNA, 2409 bp, Zea Mays
gagtacattttgtccactgccatagagccatcgactacaaaagtctagaacacagtggaaagcaccagacaacgcgcgaccaaaagggcccaggccccagcgccccagtccgggggttgtgttcgccgacctgtgcgtgcctgctcgtcacgtcacgtccctatttgcccgtcttcctcccctccagacccttctcgaacgccccttcgttctggatccaacggtcggtctctgccgggctcgaacgttctcgaaaccacgtcacccccgataaaaccccacgcacagcctcctcccttcctcaaccatcattgcaaaagcgaagcaagcaatccgaattctctgcgatttctctagatctcgaccacccctactagttttggttcctcctttcgttcgagagagcgtttctagtggcaatggcgaagagcgagggtccggcgatcgggatcgacctcggcaccacctactcgtgcgtcggcgtgtggcagcacgaccgggtggagatcatcgccaacgaccaggggaaccgcaccacgccgtcctatgtcggcttcaccgacaccgagcggctcatcggcgacgctgccaagaaccaggtcgccatgaaccccaccaacaccgtcttcgatgccaagcggttgatcggcaggaggttctctgacccgtcagtgcagagtgacatgaagctatggccgttcaaggtcatcccagggcctggtgacaaacccatgattgtagtcaactacaagggcgaggagaagcagtttgctgctgaggagatctcctccatggtcctcatcaagatgaaggagattgctgaagcctaccttggttccaccatcaagaacgcagtggtgacagtgccggcctatttcaacgactcgcagaggcaggccaccaaggacgccggtgtcattgcgggcctcaatgtgatgcgtatcatcaacgagcccactgctgctgctattgcctacggtcttgacaagaaggccaccagctccggcgagaagaacgtgctcatcttcgaccttggtggtggcacgtttgatgtgtcgctcctcaccatcgaggagggcatcttcgaggtgaaggccactgcgggcgacactcaccttggcggcgaggacttcgacaatcgcatggtgaaccacttcgtccaagagttcaagcgcaagaataagaaggacataagcggcaacccccgtgcactgcgccggctgcgcacggcgtgcgagcgcgccaagcgcacgctgtcatcgactgcccagacgaccattgagatcgactccctgttcgagggcatcgatttctactccacgatcaccagggctcgcttcgaggagctcaatatggacttgttccggaagtgcatggaacctgtggagaagtgcttgcgcgacgccaagatggacaagagcagcgtgcacgacgtcgtgctcgtcggtggctccacccgcatccccaaggtgcagcagctgctgcaggacttcttcaacggaaaggaattgtgcaagagcatcaaccccgacgaggctgtggcgtacggcgccgctgtccaggctgccatcctcagcggcgagggcaacgaaaaggtacaagatctgctcctgctcgacgtcacgccactgtctctcggcctggagactgcaggtggcgtcatgacggtgctgatcccgaggaacaccaccatcccgaccaagaaggagcaggtcttctccacgtactccgacaaccagccgggcgtcctgatccaggtgtacgagggtgagcgcgcgaggaccaaggacaacaacctcctcggcaagttcgaactctccggcatccctcctgctccccgcggcgtgccccagatcacggttaccttcgacatcgatgccaacggcatcctcaacgtctctgccgaggacaagaccaccggccagaagaacaagatcacgatcaccaacgacaagggccggcttagcaaggaggagatcgagaagatggtgcaggaggctgagaagtacaaggcagaggacgaggaggtcaagaagaaggtggacgccaagaacgcgctcgagaattatgcctacaacatgaggaacaccatcaaggacgacaagatcgcctccaagctccccgctgaggacaagaagaagatcgaagatgccgttgacggcgccatcagctggctggacagcaaccagctggctgaggtggaggagttcgaagacaagatgaaggagcttgaggggatctgcaaccccatcatcgcgaagatgtaccagggcgagggcgcgggcatgggcgctgctgctggcatggatgaggatgccccgtctggtgggagcggtgctggtcccaagatcgaggaggtggattaagttggttagtgttcgaggggcggagtcctgatcctgactgccc

SEQ ID NO: 214575 - DNA, 1046 bp, Zea Mays
ccgccccaccacctgcgcgccttttgcttcctcaacccctcatcatggacatggaggaggatccagcaggcggcgaagacctctcttccacggccgccagcggccactcctgctccggtgacgacggcgaggagagtggctggacgtcctacatcgactacttcatggagacgcagcagcgacgacgacgcaagcagggggacgtgagccgtgctgctgctggtgatggtccatccaccgacgacgatgctgggcgccgccgcagctctacggcggagtgcagtagtggcgctggagtgggagcctcgtcgtcatgcctggcgccaccggtgctcgtcgacccgccagtagtggtggtgtcgagaaggttgagcctcagggagggctggaggaggaagaaggtcctgcacgatgagtccttggaggataccgccacgtctcctatcagtagccctaagttgattgagttgagggatcccgacgacgcgacccaccaccagacgaaaacgagttgctgtgctgagatttcgcgttctaagcggaagaacagtacaggcggtgatgtaaacaacggggcaaacacaagaacagacacggcggcggtcaaggaagacagtgcagcatatagcaacgacgatgaagctgaggaagaaataagcaggcctaatttggtcggcccggcctatgcctgcttctcgtgtatagctgatggcgatgccaacaaattcattggttgctagctgaaaacaacaacaccctacgtacgtacacacatgcatatatacatgtagtacacactggcacacatgagaaaattaaaggtagcagctagagagtcttgtgaaggttagccattccgttcctgtttgtgaaaagggtacaaaagctactagctttcacttcacacatgagagaagaagctaaggagaagaggtacaggctgctgtgggtgggttcgatggtaggtgagacatcgcaatgctatgttagatatggggtctattccatctatcttgtgaccaagattgttatcatcaaaaaagaaa

SEQ ID NO: 214576 - DNA, 3387 bp, Zea Mays
cccctttggttttgccttcccggcccctcgctctcccggcatccccagaggccagggttaggagtcccccgcctgccgtgccgtccatcccacatcaccgcctatcaccggaggacgacgcatctatccccttttcccttgctggtttcctcgccgcggtttaaaccctttcacggcttgccctgctcagtgctcagcagctttgcccccatcgttccgtgagctcagcctctccgcctataaatggcagccccgcccccctgcaagttcaaacgcacgccgcacgctcgcagccgcccgacgaccgtggcccccaccgtcaccatctcctgccacagtgccaccgccatcactgccccgctcgggattccttcctatcgctgccgctgcaagccgttggtaacgaagctgcgataatggtgatggggctggggtcgaagcgtagggtggcggagggcggcacggagcccgaggaggagtcctcggaggagtacgaggtggaggaagtgtgcgaccacatcgcctcctcccgtggcagccgcctcgcgctcttcggctccgacctccgcctcggccgcttccgcccgcgccggcgcaggcgccgcccgctcgccggggaaggcgccgcggagggcttcctccacgacctcgtcatccaccccgacaacagatggtatcagttatggaccaagttcatactgggttgggcggtgtacagttccttcttcacgcccctggaattcggcttcttcagagggctcccagaaaacctcttcttcctggacacagttggacaggctgcgttccttatcgacattgttgtgaaatttttcgtggcataccgtgacccagacacgtaccgaatcgtctacagtcccaccgctattgccctcagatattgcaaatcaagcttcatctttgatcttcttggttgcttcccatgggatgctatctacagggcttgtggaagtaaagaagaagtaagatacctgctgtggattcgcttgacacgggttaccaaggtcacagaattcttctggcgtttagagaaggacatacgtatcaactacctcttcactaggatagtgaagctcatagttgtggagctctactgtacgcacacagcagcctgtatcttctattacctggctacaacgcttcctgaatcaatggaaggatacacgtggattgggagtctgcagttgggggactacaagtttacacatttcagggagatcgatcttgccaagcgctatataacatcgttatacttcgccattgtcaccatggcaacagttggttacggtgacattcatgctgtcaacatcagggagatgatattcatcatgatctacgtttcctttgacatgattctaggagcttacctgattggtaacatgactgcgctcatcgtgaaaggctcgagaaccgagcggtttagggacaagatgaaagaagtgatcaggtatatgaacagaaataaacttggaaaggaaataagggaacagatcaaaggacacttgaggttgcagtatgagagcagctacactgaagcgtccgtccttcaggatatcccgatttctatccgtgcaaagatttctcaaacactgtataagccatatgttgaaagtattccgttgttcaagggatgttccgcagagttcatacaacagattgtgatcaggttgcaagaggagttcttcttaccaggagaggttatattggagcaaggaagtgcagtcgatcaattgtactttgtctgccacggtgcactggaaggtgttggcatcggtgaagacgggcaagaagagactctgctgatgctggagccagagagctcctttggcgagatctcaatcctctgcaacatcccgcagccctacacggtccgcgtctgtgagctctgccggctcctgcgtctcgacaagcagtccttcaccaacatcctggagatctacttcgtcgacggcaggaggatcctgagcaatctctccgagagcgagtatggcggacgggtgaagcagctggaatcggacatcacgttccacatcgggaagcaggaggcggagctcaccctgcgggtcaacagcgccgctttctacggcgacctgcaccagctgaaaagcctgatccgggcaggggctgatcccaagaacaccgactatgacggccgctcccctctgcatctggcggcttccagagggtacgaggacgtcgtgcaattcctcgtcaacgaaggcgtcgacatggaccttaccgaccaatttgggaacacgccgttgctggaggcagtgaagcaggggcaagaacgggtggcagcgctgctcttcgccaagggcgccaagctgagcctcaagaacgccggcagccacctgtgcacggcagtcgccaagggagactcggacttcattcggcgcaccctggcctacggcgccgacccaaactgcagggactacgaccaccgcacaccgctccacatcgccgccgccgagggcctgtacctcatcgccaagatgcttgtcgaggccggcgccagcgtgttcaccaccgacagatggggcaccactccgctggatgaagcgcgaaagtgcggcggccgcgtacttggggcgctgctggaggaggcgcgggccaacgagctggctatgttcccagaacgcggcgaggaagtcagggacaagatgcacccgcgacggtgctcggtgttcccgtaccacccgtggcgggcggccacgggcgaggagcggcgtattgagggagtggtcctgtggatcccgcacaccattgagagcctggttgcgttggcgcaggagaagctcggcttgccgggcccggcttcgcggctgcggttgctgcgcgaggacggggccagggtgctcgacgtcgatatggtcaatgacggccagaagctctacctggtcggaggcgaggacggcgatcagaaatatggtcagtagattggccatggaccaaccatggttagaagaaaacggaatcaagtccatcgtccctgctggacactgtacagaactacaaattcgcaattatgttagatgtgaaatggaaatgcaatgtgaagcaaactaaacaggataatccattcccgcgccgtcctgtgccgccgcagatggtccttgcagaccttggtgcgccgtcagctcgtggcgtcctgctgataggcactccgacccggcggccatccctgttgtgtttgttatatgggagaagccagtaataaaaccagtgttttaaaaagtgggataagagatttatcctcaggcttctcaaaagtgtaaatatcgggatatctgaatatagtgagatatatcgaactaaatagtataaattttcgctgctaaaaaagatatatcgaccgttataatcgac

SEQ ID NO: 214577 - DNA, 1524 bp, Zea Mays
tcatctccatttctctgctatgctacacctcctctgcagttcattccgttcgatctccataaagaccttcctgagctcctcctccaccaccgcgcgaggctccagagcaacaaaggacggagagcaatttcgtcgtaggctgttttcccttcgtttcctcctcgatcggccgcggcaattggattcttgatcggaatctccttcccggtgcaaatcacgcccaaggtatacccgtccagcttcgtcgctgacgacgcggacagcagcaccctgggtctgggtgacagcaatgtgctcggaagattctccacggcacgcaatagctgcagccgtgctacttctaccgtgggggcatctcctcctccatcacccatcctccagcagccaaacgccactgccgcagaggttgtcgtcgttggaccgggaaagccaaaaggcgcggccaggctaccgccgggcatcgtagtggaagactcggatcttcatctccgccggctgtggggaaacccacatgaggacacgcctccacgcaagtaccttctggtgctgacagtagggtacagcgagaaagacagtgtcaacgcgattgttcagaagttctcggagaacttcgacatcatgctgttccactacgacgggcagacgacggagtgggacgccgagttcgagtggtccaggcaggctgttcatgtcagcgccaggaagcaggcgaaatggtggtacgccaagaggttcatgcaccccagcgtcctggcgccatacgaatacgtcttcctgtgggatcaagacctcggagtcgaggccttcgaggcggaggcgtacctccggatcgtgaggcggcacgcgctggagatatcccagccgggcttggacatcgtcaggggcgtcaagacctacgacgtcaacgtcagaagggaggagggcggtgagattcacacgtcagatgggtttgtggaggtgatggctcctgtgtttacaagggaggcatggacttgtgtgtggcatatgatccagaatgaccttgtccatggttggggccttgactggaacttctggagatgtgttaatgaacccaagaagcatattggagtggtggatgcgcaatacatagcgcatcacttcgggttcacacttggggaccaaggcacagaaggaaatcgtggccaggtgagagacagagcatcggttgagtttggcatcttcaaatctagagtggataatgctgaaaaggcctggacagcaaccactcttcctgtaccatcagatccaaactccaaatcgtagctaccattatcctcaactcatcatcacatgtgcacctcaaaatctctctctctatgtgtgtgtttatcatctatctctccccctatattcatttaaatatggacgatttgaagaaaacttaatgcttggttaagccaagtgcaatgtgcgtgtatgctctactattgttagcatacatcagtatgtagtaagcatgactgacaaatatcaaatgattcagaaatcaaaagagttgagaag

SEQ ID NO: 214578 - DNA, 2599 bp, Zea Mays
ctttttgcaagttttgagagcggcaaagcgttaggcgttagggcatccacctcgtcgtaggcggcggtctccatgtcgaccgcatccggcaacggcaacggcggctcctcctcttccatgttatacgacttgtacggccctaatgcaaagcctgatgtggtttttaaggaggctgctttaaactctacgttaaatctgcaggatgttcagggtctagttacttgggttattggtgatggcatgctgccttcttgggtgtttgttaagaacaaacctcttatacccaaagttgtcctactatatgttcctggccttgatgcaactttatatatgtcacacactcgacttctttcttctctgaaagaattatgtggcaatccaaaacctgttttagcttcaagccgtatgccggatgagaggcacaccattgatgcgctcctaacctgcagagtaaagagaaagcgtgatgtaaaaacatcaaatgagtcatctaaacctgacatagatggaaaactatcaagtctggatgatcttggggacataccattccctgttacatattacactctctcagagaaagacttggaagataatggctactctttcaatttaccaggttttgtccctactgtttcagctccttcaggttcctcgccacataaagttcttgcacttgattgtgaaatgtgtgtgacaaaagctggatttgagctcacaagagtgacattaattgatattaaaggattggtggtgctagatagactagttaagcctgctaattcaatcattgattacaatacaaggttcagtggaatcactgctgagatgttggctgacgtgtccacaaccctgcaggaaattcaggaagagtttgttggacttgtatataaagaaacaattcttgttgggcattccttggaaaatgaccttatggcattacagatatcccatggtttaatcatcgatacagctgttttgtacaagtataagcgagggtctcgctgtaagattgctttgcgtgtcttgacgagaaagtttctcggccgggagatccagaacacaggatctggacatgacagtgtggaagatgctaaagctgctctagaacttgctatattgaaaatcaaacatggcagaaattgacatctatactgcatgagagtgggaaaaaatgctcccttgttgatgatgtatctgttctcgagcggtattcagatacttcttgcaattcaattgctgttttttgtgatgatgatgccctctccagatcaatgaaggaggtgaagaataacaaagtcaccttcatttggactcagttctcaggattgatttcttacttccaccgaagagctcaagatccagaaaagttgaaatcatgtgtcgcagaggctattgcattaaaaacatgtgatggaaaaactgcttcaaaagaagcaagaagtaaaatttgtcctgaattaaaggaaattctgtgtggattggataaaaagataaagaaattatatggtgccctgcccgagaatgctatgcttattgtatgcactggccatggtgatactcctctagtacaaaggtaaagttaatcatggactcatggtaaatcatcaacacatagtttctcatgccaaattgtattacatagtcatggcagatcagcaataatgtaccttttccctttctaatataatttggtctgttaagatacaagtaaaaggtgctcacaagatattaagttacaaaatcattgtccaatgttacctttagtaacaccatcatcagtttgtcttgtagatctgttctattccatttgctaccgagtgatgaaattactatgctgcctttagggccactctgtgtttgttcctttgtgctgtgctgcattgtcaaatatagtttagtttggcaaatcctacttattccaatataattgctactatagctccaaaaatgatgcttatataacccacattaaaatctggatgtcaatgctttaagaagcatatgcaacgccgaatggatatacaattgtaactgtgctgcttcatgaagattacggaaaatgcttcaccatgaagaagaaacaatagacagccgagaaactattgttcaagctttgggagatttacaagcccaagccgaagttgctctatgcttctgctgcgtcaaacgttaactgcatctttgaattagtgtgctgatgggtatggcttcggcgattataggagggtgtcaggcatgcatgctgacccgctgatgtgaaaagttccggcaggcagagattgaattttggaagctattctcatgctgtcttttttttcttttttctgtcagatactatgatcaggctgtagatgtcagcgtaaggcatagtgatgcattatcagaactggtctttcggtagcaggccagcatgtcagcatattaataggatcatttttcagatgaatatacggatcgcagaggaatgtaggaaactattgtaacagccatattattgtgataattaaaaccaagttctggaatcgatgatactacgaggcttgccatttacagttgcgaaaaaaatatagcaaaggtaaagtttatacaagcatatatg

SEQ ID NO: 214579 - DNA, 2093 bp, Zea Mays
atcaaattagggacactcgaagttcaatccaaaatcacttgtactagagctatggacatggcataataattgactatttggcaaagcctgatgtggtttttaaggaggctgctttaaactctacgttaaatctgcaggatgttcagggtctagttacttgggttattggtgatggcatgctgccttcttgggtgtttgttaagaacaaacctcttatacccaaagttgtcctactatatgttcctggccttgatgcaactttatatatgtcacacactcgacttctttcttctctgaaagaattatgtggcaatccaaaacctgttttagcttcaagccgtatgccggatgagaggcacaccattgatgcgctcctaacctgcagagtaaagagaaagcgtgatgtaaaaacatcaaatgagtcatctaaacctgacatagatggaaaactatcaagtctggatgatcttggggacataccattccctgttacatattacactctctcagagaaagacttggaagataatggctactctttcaatttaccaggttttgtccctactgtttcagctccttcaggttcctcgccacataaagttcttgcacttgattgtgaaatgtgtgtgacaaaagctggatttgagctcacaagagtgacattaattgatattaaaggattggtggtgctagatagactagttaagcctgctaattcaatcattgattacaatacaaggttcagtggaatcactgctgagatgttggctgacgtgtccacaaccctgcaggaaattcaggaagagtttgttggacttgtatataaagaaacaattcttgttgggcattccttggaaaatgaccttatggcattacagatatcccatggtttaatcatcgatacagctgttttgtacaagtataagcgagggtctcgctgtaagattgctttgcgtgtcttgacgagaaagtttctcggccgggagatccagaacacaggatctggacatgacagtgtggaagatgctaaagctgctctagaacttgctatattgaaaatcaaacatggtcctgattttggttttcaaccatcgttgtcaaggcagaaattgacatctatactgcatgagagtgggaaaaaatgctcccttgttgatgatgtatctgttctcgagcggtattcagatacttcttgcaattcaattgctgttttttgtgatgatgatgccctctccagatcaatgaaggaggtgaagaataacaaagtcaccttcatttggactcagttctcaggattgatttcttacttccaccgaagagctcaagatccagaaaagttgaaatcatgtgtcgcagaggctattgcattaaaaacatgtgatggaaaaactgcttcaaaagaagcaagaagtaaaatttgtcctgaattaaaggaaattctgtgtggattggataaaaagataaagaaattatatggtgccctgcccgagaatgctatgcttattgtatgcactggccatggtgatactcctctagtacaaagattacggaaaatgcttcaccatgaagaagaaacaatagacagccgagaaactattgttcaagctttgggagatttacaagcccaagccgaagttgctctatgcttctgctgcgtcaaacgttaactgcatctttgaattagtgtgctgatgggtatggcttcggcgattataggagggtgtcaggcatgcatgctgacccgctgatgtgaaaagttccggcaggcagagattgaattttggaagctattctcatgctgtcttttttttcttttttctgtcagatactatgatcaggctgtagatgtcagcgtaaggcatagtgatgcattatcagaactggtctttcggtagcaggccagcatgtcagcatattaataggatcatttttcagatgaatatacggatcgcagaggaatgtaggaaactattgtaacagccatattattgtgataattaaaaccaagttctggaatcgatgatactacgaggcttgccatttacagttgcgaaaaaaatatagcaaaggtaaagtttatacaagcatatatg

SEQ ID NO: 214580 - DNA, 2990 bp, Zea Mays
ggacgcgtcggagggcggaggcgggattgagggcccgcagcggcctcgtcatgtgggaggcgggcatggcgtcccagttccagccgaccaggctgagggagaaatgggcgagtgagcggagggaggaggccaagagcttggcggagctcgggacgcccgtaacgaggctcggggcacggaagccgcggcttgccatggtgtttggtgacctgtatcccagcgcaatgcagcttcagatggtcagcgtcgcttcggttctggaggccatgggctacgaaatgaaggttttctcacttgaggatggcccatgtggaaatatctggagagccattggagtaccagtgagcatactacctgaggacacaaacttacctatttcagtagattggttagactatgatggcatacttgttaattctattgaggcaagaccagtattctcaaggccccccctcagaagcatttagttaccatgaagatgtgaggatcagtttgggcttgagtcccaaagattttttgattgctattgttggtactccgttttcatatggtgataatttgatggaagaggcacttgtcttgcaagcagtaagtcctttgttacggagatatcactctgagaatagcgcacaatctgaattgaaagtaaagatcttcactgggaacataactgagaagcataggatggcccttgagtctgttgctctaagtgttggcttcccaagaggtgcagcggagcatgttgctgctgaagataaggacatcctccttcgtacagctgaccttgttatatattattcttgtcttgaggagcaattattccccagtgtgctagtcgaagctatgagtcttgagaagctggttatagctccagaccttggaattattagaaaacatatcgatgatggagtaaacggacttctttttccaagaaagaatgttggcatgttagctcaagttcttcttcaagcagtgtcgaacggtaaagtgtctatttcagggcaaaaaattgcttcagctgggaaggcccatgccaagaatcttatggcttctgagaccattgaaggctatgctgtgctattggaaaatgttgtcaagttccccactgatgcattacaccctttaactgttgatgagatacctttagctctgaaaaaggagtggaaatggcacctatttgaggatgtgaagcatttacaccatatgaatacgagtttgtctagctacaagatactcaagaaactagagcaggagtggcatagaaaccaaatggagaactcttctttgagtacaacaaagatcagtgacacattctctgcaattgcctgggaagaacagagagcaaatgaggttatggacatcaaaagaaaaatggaggaagacgagttgaaggacaggaatgaccaacctcatggaacatgggaggaggtgtacagaaatgtgaaaagggtagataggttaaaaaatgaattgcatgaaagagatgacaaggagcttgagcggacaggtcagccactttgtatatatgagccttttttcggggaggggacctggccatttctgcaccagagctctctttatcgtggagttggcctgtcttcaaaaggtcgaagaccaggagcagatgatattgatgcttcttctcgtcttccacttctcaacaatgtttactacagagatattcttggtgaatttggagctttctttgctcttgccaacagaattgaccgaatacacaaaaattcttggatagggtttcagtcctggagaggtacagcaagaaaggcaaacttatcaaacaatgccgaatttgcaatcttagaagctgttcaatctcaaaagcatggagattccttctatttttgggttcggatggatcaagatccaagaaaccacacatataaagatttttggtccttctgtgatgcgatcaatgctgggaactgcaggttagctgttttggaggccttccaaaggatgtatggtgtacaccttgatcatgacctggattctctgttacatatgcctaatgatggagacacatggtctgtgatgcaaagttgggttttgcctacacggtcattcctagaatttgttatgttttcaagaatgtttgttgatgcactggatgcacaaatgtacgacaaacaccatcaaactgggcattgcatcttgagtcttcacaaggaccggcactgctactctcgtgtcctggagttgattgtgaatgtttgggcattccacagtgcacgacggatggtctatgttaatcctcagactggtgcaatgcaggagcagcaccatctcagtggcaggagaggtcaaatgtcagtgcagtttttctcctacaccactctgaagagcatggacgaggagcttgcagaagagtttgacttggatcatccggacaggaggtggctctggccacaaactggagaggtcttctggcagggtctctatcagagggagcggatcatgcggcagcaggagaaggagcggcggaagcagcagagcagagagaagatccagagaatcaagaatagagctcggcaaaagacgctgggaaagtatataaagccaccgcctgatgatacaggtggctcgaacgatacaacatcagtagatttgtagcattttgaccatgatgattcttaccgtggggaatttggttcattatttgtaacggctgtccttggtcctcactgagaacccccggacggttgtgaatattttgtcagttttgtcgtgccctctggtgtctgggtgctttacaggcgattttgtaacatatctaggccattgagttgtgaagctgccatcttaggtgtaaatttgggtttccgtagggttgtttttgtccatttcgcttatgagcttctctataacagacagttaacacttaacagctgctccgcatttgcagtctccttggtacaaaatgagtcgactgatggtatcaatctgtcaagatatatttgggtgaacctgtg

SEQ ID NO: 214581 - DNA, 3099 bp, Zea Mays
ggacgcgtcggagggcggaggcgggattgagggcccgcagcggcctcgtcatgtgggaggcgggcatggcgtcccagttccagccgaccaggctgagggagaaatgggcgagtgagcggagggaggaggccaagagcttggcggagctcgggacgcccgtaacgaggctcggggcacggaagccgcggcttgccatggtgtttggtgacctgtatcccagcgcaatgcagcttcagatggtcagcgtcgcttcggttctggaggccatgggctacgaaatgaaggttttctcacttgaggatggcccatgtggaaatatctggagagccattggagtaccagtgagcatactacctgaggacacaaacttacctatttcagtagattggttagactatgatggcatacttgttaattctattgaggcaagaccagtattctcaagtcttctgcacgagcctttcaaatccatacctgtaatttggactgttcatgaacattctcttgcccatcgtgctaaagaatataatgcaagtggaatgattcagctcataaatgcttggaaagatgtattcagcagggcaaatgttatagttttcccaaactatatattaccggtgatgtatgctgcatttgattctggtaactatttcgtgattccaggccccccctcagaagcatttagttaccatgaagattaagtcctttgttacggagatatcactctgagaatagcgcacaatctgaattgaaagtaaagatcttcactgggaacataactgagaagcataggatggcccttgagtctgttgctctaagtgttggcttcccaagaggtgcagcggagcatgttgctgctgaagataaggacatcctccttcgtacagctgaccttgttatatattattcttgtcttgaggagcaattattccccagtgtgctagtcgaagctatgagtcttgagaagctggttatagctccagaccttggaattattagaaaacatatcgatgatggagtaaacggacttctttttccaagaaagaatgttggcatgttagctcaagttcttcttcaagcagtgtcgaacggtaaagtgtctatttcagggcaaaaaattgcttcagctgggaaggcccatgccaagaatcttatggcttctgagaccattgaaggctatgctgtgctattggaaaatgttgtcaagttccccactgatgcattacaccctttaactgttgatgagatacctttagctctgaaaaaggagtggaaatggcacctatttgaggatgtgaagcatttacaccatatgaatacgagtttgtctagctacaagatactcaagaaactagagcaggagtggcatagaaaccaaatggagaactcttctttgagtacaacaaagatcagtgacacattctctgcaattgcctgggaagaacagagagcaaatgaggttatggacatcaaaagaaaaatggaggaagacgagttgaaggacaggaatgaccaacctcatggaacatgggaggaggtgtacagaaatgtgaaaagggtagataggttaaaaaatgaattgcatgaaagagatgacaaggagcttgagcggacaggtcagccactttgtatatatgagccttttttcggggaggggacctggccatttctgcaccagagctctctttatcgtggagttggcctgtcttcaaaaggtcgaagaccaggagcagatgatattgatgcttcttctcgtcttccacttctcaacaatgtttactacagagatattcttggtgaatttggagctttctttgctcttgccaacagaattgaccgaatacacaaaaattcttggatagggtttcagtcctggagaggtacagcaagaaaggcaaacttatcaaacaatgccgaatttgcaatcttagaagctgttcaatctcaaaagcatggagattccttctatttttgggttcggatggatcaagatccaagaaaccacacatataaagatttttggtccttctgtgatgcgatcaatgctgggaactgcaggttagctgttttggaggccttccaaaggatgtatggtgtacaccttgatcatgacctggattctctgttacatatgcctaatgatggagacacatggtctgtgatgcaaagttgggttttgcctacacggtcattcctagaatttgttatgttttcaagaatgtttgttgatgcactggatgcacaaatgtacgacaaacaccatcaaactgggcattgcatcttgagtcttcacaaggaccggcactgctactctcgtgtcctggagttgattgtgaatgtttgggcattccacagtgcacgacggatggtctatgttaatcctcagactggtgcaatgcaggagcagcaccatctcagtggcaggagaggtcaaatgtcagtgcagtttttctcctacaccactctgaagagcatggacgaggagcttgcagaagagtttgacttggatcatccggacaggaggtggctctggccacaaactggagaggtcttctggcagggtctctatcagagggagcggatcatgcggcagcaggagaaggagcggcggaagcagcagagcagagagaagatccagagaatcaagaatagagctcggcaaaagacgctgggaaagtatataaagccaccgcctgatgatacaggtggctcgaacgatacaacatcagtagatttgtagcattttgaccatgatgattcttaccgtggggaatttggttcattatttgtaacggctgtccttggtcctcactgagaacccccggacggttgtgaatattttgtcagttttgtcgtgccctctggtgtctgggtgctttacaggcgattttgtaacatatctaggccattgagttgtgaagctgccatcttaggtgtaaatttgggtttccgtagggttgtttttgtccatttcgcttatgagcttctctataacagacagttaacacttaacagctgctccgcatttgcagtctccttggtacaaaatgagtcgactgatggtatcaatctgtcaagatatatttgggtgaacctgtg

SEQ ID NO: 214582 - DNA, 2622 bp, Zea Mays
agagtttatttgcattatttctgcagctatgatggcatacttgttaattctattgaggcaagaccagtattctcaaggccccccctcagaagcatttagttaccatgaagatgtgaggatcagtttgggcttgagtcccaaagattttttgattgctattgttggtactccgttttcatatggtgataatttgatggaagaggcacttgtcttgcaagcagtaagtcctttgttacggagatatcactctgagaatagcgcacaatctgaattgaaagtaaagatcttcactgggaacataactgagaagcataggatggcccttgagtctgttgctctaagtgttggcttcccaagaggtgcagcggagcatgttgctgctgaagataaggacatcctccttcgtacagctgaccttgttatatattattcttgtcttgaggagcaattattccccagtgtgctagtcgaagctatgagtcttgagaagctggttatagctccagaccttggaattattagaaaacatatcgatgatggagtaaacggacttctttttccaagaaagaatgttggcatgttagctcaagttcttcttcaagcagtgtcgaacggtaaagtgtctatttcagggcaaaaaattgcttcagctgggaaggcccatgccaagaatcttatggcttctgagaccattgaaggctatgctgtgctattggaaaatgttgtcaagttccccactgatgcattacaccctttaactgttgatgagatacctttagctctgaaaaaggagtggaaatggcacctatttgaggatgtgaagcatttacaccatatgaatacgagtttgtctagctacaagatactcaagaaactagagcaggagtggcatagaaaccaaatggagaactcttctttgagtacaacaaagatcagtgacacattctctgcaattgcctgggaagaacagagagcaaatgaggttatggacatcaaaagaaaaatggaggaagacgagttgaaggacaggaatgaccaacctcatggaacatgggaggaggtgtacagaaatgtgaaaagggtagataggttaaaaaatgaattgcatgaaagagatgacaaggagcttgagcggacaggtcagccactttgtatatatgagccttttttcggggaggggacctggccatttctgcaccagagctctctttatcgtggagttggcctgtcttcaaaaggtcgaagaccaggagcagatgatattgatgcttcttctcgtcttccacttctcaacaatgtttactacagagatattcttggtgaatttggagctttctttgctcttgccaacagaattgaccgaatacacaaaaattcttggatagggtttcagtcctggagaggtacagcaagaaaggcaaacttatcaaacaatgccgaatttgcaatcttagaagctgttcaatctcaaaagcatggagattccttctatttttgggttcggatggatcaagatccaagaaaccacacatataaagatttttggtccttctgtgatgcgatcaatgctgggaactgcaggttagctgttttggaggccttccaaaggatgtatggtgtacaccttgatcatgacctggattctctgttacatatgcctaatgatggagacacatggtctgtgatgcaaagttgggttttgcctacacggtcattcctagaatttgttatgttttcaagaatgtttgttgatgcactggatgcacaaatgtacgacaaacaccatcaaactgggcattgcatcttgagtcttcacaaggaccggcactgctactctcgtgtcctggagttgattgtgaatgtttgggcattccacagtgcacgacggatggtctatgttaatcctcagactggtgcaatgcaggagcagcaccatctcagtggcaggagaggtcaaatgtcagtgcagtttttctcctacaccactctgaagagcatggacgaggagcttgcagaagagtttgacttggatcatccggacaggaggtggctctggccacaaactggagaggtcttctggcagggtctctatcagagggagcggatcatgcggcagcaggagaaggagcggcggaagcagcagagcagagagaagatccagagaatcaagaatagagctcggcaaaagacgctgggaaagtatataaagccaccgcctgatgatacaggtggctcgaacgatacaacatcagtagatttgtagcattttgaccatgatgattcttaccgtggggaatttggttcattatttgtaacggctgtccttggtcctcactgagaacccccggacggttgtgaatattttgtcagttttgtcgtgccctctggtgtctgggtgctttacaggcgattttgtaacatatctaggccattgagttgtgaagctgccatcttaggtgtaaatttgggtttccgtagggttgtttttgtccatttcgcttatgagcttctctataacagacagttaacacttaacagctgctccgcatttgcagtctccttggtacaaaatgagtcgactgatggtatcaatctgtcaagatatatttgggtgaacctgtg

SEQ ID NO: 214583 - DNA, 1359 bp, Zea Mays
ttattgttgaatggtacctggagtattgtccttttacagttttctcacttgaggatggcccatgtggaaatatctggagagccattggagtaccagtgagcatactacctgaggacacaaacttacctatttcagtagattggttagactatgatggcatacttgttaattctattgaggcaagaccagtattctcaaggccccccctcagaagcatttagttaccatgaagatgtgaggatcagtttgggcttgagtcccaaagattttttgattgctattgttggtactccgttttcatatggtgataatttgatggaagaggcacttgtcttgcaagcagtaagtcctttgttacggagatatcactctgagaatagcgcacaatctgaattgaaagtaaagatcttcactgggaacataactgagaagcataggatggcccttgagtctgttgctctaagtgttggcttcccaagaggtgcagcggagcatgttgctgctgaagataaggacatcctccttcgtacagctgaccttgttatatattattcttgtcttgaggagcaattattccccagtgtgctagtcgaagctatgagtcttgagaagctggttatagctccagaccttggaattattagaaaacatatcgatgatggagtaaacggacttctttttccaagaaagaatgttggcatgttagctcaagttcttcttcaagcagtgtcgaacggtaaagtgtctatttcagggcaaaaaattgcttcagctgggaaggcccatgccaagaatcttatggcttctgagaccattgaaggctatgctgtgctattggaaaatgttgtcaagttccccactgatgcattacaccctttaactgttgatgagatacctttagctctgaaaaaggagtggaaatggcacctatttgaggatgtgaagcatttacaccatatgaatacgagtttgtctagctacaagatactcaagaaactagagcaggagtggcatagaaaccaaatggagaactcttctttgagtacaacaaagatcagtgacacattctctgcaattgcctgggaagaacagagagcaaatgaggttatggacatcaaaagaaaaatggaggaagacgagttgaaggacaggaatgaccaacctcatggaacatgggaggaggtgtacagaaatgtgaaaagggtagataggttaaaaaatgaattgcatgaaagagatgacaaggagcttgagcggacaggtcagccactttgtatatatgagccttttttcggggaggggacctggccatttctgcaccagagctctctttatcgtggagttggcctggtaagctgt

SEQ ID NO: 214584 - DNA, 2622 bp, Zea Mays; identical to SEQ ID NO: 214582

SEQ ID NO: 214585 - DNA, 1958 bp, Zea Mays
atggagacaataacgagtggtcagaagtacagagattgcagacaaggtcattatatgagccatcaaattgcgatgacagttgccacaaatccagtttcatatgaaggttgcatccaaggttattcaattggatcagttaaggttgatgatactgaagtcatcagttttttgctgcaaactgaaataattcctctgtgcttacgaaccatggagatgggtagtgagctatccaaaactgagtttggggatcaaggagaggactccaatatcttgtcatcgcggctgaaggagattagtactcctgaccgccccgctaccctccgtttcctaggtacacgcataacagccattgatatgtacacactcaaacaggaagttgatgtcataaggggtgttcttggaactcaaacatacttgcatcaaatgttatcttttgaagtacaagatacaggtatagaaccagttgtatcaggttggcatggaataaccactaacgccagtgtatttgcccagggtttggtaagcaatttgatcacagctggccatggacgcgaagcagcctttgctgctgcagttttgggagataatgctctaatggagaaagcatggcaggacacaggaatgttggctgaggctgttttacatgctcaagtaagttcttttgaattttctcatgctcaatcctacttcatgagctgcaaaccattatggttttgcgtaataacactttttttggtcttcccatttccttccatcctttgctgttattgtattatccgcttctttatttatttcactgaaattatctacaccttgtatgactttgatgtcctcacgggcctaatgaactctctaggcccatggtcgtccatcattaaggaacttggttataacgtggaacaagatgctacagaaggaactggatcacacaccaactgtaaaaaccgatgcggccgcagcattcttggcttctcttgaggatccaaagctcacaagcttgggggaaactgagaaaaagcctcccattgaaatacttcctcccgggatgcctcccctatctgcacctccaatcgtgattaaaaagtctggaacaaaacctggcctccccaatgcagtaaaagcctcaaatgggcctataggtgctccgatggttcagggtgctcccatggctcaaggtactcctggggcacaaggaatccccatgaatcaagttactccatcacagggcagcgacgaggcaaagccattagaagctacagtggttgatgcagctcccaccacttcagaaggcactgcagctcccgcagctgcagaaggcacagcagctcccagcagtgaggaagctaaagcagcacctgggagtgagggaggcacatcgcatccaatcaacgaggaagccacagcagttgcagtttcagatgcaccaggcagccctgatgctgcggctgcggctgctcttgctcctgcagctgataccagtagctcggatgcacctgctgttactcccagtgaagtaaccgtctctcccccttcaaccgacgcacccgagttgaccgataagccatcaccaacagaggcatcgttgccgcctccacctagtgtttctggtgtatagaacatttcagattatttttgcagtgtgccatttttttttgtatgctgccgcgttcgttccactgtaatttttaacccatacatactggtataggcatttgctgccccatggttcaggtatcgcagacgccaggcagtatgtgagtagccctgtacatctgctgtctgcgtctcgcgagaacttgctgccattgtgtcagttgtgtgggcatagcttatgttgtttgtgatcaatccgtaggaccacagtttaattttttgcttgatcagctgcatcaccgatatcacttcttgccttgtacgacagtttcctattttgccgatttaaagcaagtgctgagatt

SEQ ID NO: 214586 - DNA, 2583 bp, Zea Mays
atggagggggtcagccgggccacgtggatgctgcttcacatcatcgcaggctcgcagtgcagttccctaacgaatcaacaaggtgacaaagacgggatgcaaaggagttggtgccattctggtggcaaagatgatgtattagaggacggattgtgtgatctcgaggttccaccggtagctagtcaaaactatgttggactgacatctaaagatatttttgttgaggttgctcctgatgaatttggcttgcctgatgtggatgctgattcaaaacttgagaaggagcacattagatggttgagtatgcaatttacaatatcaagaccattgcatctagagtcggttctcttggtggcgctaggcagcagcacaactgatctgcaccacacctgctcgactctggaggatctctccttgggcgccttcagcacacaggaggaagcggaggcatacgatatcacaacgatcaaggtccgtggcctcaacgccttcaccaaatttgacatgagtcgctacaacatcaagagcatcctggatagcagtgctctccccttcggtggcaccgccaagcgcctcaaggagaccgaggccgccgcgtccgcacgagatcataccggcgtgctaagctatgacattgggggtgacgcgcacagtgcggtcagagttggcacccaacgtttgctacagcggagtgaagcacacagggcaacccttgtggagatggtaagtctacaaatcggtgcacagggtgttggaggtatggcccataccatatttgatgaaatgcctctaaacagcggcgaggaagaaattgccctgttctctggtggttattctaattattcagtgttcgatgaaatgccacttggggatgtgatttgggatgaggaatatgggcatcatgatttgttggatcagctagcaccagatgcatattacttagctgccaagaggacgccctatgactccgtcccaatgaacttactcaatgacgttgcagtctctgctcccaagtatgatgatctgactaatgttgggcaggccaaaggaattgtgcactatcatggcccgttgccatgctcgcatccatggccatgctgaggtagacttctcctcgtgacgtggctccggttcgcaatggtggacgacgatggtgacagggaacactagcaatagccggttgtggcagccgccgccgcgtcacatagcgtcgagttggagggacacaacacataaatagatctgcgaagtctcgcatcatggcagtgtcggcggcctcccgggcatggtgactctccccagtcgaccaggcacctcttcgtcctttggtcccgtacgcctccgcttcctcgggcatgtccgccggccattcggacgccgtcaaaccggttggccgtgtctgggtcatctccgcgcccctcctccaaatggccaaaccctactttgttgtagctagcctacccctccagacgccattgtcttcctggtcagtcccgcccactactcgtctcatcaggtgtcgatgattgaagcatacctgcgagctaacaaaatgtttgtggacaagcatgagcttgagatggaacgagttttctcttcatatctggagatggaccttagtgaggtggagccttgcgttttaggccccaaaaggcctcatgaccgtgtccctttgaaggaaatgaagtcagactggcatgcttgcctggacaacgaagttggtttcaagggctatgcggtgccaaaggaacagcaaggcaaagttgtgaaattcgacttccatggaaggccagctgaaatcaagcatggcagtgttgttcttgcagcaatatgtagctccacaaacacatcaaatcccagtgttatgattggtgctggccttgtggcaaagaaagcctatgaattgggccttgaggtgaagccatgggtaaagacaagccttacccctggatctgtggttgctatcgagtacttgaaacatagtggccttcaagattatctgaactagcaagggttccatgtcgctgcgcatggctgcgccacttgtgtgggcaactctagtgagctggatggatctgtatccgctgctatcacagaaaatgatatcgttgctgctacggtgttgtcagccaaccgaaacttcgaggggcgtgtgaaccctctcactcgggctaactaccttgcctcgctgcctctggttgttgcctatgctcttgccgacactgttgacattgactttgagaaagagcccattggagttggaaagggtgggaaggaagttttcttgagggacatatggccttcaaaccaagagattgatgaggttgtggagtccagcatgcagactcacttgataattcaagaaagtgtacgactccatcatggaactcatattttggtggttgcactagtgtggagacttgaattcatgtatacacttagttagactcaacgttagcgcaaacagttgatgaccaagttttttatttagtattttagtttggatgtatagtacacttatgtatgagttatttgacaatgcttatttatgagatattgaatgacacttgtctatgttatact

SEQ ID NO: 214587 - DNA, 2172 bp, Zea Mays
ctactgcgatcgacatgtggtcattcggctgcatagttgctgaactgtttctaggcttgccattgtttcctggagcaacagaatatgatgtgcttcagagaatggtgaaaattctcggaggccaaccaccagatgaactgctaagggaagctaaaaacactgtaaggttttttaaacatgttggaagtatatatgctggcaatgcggcacctattggtctttctagtgcatacagaattttaagtgaagaagaggttgaagcgagagattccaagaggcaaaagatgggaaagtggtacttcccacacctgaagcttgacagactcatatgtacctatccttggaacaattctgaactggcagagacagagaaaacagatcgtttgggattagttgatttcttgaagggactccttgaatttgatccaaataagcgatggtcaccattgcaggctctacaccatccattcataacaggagaatcgtttactggtccatatgagccaatacccgagactgcaagaattcctgttgctcgtgcagcagcaattgatcacaatcctggaggggggcactggctacattcaggttggaagtgtaaacagatacctacctttgaataatgtctaccctccaaaggttcctttttcttatgggagtagttatggaagctttggtagccatggcagctatactggtaatgctggttttggtaacagctatggaagcattggtgatgctaatgctatcaatatgtattactcacccttaggttcttctggattaacgcaaattggccctagtccagatgttagactaaggatgcgtctctcacatgatagaggaattcgattgagccctggtagtcttgggcctatgtctgttggagccagtccatcacagtttaccccaccgaactaccatatgcaaatcccagctaattctactgggacacatggttctggttctcctgcaagtggagtcattcatggttctccgttaggaaaagctgcagcagtgggcccatacaacatgaggagaaacttgccaatgccaccacatgattatgtatctcagcatggacaagggcgttttagagatggtgtcagctttagtcattctgatgcctgtgctcaaggacatacaggccactctcataatgcagcggtacctagttcttatcattctggttggagaccaaaaataggttcaaggagtggtatttccttggaggcctcgtctagtcatgtgccttcgaaggctccgtcacaatcatttgacttttcagcttcatcgacacttgatcctgctaattgggaccctaattatagtgatgagtcactattgcaagaagacaattcactgtcagctgatctaagcagcaacctccactttggagatgcaactggccaagaccacatctttgctacatctaaccctgtaccgacaaaccaaagaggagatcaattatttcatgtgtcctctcaaggagtgagtgcccattccagtgttctcatcaactacggtggttacaaccctcaaaattatcctcagcaaaatgcccgtcctcgtcatggacagccaattctccatcagcgatataatcaggcaacttccagtccaatgcggccaatgggaagccatcacaatgggcagcctgcgtggcctagtagttttggcatgggcgatggagtgccctggggaggaacaagagggcactcatttacgacaaggaaggattatgggagcatcttttagggtggagttgtggaccggaggaacgtcattgattcattgcaggcgtaaattatttgtatcagcgaaattggagtgcgatgattctggttgattgttttcgatgttgttactccatccctccacttggtcctttgtgaacacactggatatatacactatatgatcggtgacattagcactcctttgtaaccttttttaggaatcagaagtttgggtgttcccctaattgctgactgcattgtggctgtactgaatactgtaccattgtcaccggtgtaatatgaaggcgtgatgtaggtagactaaagggctctttgattcgtggctaaatgtgtcatactttatctaaggttagttgttcgaattaaagaactaaccttagtcagaaaaaatagtcaaagtgtggcaagttag

SEQ ID NO: 214588 - DNA, 2177 bp, Zea Mays
atatactactgcgatcgacatgtggtcattcggctgcatagttgctgaactgtttctaggcttgccattgtttcctggagcaacagaatatgatgtgcttcagagaatgaggccaaccaccagatgaactgctaagggaagctaaaaacactgtaaggttttttaaacatgttggaagtatatatgctggcaatgcggcacctattggtctttctagtgcatacagaattttaagtgaagaagaggttgaagcgagagattccaagaggcaaaagatgggaaagtggtacttcccacacctgaagcttgacagactcatatgtacctatccttggaacaattctgaactggcagagacagagaaaacagatcgtttgggattagttgatttcttgaagggactccttgaatttgatccaaataagcgatggtcaccattgcaggctctacaccatccattcataacaggagaatcgtttactggtccatatgagccaatacccgagactgcaagaattcctgttgctcgtgcagcagcaattgatcacaatcctggaggggggcactggctacattcaggtctttccccgcaggttggaagtgtaaacagatacctacctttgaataatgtctaccctccaaaggttcctttttcttatgggagtagttatggaagctttggtagccatggcagctatactggtaatgctggttttggtaacagctatggaagcattggtgatgctaatgctatcaatatgtattactcacccttaggttcttctggattaacgcaaattggccctagtccagatgttagactaaggatgcgtctctcacatgatagaggaattcgattgagccctggtagtcttgggcctatgtctgttggagccagtccatcacagtttaccccaccgaactaccatatgcaaatcccagctaattctactgggacacatggttctggttctcctgcaagtggagtcattcatggttctccgttaggaaaagctgcagcagtgggcccatacaacatgaggagaaacttgccaatgccaccacatgattatgtatctcagcatggacaagggcgttttagagatggtgtcagctttagtcattctgatgcctgtgctcaaggacatacaggccactctcataatgcagcggtacctagttcttatcattctggttggagaccaaaaataggttcaaggagtggtatttccttggaggcctcgtctagtcatgtgccttcgaaggctccgtcacaatcatttgacttttcagcttcatcgacacttgatcctgctaattgggaccctaattatagtgatgagtcactattgcaagaagacaattcactgtcagctgatctaagcagcaacctccactttggagatgcaactggccaagaccacatctttgctacatctaaccctgtaccgacaaaccaaagaggagatcaattatttcatgtgtcctctcaaggagtgagtgcccattccagtgttctcatcaactacggtggttacaaccctcaaaattatcctcagcaaaatgcccgtcctcgtcatggacagccaattctccatcagcgatataatcaggcaacttccagtccaatgcggccaatgggaagccatcacaatgggcagcctgcgtggcctagtagttttggcatgggcgatggagtgccctggggaggaacaagagggcactcatttacgacaaggaaggattatgggagcatcttttagggtggagttgtggaccggaggaacgtcattgattcattgcaggcgtaaattatttgtatcagcgaaattggagtgcgatgattctggttgattgttttcgatgttgttactccatccctccacttggtcctttgtgaacacactggatatatacactatatgatcggtgacattagcactcctttgtaaccttttttaggaatcagaagtttgggtgttcccctaattgctgactgcattgtggctgtactgaatactgtaccattgtcaccggtgtaatatgaaggcgtgatgtaggtagactaaagggctctttgattcgtggctaaatgtgtcatactttatctaaggttagttgttcgaattaaagaactaaccttagtcagaaaaaatagtcaaagtgtggcaagttag

SEQ ID NO: 214589 - DNA, 2007 bp, Zea Mays
atatactactgcgatcgacatgtggtcattcggctgcatagttgctgaactgtttctaggcttgccattgtttcctggagcaacagaatatgatgtgcttcagagaatggtgaaaattctcggaggccaaccaccagatgaactgctaagggaagctaaaaacactgtaaggttttttaaacatgttggaagtatatatgctggcaatgcggcacctattggtctttctagtgcatacagaattttaagtgaagaagaggttgaagcgagagattccaagaggcaaaagatgggaaagtggtacttcccacacctgaagcttgacagactcatatgtacctatccttggaacaattctgaactggcagagacagagaaaacagatcgtttgggattagttgatttcttgaagggactccttgaatttgatccaaataagcgatggtcaccattgcaggctctacaccatccattcataacaggagaatcgtttactggtccatatgagccaatacccgagactgcaagaattcctgttgctcgtgcagcagcaattgatcacaatcctggaggggggcactggctacattcaggtctttccccgcaggttcttctggattaacgcaaattggccctagtccagatgttagactaaggatgcgtctctcacatgatagaggaattcgattgagccctggtagtcttgggcctatgtctgttggagccagtccatcacagtttaccccaccgaactaccatatgcaaatcccagctaattctactgggacacatggttctggttctcctgcaagtggagtcattcatggttctccgttaggaaaagctgcagcagtgggcccatacaacatgaggagaaacttgccaatgccaccacatgattatgtatctcagcatggacaagggcgttttagagatggtgtcagctttagtcattctgatgcctgtgctcaaggacatacaggccactctcataatgcagcggtacctagttcttatcattctggttggagaccaaaaataggttcaaggagtggtatttccttggaggcctcgtctagtcatgtgccttcgaaggctccgtcacaatcatttgacttttcagcttcatcgacacttgatcctgctaattgggaccctaattatagtgatgagtcactattgcaagaagacaattcactgtcagctgatctaagcagcaacctccactttggagatgcaactggccaagaccacatctttgctacatctaaccctgtaccgacaaaccaaagaggagatcaattatttcatgtgtcctctcaaggagtgagtgcccattccagtgttctcatcaactacggtggttacaaccctcaaaattatcctcagcaaaatgcccgtcctcgtcatggacagccaattctccatcagcgatataatcaggcaacttccagtccaatgcggccaatgggaagccatcacaatgggcagcctgcgtggcctagtagttttggcatgggcgatggagtgccctggggaggaacaagagggcactcatttacgacaaggaaggattatgggagcatcttttagggtggagttgtggaccggaggaacgtcattgattcattgcaggcgtaaattatttgtatcagcgaaattggagtgcgatgattctggttgattgttttcgatgttgttactccatccctccacttggtcctttgtgaacacactggatatatacactatatgatcggtgacattagcactcctttgtaaccttttttaggaatcagaagtttgggtgttcccctaattgctgactgcattgtggctgtactgaatactgtaccattgtcaccggtgtaatatgaaggcgtgatgtaggtagactaaagggctctttgattcgtggctaaatgtgtcatactttatctaaggttagttgttcgaattaaagaactaaccttagtcagaaaaaatagtcaaagtgtggcaagttag

SEQ ID NO: 214590 - DNA, 2221 bp, Zea Mays
cttggctatccatatactactgcgatcgacatgtggtcattcggctgcatagttgctgaactgtttctaggcttgccattgtttcctggagcaacagaatatgatgtgcttcagagaatggtgaaaattctcggaggccaaccaccagatgaactgctaagggaagctaaaaacactgtaaggttttttaaacatgttggaagtatatatgctggcaatgcggcacctattggtctttctagtgcatacagaattttaagtgaagaagaggttgaagcgagagattccaagaggcaaaagatgggaaagtggtacttcccacacctgaagcttgacagactcatatgtacctatccttggaacaattctgaactggcaggtcttgcattttgattcagagacagagaaaacagatcgtttgggattagttgatttcttgaagggactccttgaatttgatccaaataagcgatggtcaccattgcaggctctacaccatccattcataacaggagaatcgtttactggtccatatgagccaatacccgagactgcaagaattcctgttgctcgtgcagcagcaattgatcacaatcctggaggggggcactggctacattcaggtctttccccgcaggttggaagtgtaaacagatacctacctttgaataatgtctaccctccaaaggttcctttttcttatgggagtagttatggaagctttggtagccatggcagctatactggtaatgctggttttggtaacagctatggaagcattggtgatgctaatgctatcaatatgtattactcacccttaggttcttctggattaacgcaaattggccctagtccagatgttagactaaggatgcgtctctcacatgatagaggaattcgattgagccctggtagtcttgggcctatgtctgttggagccagtccatcacagtttaccccaccgaactaccatatgcaaatcccagctaattctactgggacacatggttctggttctcctgcaagtggagtcattcatggttctccgttaggaaaagctgcagcagtgggcccatacaacatgaggagaaacttgccaatgccaccacatgattatgtatctcagcatggacaagggcgttttagagatggtgtcagctttagtcattctgatgcctgtgctcaaggacatacaggccactctcataatgcagcggtacctagttcttatcattctggttggagaccaaaaataggttcaaggagtggtatttccttggaggcctcgtctagtcatgtgccttcgaaggctccgtcacaatcatttgacttttcagcttcatcgacacttgatcctgctaattgggaccctaattatagtgatgagtcactattgcaagaagacaattcactgtcagctgatctaagcagcaacctccactttggagatgcaactggccaagaccacatctttgctacatctaaccctgtaccgacaaaccaaagaggagatcaattatttcatgtgtcctctcaaggagtgagtgcccattccagtgttctcatcaactacggtggttacaaccctcaaaattatcctcagcaaaatgcccgtcctcgtcatggacagccaattctccatcagcgatataatcaggcaacttccagtccaatgcggccaatgggaagccatcacaatgggcagcctgcgtggcctagtagttttggcatgggcgatggagtgccctggggaggaacaagagggcactcatttacgacaaggaaggattatgggagcatcttttagggtggagttgtggaccggaggaacgtcattgattcattgcaggcgtaaattatttgtatcagcgaaattggagtgcgatgattctggttgattgttttcgatgttgttactccatccctccacttggtcctttgtgaacacactggatatatacactatatgatcggtgacattagcactcctttgtaaccttttttaggaatcagaagtttgggtgttcccctaattgctgactgcattgtggctgtactgaatactgtaccattgtcaccggtgtaatatgaaggcgtgatgtaggtagactaaagggctctttgattcgtggctaaatgtgtcatactttatctaaggttagttgttcgaattaaagaactaaccttagtcagaaaaaatagtcaaagtgtggcaagttag

SEQ ID NO: 214591 - DNA, 2955 bp, Zea Mays
tttgttgcaagattaacagcaggcatcattcagacatatctagaatgtgatcctgagtttaagtactcagaggttctaaatccaaaacgcttcctcaccaatccctctaccccagcccacaatgatgggcttgacaatgcaaattgggacctcatattgtacgtcaacttggagttggttaataagatgtcaaacagaaggtttattgtcaaggaaatgcttgggcagggaacttttggtcaagtagtcaagtgctgggacacagaaactaatgactatgttgctgtgaaggtgataaaaaaccagcctgcattttaccatcaagctatcatggaggtttcactattaagaacgttaaatcagaaatttgatcctgatgatcagcataacattgtccgtatgcttgattatttgtcatttcaaaatcatttgtgcatagcttttgagatgcttggtcaaaacctgtatgaactgctcaaaaggaatcacttaagaggtctgaaattgaaatatgttcaagccttctcaaaacagatattggatgccatggttgtgatgagagaagctggaataattcattgtgatctgaagccagaaaatatcctgttagctcccagcgtcgcaacagctgcagcagtgaaagttattgattttggatcagcgtgcctggagggtaaaacagtttactcgtacattcaggttttttttaactttgtagatcatttttatttcttatttaagtaatgttggttaactgaaataagatatactactgcgatcgacatgtggtcattcggctgcatagttgctgaactgtttctaggcttgccattgtttcctggagcaacagaatatgatgtgcttcagagaatggtgaaaattctcggaggccaaccaccagatgaactgctaagggaagctaaaaacactgtaaggttttttaaacatgttggaagtatatatgctggcaatgcggcacctattggtctttctagtgcatacagaattttaagtgaagaagaggttgaagcgagagattccaagaggcaaaagatgggaaagtggtacttcccacacctgaagcttgacagactcatatgtacctatccttggaacaattctgaactggcagagacagagaaaacagatcgtttgggattagttgatttcttgaagggactccttgaatttgatccaaataagcgatggtcaccattgcaggctctacaccatccattcataacaggagaatcgtttactggtccatatgagccaatacccgagactgcaagaattcctgttgctcgtgcagcagcaattgatcacaatcctggaggggggcactggctacattcaggtctttccccgcaggttggaagtgtaaacagatacctacctttgaataatgtctaccctccaaaggttcctttttcttatgggagtagttatggaagctttggtagccatggcagctatactggtaatgctggttttggtaacagctatggaagcattggtgatgctaatgctatcaatatgtattactcacccttaggttcttctggattaacgcaaattggccctagtccagatgttagactaaggatgcgtctctcacatgatagaggaattcgattgagccctggtagtcttgggcctatgtctgttggagccagtccatcacagtttaccccaccgaactaccatatgcaaatcccagctaattctactgggacacatggttctggttctcctgcaagtggagtcattcatggttctccgttaggaaaagctgcagcagtgggcccatacaacatgaggagaaacttgccaatgccaccacatgattatgtatctcagcatggacaagggcgttttagagatggtgtcagctttagtcattctgatgcctgtgctcaaggacatacaggccactctcataatgcagcggtacctagttcttatcattctggttggagaccaaaaataggttcaaggagtggtatttccttggaggcctcgtctagtcatgtgccttcgaaggctccgtcacaatcatttgacttttcagcttcatcgacacttgatcctgctaattgggaccctaattatagtgatgagtcactattgcaagaagacaattcactgtcagctgatctaagcagcaacctccactttggagatgcaactggccaagaccacatctttgctacatctaaccctgtaccgacaaaccaaagaggagatcaattatttcatgtgtcctctcaaggagtgagtgcccattccagtgttctcatcaactacggtggttacaaccctcaaaattatcctcagcaaaatgcccgtcctcgtcatggacagccaattctccatcagcgatataatcaggcaacttccagtccaatgcggccaatgggaagccatcacaatgggcagcctgcgtggcctagtagttttggcatgggcgatggagtgccctggggaggaacaagagggcactcatttacgacaaggaaggattatgggagcatcttttagggtggagttgtggaccggaggaacgtcattgattcattgcaggcgtaaattatttgtatcagcgaaattggagtgcgatgattctggttgattgttttcgatgttgttactccatccctccacttggtcctttgtgaacacactggatatatacactatatgatcggtgacattagcactcctttgtaaccttttttaggaatcagaagtttgggtgttcccctaattgctgactgcattgtggctgtactgaatactgtaccattgtcaccggtgtaatatgaaggcgtgatgtaggtagactaaagggctctttgattcgtggctaaatgtgtcatactttatctaaggttagttgttcgaattaaagaactaaccttagtcagaaaaaatagtcaaagtgtggcaagttag

SEQ ID NO: 214592 - DNA, 4786 bp, Zea Mays
gtggtgcacggttctgcctttgttccgcgcccctgcgtccggaaatctcgccgcgcccctgcgtccggaaatctcgccgcgcccctacgcaatcacctcctcctctcccctcactacgccgccacctcctcctctccccctcactgcgtcgccctcctctcccactcactgcgtcgtcccctggatcctcgccccagcctctccaaccgcctccgcgctgtcccctggatctcgcgtcgcgcgtctgcagcacgcccgccacacacgccgcgattggagattggtggaaagcggtccgcggcttcaactccgacatctccggcgagctcgagcgcctcgctgcaacgacgggggcgctgaagtccgtctggaatccggtgacacagaaaaagatcagagtttctccttctacttcgtcgggtgaagtcccggtggtggacaacacctcgacgctgatccctctggaagctgcggcaggcattgctggtgccgatgcaacccacatttggcattcccactccaatcgaagggtttttggtgtcgctgaacaggacactaggcttctgctctgcttactaatccattggtttcaagatgacagaagccgtcatcaaactgaatacttcttctaactgaatacttcttcccagctgacagatcagatcaaacttgacgtgtgttaggtatcagagaaaaaaaccaaggcatggtgcacttctaaagagcacatctgcagctgcccgctcgggctccgtttcgataagactagggacctgtacatcgccgacgcctacttcagcttgctcaaagttggccccgagggcaggctggagagttgctgtgaaaactctcaagtgagggaacatgatcatgtgcacgcaagatcctgatgactgttggcagaatcaagtcatagttaaataaacaggcccccacccgacggcgcgagcgaggcacgcggccctcccggcggggtggacgcggcccctggctgtgaggcgacgatggggctggaggctgcgatggcgctgggcgacccgccggcggactacgcatccatcgcgacggtggggctgttcgtggcattcatgtgcgtctgcatcgtcgtcgggcacctcctcgaggagaaccgctggatgaacgagtccatcaccatgctcttcatcggctttgggaccttgatgttgcaatgctgtatgttggggattgcaggggctgggaactagagcagtcatcctgttcgcgtcgagcgagaagcattcacgtgtgctggtgttcagtgaggacctcttatttatttacctgctgccgctgatcatattcaatgcagggttccaagtgaagaagaaacagttctttcgaaacttcattactattacactgtttggtgcagttggcaccttgatctcttttactgtaatatcccttggcgctctaggactaatatcaaggcttaatatcggcgcacttgaactgggagactatcttgcacttggggcaatattctcggccacagactcgaactttgatcatggaaatatcagcggtgccaaattactgaacttcattggcagtttcctttatctgttcggctccagcaccattcttggagtagcttctggacttcttagtgcttataccattaagaagttgtactttggcaggcattcaaccgatcatgaagtttccattatgatgctaatggcttatttatcttacatgctagctgaaaaagttcgagggtcacaaccaagtaagtagcttcataccttctgtatggacatttgcttttgatcatgcattctttggtaatgcttatgctaatgtactattggatggatcacaggcatgcctttgcaacattgtcgtttatcttcgagacttttctgtttctttatgttggtatggatgcattggatatagagaagtggaagattgtcggtcaaacttataggcatactctctccctctttctctctcttcattgctcaactagaagatctttcttctggatctgtattttctatcatgtgcagcccggtaaagtctatcgctttgagcagcaccattttagccttggtgctggtttcaagagctgcttttgttttcccactatcctttctatcaaatttgaccaaaaaactccaaatggaaagatatcttttaggcagcaggttattgtttggtgggcgggtctcatgagaggtgttgtgtctattgtgttggcttacaataaggttaatcttgtgtttggtctatctggtttgagctttggtctggaattatgttactgcttttgtttcctctatccattccaaaacataggacattttttgttgtcgtaagtcaaaaattctctaactttgacagagtttatagaaaaacaaaccaacatcaacagccttcatttcttaatcttatatagaagttgcagtattttagtctaatagatggacatgttttaaattttgaggcattgaaacaatttgcatcatgaaggcgttcgacttaatgtttccaaggttctgtggcagtgcgaggcattttgggaggtggtgagcgcctcgcttggcaccttcattttcgtgatgatgctgtccttcaggctgcagtgccacacaagttcgtttggtgtaggtgctgcttgatttttggcggtgcatgccgggtgttcgacaatgtttctgaggttttgtggcagtgcgaggcattttgggagggacatcatcatgcccaacttgaagtcgtccgtgaccacaacagcgagcgcggtggagtacatggatgaagtattgaaggcgttgtcgccaggtagtaccttcttcccactcatgacactacctcgtagacaacacaagtctagatgttgctggtgcagctgttcaacacgggcaaggtgctgttttccaatgtggtcgtcgacggcggcatgttcgtcttggccctcctcacctaccgcagcttcttcgcggcgccatcattctccctgtccgtctgattttctatcaggttgctcgatcgtcgtcaatataatccgtgtcaacaaattttaatcttggttcataagtaaagaacagaaaaggaaaacctagatgtctataattatacgtacatcaaatctaatgattttaggtacatattttctgtttgccattgcaaaatctaatcacgtgaattttatagttccaatcggggctatgtctatgtactcttatttttgtccagaacccttatgtaaggggaagtggaaagaaatggattggcacactgctggatggatcttcctcaatacgtttatcgagtaaataagcttgcattgttttggataattacatcatgtaaccgattttgacatttttttattaatcaccggcaacttacccaatttgctgtaataataaaataaaaggctacactatactacacactttcttgccatacattaaatctgacggtcattttttttattcctgacgacgcccgcagccgccgccgccgacgacggaggagcagcacctctcgtctgtccaccgctgaccgctcgtttgtcagcctagcaccggggtgcatgaacgcccagtatatgctacagcaccgccgcccctggccctgccgcctgcgccggtcgttgccctgtgcactccgcgggcctcgggaatggccaaccaggacatttatcggtttgcccaccctctcctctcttctcttctctcccgcccgctctccctctctcccttctctccggcttccgattgggtattgtttattggcttctggctttaattaattactgtatttgcatgttcaggtatgttgttcatccatctcgtatgatgaagtgttttatgctcttttccaattattgttgcaagtagcaaaattagaacatgtccttatgtttagactatgaaagaaaacacttatttcaatttgtaggtgtatttttctgtttcagttggcatatcatcatgaggatgtgaattccacaggaaggcccatgtgatcttattgctcccttagatcttccacattttttacagtcttattccttgccgaggggagtcctgctccagtagtggtctcagaaggggcaaataccatggatgttggcaggcctgtgcttgtgcagaatgcaccaaggacaagactggatgcagggacatgggggacgatggggattggattggggtactgtattgcagctgcagtagctgaacctgaatgactcgtggttgctgtggagggcgattctggatttggcttcggtgcaatggaggttgaggggcttcaacagtgatgctgttttagcaatggagacgatccattccctgtcagcttcaaaatcaagttacccaatggctgatctcacccaactcttcatgacagctactcaagaagggaaaagatcagaatcgcaaggccagattcttagggtggaatgctatagcttaatgccctaatctttatatgcctcttcttatatctgcacttccatgggcaccgggcgacactaaattcacaagataccccctccacctcaaggtgtaagaccatagcttccatcgctctttacgttatgtaatatatttgtagtatgctaatttgattcaccataatccttaccattcatactattatgcttgtttttctctcttcagtaatcgtcgaaaatggttcattgttcatagctcaagccaacttaattttaacgcaaaaatgtagcagtacttaaagtttcatctgtaatttatcaatggataagtgagttagaaatagtatttatcat

SEQ ID NO: 214593 - DNA, 5837 bp, Zea Mays
gtggtgcacggttctgcctttgttccgcgcccctgcgtccggaaatctcgccgcgcccctgcgtccggaaatctcgccgcgcccctacgcaatcacctcctcctctcccctcactacgccgccacctcctcctctccccctcactgcgtcgccctcctctcccactcactgcgtcgtcccctggatcctcgccccagcctctccaaccgcctccgcgctgtcccctggatctcgcgtcgcgcgtctgcagcacgcccgccacacacgccgcgattggagattggtggaaagcggtccgcggcttcaactccgacatctccggcgagctcgagcgcctcgctgcaacgacgggggcgacgctcagatccgacgtgccggacgcggccgccgtggatctgaacgacctcgagtccatggatctgtcggcggacgctgctccgctggagcacatggagccgttcgtgctggcatgcgcgcgggtgctgggcccgacgccgggccggacgcgtggcgtcgccgacggccgggtcgtcttctgggacggcaagcggtgggtcccattcgcgacggcctctccgcgctggacgcaggagctctgcggcgggcccaaggcctcgccgctggagtatctccccacgcccggcgatggcgccctgcacctcacgcccgtgctccgcccccacacccagcaggcaggcatggatctcgcagggcagggatctcgcggatcacgccgtgcggggatctcgcggatcacgccgggcggggatctcggccaagcctgatcagaagtttggggccctatcaaagcgattcgcagaagtggaggctgggggatcgaagcggaggtggtggagatgacggaggcgctgaagtccgtctggaatccggtgacacagaaaaagatcagagtttctccttctacttcgtcgggtgaagtcccggtggtggacaacacctcgacgctgatccctctggaagctgcggcaggcattgctggtgccgatgcaacccacatttggcattcccactccaatcgaagggtttttggtgtcgctgaacaggacactaggcttctgctctgcttactaatccattggtttcaagatgacagaagccgtcatcaaactgaatacttcttctaactgaatacttcttcccagctgacagatcagatcaaacttgacgtgtgttaggtatcagagaaaaaaaccaaggcatggtgcacttctaaagagcacatctgcagctgcccgctcgggctccgtttcgataagactagggacctgtacatcgccgacgcctacttcagcttgctcaaagttggccccgagggcaggctggagagttgctgtgaaaactctcaagtgagggaacatgatcatgtgcacgcaagatcctgatgactgttggcagaatcaagtcatagttaaataaacaggcccccacccgacggcgcgagcgaggcacgcggccctcccggcggggtggacgcggcccctggctgtgaggcgacgatggggctggaggctgcgatggcgctgggcgacccgccggcggactacgcatccatcgcgacggtggggctgttcgtggcattcatgtgcgtctgcatcgtcgtcgggcacctcctcgaggagaaccgctggatgaacgagtccatcaccatgctcttcatcggctttgggaccttgatgttgcaatgctgtatgttggggattgcaggggctgggaactagagcagtcatcctgttcgcgtcgagcgagaagcattcacgtgtgctggtgttcagtgaggacctcttatttatttacctgctgccgctgatcatattcaatgcagggaggcaggagcatccttaattgaacggcagtgatcctgcagtttatgttggaaagaaattaacataggagcattgcacgtatttggttattgttttagaacctatttctataggttttctctttggagctttctgagctaaagtccaaaaaggattccatcttctgaacacttcagtagcaaagcaactatgttgtgctattaaatataaatctgcaattattccaccaagtctttggcgttaggagtgtagctgatatgttgtcatgtatgattatgctgaatatctggcactaagaacctttgtgtataacccactcacaattcttttttttttcttccccaataagccaggttccaagtgaagaagaaacagttctttcgaaacttcattactattacactgtttggtgcagttggcaccttgatctcttttactgtaatatcccttggcgctctaggactaatatcaaggcttaatatcggcgcacttgaactgggagactatcttgcacttggggcaatattctcggccacagactcggtttgtaccttgcaggtgttaagccaagatgagacaccattcttgtacagcctcgtgtttggtgaaggtgttgtcaatgacacaacttctgttgtgttgttcaatgcaatccagaactttgatcatggaaatatcagcggtgccaaattactgaacttcattggcagtttcctttatctgttcggctccagcaccattcttggagtagcttctggacttcttagtgcttataccattaagaagttgtactttggcaggcattcaaccgatcatgaagtttccattatgatgctaatggcttatttatcttacatgctagctgaattgctcgatttgagtggcattctcactgtgtttttctgtggtatcgtaatgtcacactatacttggcaaaatgtaacagaaagttcgagggtcacaaccaagcatgcctttgcaacattgtcgtttatcttcgagacttttctgtttctttatgttggtatggatgcattggatatagagaagtggaagattgtcggtcaaacttataggcatactctctccctctttctctctcttcattgctcaactagaagatctttcttctggatctgtattttctatcatgtgcagcccggtaaagtctatcgctttgagcagcaccattttagccttggtgctggtttcaagagctgcttttgttttcccactatcctttctatcaaatttgaccaaaaaactccaaatggaaagatatcttttaggcagcaggtaagtctttaacttagcaacatcttaacttcttatgttctcttgaaacagttgttatattccttacatgatattggtcatttaggttattgtttggtgggcgggtctcatgagaggtgttgtgtctattgtgttggcttacaataaggttaatcttgtgtttggtctatctggtttgagctttggtctggaattatgttactgcttttgtttcctctatccattccaaaacataggacattttttgttgtcgtaagtcaaaaattctctaactttgacagagtttatagaaaaacaaaccaacatcaacagccttcatttcttaatcttatatagaagttgcagtattttagtctaatagatggacatgttttaaattttgaggcattgaaacaatttgcatcatgaaggcgttcgacttaatgtttccaaggttctgtggcagtgcgaggcattttgggaggtggtgagcgcctcgcttggcaccttcattttcgtgatgatgctgtccttcaggctgcagtgccacacaagttcgtttggtgtaggtgctgcttgatttttggcggtgcatgccgggtgttcgacaatgtttctgaggttttgtggcagtgcgaggcattttgggagggacatcatcatgcccaacttgaagtcgtccgtgaccacaacagcgagcgcggtggagtacatggatgaagtattgaaggcgttgtcgccaggtagtaccttcttcccactcatgacactacctcgtagacaacacaagtctagatgttgctggtgcagctgttcaacacgggcaaggtgctgttttccaatgtggtcgtcgacggcggcatgttcgtcttggccctcctcacctaccgcagcttcttcgcggcgccatcattctccctgtccgtctgattttctatcaggttgctcgatcgtcgtcaatataatccgtgtcaacaaattttaatcttggttcataagtaaagaacagaaaaggaaaacctagatgtctataattatacgtacatcaaatctaatgattttaggtacatattttctgtttgccattgcaaaatctaatcacgtgaattttatagttccaatcggggctatgtctatgtactcttatttttgtccagaacccttatgtaaggggaagtggaaagaaatggattggcacactgctggatggatcttcctcaatacgtttatcgagtaaataagcttgcattgttttggataattacatcatgtaaccgattttgacatttttttattaatcaccggcaacttacccaatttgctgtaataataaaataaaaggctacactatactacacactttcttgccatacattaaatctgacggtcattttttttattcctgacgacgcccgcagccgccgccgccgacgacggaggagcagcacctctcgtctgtccaccgctgaccgctcgtttgtcagcctagcaccggggtgcatgaacgcccagtatatgctacagcaccgccgcccctggccctgccgcctgcgccggtcgttgccctgtgcactccgcgggcctcgggaatggccaaccaggacatttatcggtttgcccaccctctcctctcttctcttctctcccgcccgctctccctctctcccttctctccggcttccgattgggtattgtttattggcttctggctttaattaattactgtatttgcatgttcaggtatgttgttcatccatctcgtatgatgaagtgttttatgctcttttccaattattgttgcaagtagcaaaattagaacatgtccttatgtttagactatgaaagaaaacacttatttcaatttgtaggtgtatttttctgtttcagttggcatatcatcatgaggatgtgaattccacaggaaggcccatgtgatcttattgctcccttagatcttccacattttttacagtcttattccttgccgaggggagtcctgctccagtagtggtctcagaaggggcaaataccatggatgttggcaggcctgtgcttgtgcagaatgcaccaaggacaagactggatgcagggacatgggggacgatggggattggattggggtactgtattgcagctgcagtagctgaacctgaatgactcgtggttgctgtggagggcgattctggatttggcttcggtgcaatggaggttgaggggcttcaacagtgatgctgttttagcaatggagacgatccattccctgtcagcttcaaaatcaagttacccaatggctgatctcacccaactcttcatgacagctactcaagaagggaaaagatcagaatcgcaaggccagattcttagggtggaatgctatagcttaatgccctaatctttatatgcctcttcttatatctgcacttccatgggcaccgggcgacactaaattcacaagataccccctccacctcaaggtgtaagaccatagcttccatcgctctttacgttatgtaatatatttgtagtatgctaatttgattcaccataatccttaccattcatactattatgcttgtttttctctcttcagtaatcgtcgaaaatggttcattgttcatagctcaagccaacttaattttaacgcaaaaatgtagcagtacttaaagtttcatctgtaatttatcaatggataagtgagttagaaatagtatttatcat

SEQ ID NO: 214594 - DNA, 5377 bp, Zea Mays
gtggtgcacggttctgcctttgttccgcgcccctgcgtccggaaatctcgccgcgcccctgcgtccggaaatctcgccgcgcccctacgcaatcacctcctcctctcccctcactacgccgccacctcctcctctccccctcactgcgtcgccctcctctcccactcactgcgtcgtcccctggatcctcgccccagcctctccaaccgcctccgcgctgtcccctggatctcgcgtcgcgcgtctgcagcacgcccgccacacacgccgcgattggagattggtggaaagcggtccgcggcttcaactccgacatctccggcgagctcgagcgcctcgctgcaacgacgggggcgacgctcagatccgacgtgccggacgcggccgccgtggatctgaacgacctcgagtccatggatctgtcggcggacgctgctccgctggagcacatggagccgttcgtgctggcatgcgcgcgggtgctgggcccgacgccgggccggacgcgtggcgtcgccgacggccgggtcgtcttctgggacggcaagcggtgggtcccattcgcgacggcctctccgcgctggacgcaggagctctgcggcgggcccaaggcctcgccgctggagtatctccccacgcccggcgatggcgccctgcacctcacgcccgtgctccgcccccacacccagcaggcaggcatggatctcgcagggcagggatctcgcggatcacgccgtgcggggatctcgcggatcacgccgggcggggatctcggccaagcctgatcagaagtttggggccctatcaaagcgattcgcagaagtggaggctgggggatcgaagcggaggtggtggagatgacggaggcgctgaagtccgtctggaatccggtgacacagaaaaagatcagagtttctccttctacttcgtcgggtgaagtcccggtggtggacaacacctcgacgctgatccctctggaagctgcggcaggcattgctggtgccgatgcaacccacatttggcattcccactccaatcgaagggtttttggtgtcgctgaacaggacactaggcttctgctctgcttactaatccattggtttcaagatgacagaagccgtcatcaaactgaatacttcttctaactgaatacttcttcccagctgacagatcagatcaaacttgacgtgtgttaggtatcagagaaaaaaaccaaggcatggtgcacttctaaagagcacatctgcagctgcccgctcgggctccgtttcgataagactagggacctgtacatcgccgacgcctacttcagcttgctcaaagttggccccgagggcaggctggagagttgctgtgaaaactctcaagtgagggaacatgatcatgtgcacgcaagatcctgatgactgttggcagaatcaagtcatagttaaataaacaggcccccacccgacggcgcgagcgaggcacgcggccctcccggcggggtggacgcggcccctggctgtgaggcgacgatggggctggaggctgcgatggcgctgggcgacccgccggcggactacgcatccatcgcgacggtggggctgttcgtggcattcatgtgcgtctgcatcgtcgtcgggcacctcctcgaggagaaccgctggatgaacgagtccatcaccatgctcttcatcgggctgggaactagagcagtcatcctgttcgcgtcgagcgagaagcattcacgtgtgctggtgttcagtgaggacctcttatttatttacctgctgccgctgatcatattcaatgcagggttccaagtgaagaagaaacagttctttcgaaacttcattactattacactgtttggtgcagttggcaccttgatctcttttactgtaatatcccttggcgctctaggactaatatcaaggcttaatatcggcgcacttgaactgggagactatcttgcacttggggcaatattctcggccacagactcggtttgtaccttgcaggtgttaagccaagatgagacaccattcttgtacagcctcgtgtttggtgaaggtgttgtcaatgacacaacttctgttgtgttgttcaatgcaatccagaactttgatcatggaaatatcagcggtgccaaattactgaacttcattggcagtttcctttatctgttcggctccagcaccattcttggagtagctgtaagttatatgctcttccgcttctagctttgctaaagtttactgacatgtgtttttttctgtagtctggacttcttagtgcttataccattaagaagttgtactttggcaggcattcaaccgatcatgaagtttccattatgatgctaatggcttatttatcttacatgctagctgaaaaagttcgagggtcacaaccaagcatgcctttgcaacattgtcgtttatcttcgagacttttctgtttctttatgttggtatggatgcattggatatagagaagtggaagattgtcggtcaaacttataggcatactctctccctctttctctctcttcattgctcaactagaagatctttcttctggatctgtattttctatcatgtgcagcccggtaaagtctatcgctttgagcagcaccattttagccttggtgctggtttcaagagctgcttttgttttcccactatcctttctatcaaatttgaccaaaaaactccaaatggaaagatatcttttaggcagcaggtaagtctttaacttagcaacatcttaacttcttatgttctcttgaaacagttgttatattccttacatgatattggtcatttaggttattgtttggtgggcgggtctcatgagaggtgttgtgtctattgtgttggcttacaataaggttaatcttgtgtttggtctatctggtttgagctttggtctggaattatgttactgcttttgtttcctctatccattccaaaacataggacattttttgttgtcgtaagtcaaaaattctctaactttgacagagtttatagaaaaacaaaccaacatcaacagccttcatttcttaatcttatatagaagttgcagtattttagtctaatagatggacatgttttaaattttgaggcattgaaacaatttgcatcatgaaggcgttcgacttaatgtttccaaggttctgtggcagtgcgaggcattttgggaggtggtgagcgcctcgcttggcaccttcattttcgtgatgatgctgtccttcaggctgcagtgccacacaagttcgtttggtgtaggtgctgcttgatttttggcggtgcatgccgggtgttcgacaatgtttctgaggttttgtggcagtgcgaggcattttgggagggacatcatcatgcccaacttgaagtcgtccgtgaccacaacagcgagcgcggtggagtacatggatgaagtattgaaggcgttgtcgccaggtagtaccttcttcccactcatgacactacctcgtagacaacacaagtctagatgttgctggtgcagctgttcaacacgggcaaggtgctgttttccaatgtggtcgtcgacggcggcatgttcgtcttggccctcctcacctaccgcagcttcttcgcggcgccatcattctccctgtccgtctgattttctatcaggttgctcgatcgtcgtcaatataatccgtgtcaacaaattttaatcttggttcataagtaaagaacagaaaaggaaaacctagatgtctataattatacgtacatcaaatctaatgattttaggtacatattttctgtttgccattgcaaaatctaatcacgtgaattttatagttccaatcggggctatgtctatgtactcttatttttgtccagaacccttatgtaaggggaagtggaaagaaatggattggcacactgctggatggatcttcctcaatacgtttatcgagtaaataagcttgcattgttttggataattacatcatgtaaccgattttgacatttttttattaatcaccggcaacttacccaatttgctgtaataataaaataaaaggctacactatactacacactttcttgccatacattaaatctgacggtcattttttttattcctgacgacgcccgcagccgccgccgccgacgacggaggagcagcacctctcgtctgtccaccgctgaccgctcgtttgtcagcctagcaccggggtgcatgaacgcccagtatatgctacagcaccgccgcccctggccctgccgcctgcgccggtcgttgccctgtgcactccgcgggcctcgggaatggccaaccaggacatttatcggtttgcccaccctctcctctcttctcttctctcccgcccgctctccctctctcccttctctccggcttccgattgggtattgtttattggcttctggctttaattaattactgtatttgcatgttcaggtatgttgttcatccatctcgtatgatgaagtgttttatgctcttttccaattattgttgcaagtagcaaaattagaacatgtccttatgtttagactatgaaagaaaacacttatttcaatttgtaggtgtatttttctgtttcagttggcatatcatcatgaggatgtgaattccacaggaaggcccatgtgatcttattgctcccttagatcttccacattttttacagtcttattccttgccgaggggagtcctgctccagtagtggtctcagaaggggcaaataccatggatgttggcaggcctgtgcttgtgcagaatgcaccaaggacaagactggatgcagggacatgggggacgatggggattggattgggggcgattctggatttggcttcggtgcaatggaggttgaggtgaacaggggcttcaacagtgatgctgttttagcaatggagacgatccattccctgtcagcttcaaaatcaagttacccaatggctgatctcacccaactcttcatgacagctactcaagaagggaaaagatcagaatcgcaaggccagattcttagggtggaatgctatagcttaatgccctaatctttatatgcctcttcttatatctgcacttccatgggcaccgggcgacactaaattcacaagataccccctccacctcaaggtgtaagaccatagcttccatcgctctttacgttatgtaatatatttgtagtatgctaatttgattcaccataatccttaccattcatactattatgcttgtttttctctcttcagtaatcgtcgaaaatggttcattgttcatagctcaagccaacttaattttaacgcaaaaatgtagcagtacttaaagtttcatctgtaatttatcaatggataagtgagttagaaatagtatttatcat

SEQ ID NO: 214595 - DNA, 4813 bp, Zea Mays
gtggtgcacggttctgcctttgttccgcgcccctgcgtccggaaatctcgccgcgcccctgcgtccggaaatctcgccgcgcccctacgcaatcacctcctcctctcccctcactacgccgccacctcctcctctccccctcactgcgtcgccctcctctcccactcactgcgtcgtcccctggatcctcgccccagcctctccaaccgcctccgcgctgtcccctggatctcgcgtcgcgcgtctgcagcacgcccgccacacacgccgcgattggagattggtggaaagcggtccgcggcttcaactccgacatctccggcgagctcgagcgcctcgctgcaacgacgggggcgacgctcagatccgacgtgccggacgcggccgccgtggatctgaacgacctcgagtccatggatctgtcggcggacgctgctccgctggagcacatggagccgttcgtgctggcatgcgcgcgggtgctgggcccgacgccgggccggacgcgtggcgtcgccgacggccgggtcgtcttctgggacggcaagcggtgggtcccattcgcgacggcctctccgcgctggacgcaggagctctgcggcgggcccaaggcctcgccgctggagtatctccccacgcccggcgatggcgccctgcacctcacgcccgtgctccgcccccacacccagcaggcaggcatggatctcgcagggcagggatctcgcggatcacgccgtgcggggatctcgcggatcacgccgggcggggatctcggccaagcctgatcagaagtttggggccctatcaaagcgattcgcagaagtggaggctgggggatcgaagcggaggtggtggagatgacggaggcgctgaagtccgtctggaatccggtgacacagaaaaagatcagagtttctccttctacttcgtcgggtgaagtcccggtggtggacaacacctcgacgctgatccctctggaagctgcggcaggcattgctggtgccgatgcaacccacatttggcattcccactccaatcgaagggtttttggtgtcgctgaacaggacactaggcttctgctctgcttactaatccattggtttcaagatgacagaagccgtcatcaaactgaatacttcttctaactgaatacttcttcccagctgacagatcagatcaaacttgacgtgtgttaggtatcagagaaaaaaaccaaggcatggtgcacttctaaagagcacatctgcagctgcccgctcgggctccgtttcgataagactagggacctgtacatcgccgacgcctacttcagcttgctcaaagttggccccgagggcaggctggagagttgctgtgaaaactctcaagtgagggaacatgatcatgtgcacgcaagatcctgatgactgttggcagaatcaagtcatagttaaataaacaggcccccacccgacggcgcgagcgaggcacgcggccctcccggcggggtggacgcggcccctggctgtgaggcgacgatggggctggaggctgcgatggcgctgggcgacccgccggcggactacgcatccatcgcgacggtggggctgttcgtggcattcatgtgcgtctgcatcgtcgtcgggcacctcctcgaggagaaccgctggatgaacgagtccatcaccatgctcttcatcggctttgggaccttgatgttgcaatgctgtatgttggggattgcaggggctgggaactagagcagtcatcctgttcgcgtcgagcgagaagcattcacgtgtgctggtgttcagtgaggacctcttatttatttacctgctgccgctgatcatattcaatgcagggttccaagtgaagaagaaacagttctttcgaaacttcattactattacactgtttggtgcagttggcaccttgatctcttttactgtaatatcccttggcgctctaggactaatatcaaggcttaatatcggcgcacttgaactgggagactatcttgcacttggggcaatattctcggccacagactcggtttgtaccttgcaggtgttaagccaagatgagacaccattcttgtacagcctcgtgtttggtgaaggtgttgtcaatgacacaacttctgttgtgttgttcaatgcaatccagaactttgatcatggaaatatcagcggtgccaaattactgaacttcattggcagtttcctttatctgttcggctccagcaccattcttggagtagcttctggacttcttagtgcttataccattaagaagttgtactttggcaggcattcaaccgatcatgaagtttccattatgatgctaatggcttatttatcttacatgctagctgaaaaagttcgagggtcacaaccaagcatgcctttgcaacattgtcgtttatcttcgagacttttctgtttctttatgttggtatggatgcattggatatagagaagtggaagattgtcggtcaaacttataggcatactctctccctctttctctctcttcattgctcaactagaagatctttcttctggatctgtattttctatcatgtgcagcccggtaaagtctatcgctttgagcagcaccattttagccttggtgctggtttcaagagctgcttttgttttcccactatcctttctatcaaatttgaccaaaaaactccaaatggaaagatatcttttaggcagcaggtaagtctttaacttagcaacatcttaacttcttatgttctcttgaaacagttgttatattccttacatgatattggtcatttaggttattgtttggtgggcgggtctcatgagaggtgttgtgtctattgtgttggcttacaataaggttaatcttgtgtttggtctatctggtttgagctttggtctggaattatgttactgcttttgtttcctctatccattccaaaacataggacattttttgttgtcgtaagtcaaaaattctctaactttgacagagtttatagaaaaacaaaccaacatcaacagccttcatttcttaatcttatatagaagttgcagtattttagtctaatagatggacatgttttaaattttgaggcattgaaacaatttgcatcatgaaggcgttcgacttaatgtttccaaggttctgtggcagtgcgaggcattttgggaggtggtgagcgcctcgcttggcaccttcattttcgtgatgatgctgtccttcaggctgcagtgccacacaagttcgtttggtgtaggtgctgcttgatttttggcggtgcatgccgggtgttcgacaatgtttctgaggttttgtggcagtgcgaggcattttgggagggacatcatcatgcccaacttgaagtcgtccgtgaccacaacagcgagcgcggtggagtacatggatgaagtattgaaggcgttgtcgccaggtagtaccttcttcccactcatgacactacctcgtagacaacacaagtctagatgttgctggtgcagctgttcaacacgggcaaggtgctgttttccaatgtggtcgtcgacggcggcatgttcgtcttggccctcctcacctaccgcagcttcttcgcggcgccatcattctccctgtccgtctgattttctatcaggttgctcgatcgtcgtcaatataatccgtgtcaacaaattttaatcttggttcataagtaaagaacagaaaaggaaaacctagatgtctataattatacgtacatcaaatctaatgattttaggtacatattttctgtttgccattgcaaaatctaatcacgtgaattttatagttccaatcggggctatgtctatgtactcttatttttgtccagaacccttatgtaaggggaagtggaaagaaatggattggcacactgctggatggatcttcctcaatacgtttatcgaccgccgccgccgacgacggaggagcagcacctctcgtctgtccaccgctgaccgctcgtttgtcagcctagcaccggggtgcatgaacgcccagtatatgctacagcaccgccgcccctggccctgccgcctgcgccggtcgttgccctgtgcactccgcgggcctcgggaatggccaaccaggacatttatcgtcttattccttgccgaggggagtcctgctccagtagtggtctcagaaggggcaaataccatggatgttggcaggcctgtgcttgtgcagaatgcaccaaggacaagactggatgcagggacatgggggacgatggggattggattgggggcgattctggatttggcttcggtgcaatggaggttgaggtgaacaggggcttcaacagtgatgctgttttagcaatggagacgatccattccctgtcagcttcaaaatcaagttacccaatggctgatctcacccaactcttcatgacagctactcaagaagggaaaagatcagaatcgcaaggccagattcttagggtggaatgctatagcttaatgccctaatctttatatgcctcttcttatatctgcacttccatgggcaccgggcgacactaaattcacaagataccccctccacctcaaggtgtaagaccatagcttccatcgctctttacgttatgtaatatatttgtagtatgctaatttgattcaccataatccttaccattcatactattatgcttgtttttctctcttcagtaatcgtcgaaaatggttcattgttcatagctcaagccaacttaattttaacgcaaaaatgtagcagtacttaaagtttcatctgtaatttatcaatggataagtgagttagaaatagtatttatcat

SEQ ID NO: 214596 - DNA, 5492 bp, Zea Mays
gtggtgcacggttctgcctttgttccgcgcccctgcgtccggaaatctcgccgcgcccctgcgtccggaaatctcgccgcgcccctacgcaatcacctcctcctctcccctcactacgccgccacctcctcctctccccctcactgcgtcgccctcctctcccactcactgcgtcgtcccctggatcctcgccccagcctctccaaccgcctccgcgctgtcccctggatctcgcgtcgcgcgtctgcagcacgcccgccacacacgccgcgattggagattggtggaaagcggtccgcggcttcaactccgacatctccggcgagctcgagcgcctcgctgcaacgacgggggcgacgctcagatccgacgtgccggacgcggccgccgtggatctgaacgacctcgagtccatggatctgtcggcggacgctgctccgctggagcacatggagccgttcgtgctggcatgcgcgcgggtgctgggcccgacgccgggccggacgcgtggcgtcgccgacggccgggtcgtcttctgggacggcaagcggtgggtcccattcgcgacggcctctccgcgctggacgcaggagctctgcggcgggcccaaggcctcgccgctggagtatctccccacgcccggcgatggcgccctgcacctcacgcccgtgctccgcccccacacccagcaggcaggcatggatctcgcagggcagggatctcgcggatcacgccgtgcggggatctcgcggatcacgccgggcggggatctcggccaagcctgatcagaagtttggggccctatcaaagcgattcgcagaagtggaggctgggggatcgaagcggaggtggtggagatgacggaggcgctgaagtccgtctggaatccggtgacacagaaaaagatcagagtttctccttctacttcgtcgggtgaagtcccggtggtggacaacacctcgacgctgatccctctggaagctgcggcaggcattgctggtgccgatgcaacccacatttggcattcccactccaatcgaagggtttttggtgtcgctgaacaggacactaggcttctgctctgcttactaatccattggtttcaagatgacagaagccgtcatcaaactgaatacttcttctaactgaatacttcttcccagctgacagatcagatcaaacttgacgtgtgttaggtatcagagaaaaaaaccaaggcatggtgcacttctaaagagcacatctgcagctgcccgctcgggctccgtttcgataagactagggacctgtacatcgccgacgcctacttcagcttgctcaaagttggccccgagggcaggctggagagttgctgtgaaaactctcaagtgagggaacatgatcatgtgcacgcaagatcctgatgactgttggcagaatcaagtcatagttaaataaacaggcccccacccgacggcgcgagcgaggcacgcggccctcccggcggggtggacgcggcccctggctgtgaggcgacgatggggctggaggctgcgatggcgctgggcgacccgccggcggactacgcatccatcgcgacggtggggctgttcgtggcattcatgtgcgtctgcatcgtcgtcgggcacctcctcgaggagaaccgctggatgaacgagtccatcaccatgctcttcatcggctttgggaccttgatgttgcaatgctgtatgttggggattgcaggggctgggaactagagcagtcatcctgttcgcgtcgagcgagaagcattcacgtgtgctggtgttcagtgaggacctcttatttatttacctgctgccgctgatcatattcaatgcagggttccaagtgaagaagaaacagttctttcgaaacttcattactattacactgtttggtgcagttggcaccttgatctcttttactgtaatatcccttggcgctctaggactaatatcaaggcttaatatcggcgcacttgaactgggagactatcttgcacttggggcaatattctcggccacagactcggtttgtaccttgcaggtgttaagccaagatgagacaccattcttgtacagcctcgtgtttggtgaaggtgttgtcaatgacacaacttctgttgtgttgttcaatgcaatccagaactttgatcatggaaatatcagcggtgccaaattactgaacttcattggcagtttcctttatctgttcggctccagcaccattcttggagtagcttctggacttcttagtgcttataccattaagaagttgtactttggcaggcattcaaccgatcatgaagtttccattatgatgctaatggcttatttatcttacatgctagctgaattgctcgatttgagtggcattctcactgtgtttttctgtggtatcgtaatgtcacactatacttggcaaaatgtaacagaaagttcgagggtcacaaccaagcatgcctttgcaacattgtcgtttatcttcgagacttttctgtttctttatgttggtatggatgcattggatatagagaagtggaagattgtcggtcaaacttataggcatactctctccctctttctctctcttcattgctcaactagaagatctttcttctggatctgtattttctatcatgtgcagcccggtaaagtctatcgctttgagcagcaccattttagccttggtgctggtttcaagagctgcttttgttttcccactatcctttctatcaaatttgaccaaaaaactccaaatggaaagatatcttttaggcagcaggtaagtctttaacttagcaacatcttaacttcttatgttctcttgaaacagttgttatattccttacatgatattggtcatttaggttattgtttggtgggcgggtctcatgagaggtgttgtgtctattgtgttggcttacaataaggttaatcttgtgtttggtctatctggtttgagctttggtctggaattatgttactgcttttgtttcctctatccattccaaaacataggacattttttgttgtcgtaagtcaaaaattctctaactttgacagagtttatagaaaaacaaaccaacatcaacagccttcatttcttaatcttatatagaagttgcagtattttagtctaatagatggacatgttttaaattttgaggcattgaaacaatttgcatcatgaaggcgttcgacttaatgtttccaaggttctgtggcagtgcgaggcattttgggaggtggtgagcgcctcgcttggcaccttcattttcgtgatgatgctgtccttcaggctgcagtgccacacaagttcgtttggtgtaggtgctgcttgatttttggcggtgcatgccgggtgttcgacaatgtttctgaggttttgtggcagtgcgaggcattttgggagggacatcatcatgcccaacttgaagtcgtccgtgaccacaacagcgagcgcggtggagtacatggatgaagtattgaaggcgttgtcgccaggtagtaccttcttcccactcatgacactacctcgtagacaacacaagtctagatgttgctggtgcagctgttcaacacgggcaaggtgctgttttccaatgtggtcgtcgacggcggcatgttcgtcttggccctcctcacctaccgcagcttcttcgcggcgccatcattctccctgtccgtctgattttctatcaggttgctcgatcgtcgtcaatataatccgtgtcaacaaattttaatcttggttcataagtaaagaacagaaaaggaaaacctagatgtctataattatacgtacatcaaatctaatgattttaggtacatattttctgtttgccattgcaaaatctaatcacgtgaattttatagttccaatcggggctatgtctatgtactcttatttttgtccagaacccttatgtaaggggaagtggaaagaaatggattggcacactgctggatggatcttcctcaatacgtttatcgagtaaataagcttgcattgttttggataattacatcatgtaaccgattttgacatttttttattaatcaccggcaacttacccaatttgctgtaataataaaataaaaggctacactatactacacactttcttgccatacattaaatctgacggtcattttttttattcctgacgacgcccgcagccgccgccgccgacgacggaggagcagcacctctcgtctgtccaccgctgaccgctcgtttgtcagcctagcaccggggtgcatgaacgcccagtatatgctacagcaccgccgcccctggccctgccgcctgcgccggtcgttgccctgtgcactccgcgggcctcgggaatggccaaccaggacatttatcggtttgcccaccctctcctctcttctcttctctcccgcccgctctccctctctcccttctctccggcttccgattgggtattgtttattggcttctggctttaattaattactgtatttgcatgttcaggtatgttgttcatccatctcgtatgatgaagtgttttatgctcttttccaattattgttgcaagtagcaaaattagaacatgtccttatgtttagactatgaaagaaaacacttatttcaatttgtaggtgtatttttctgtttcagttggcatatcatcatgaggatgtgaattccacaggaaggcccatgtgatcttattgctcccttagatcttccacattttttacagtcttattccttgccgaggggagtcctgctccagtagtggtctcagaaggggcaaataccatggatgttggcaggcctgtgcttgtgcagaatgcaccaaggacaagactggatgcagggacatgggggacgatggggattggattggggtactgtattgcagctgcagtagctgaacctgaatgactcgtggttgctgtggagggcgattctggatttggcttcggtgcaatggaggttgaggtgaacaggggcttcaacagtgatgctgttttagcaatggagacgatccattccctgtcagcttcaaaatcaagttacccaatggctgatctcacccaactcttcatgacagctactcaagaagggaaaagatcagaatcgcaaggccagattcttagggtggaatgctatagcttaatgccctaatctttatatgcctcttcttatatctgcacttccatgggcaccgggcgacactaaattcacaagataccccctccacctcaaggtgtaagaccatagcttccatcgctctttacgttatgtaatatatttgtagtatgctaatttgattcaccataatccttaccattcatactattatgcttgtttttctctcttcagtaatcgtcgaaaatggttcattgttcatagctcaagccaacttaattttaacgcaaaaatgtagcagtacttaaagtttcatctgtaatttatcaatggataagtgagttagaaatagtatttatcat

SEQ ID NO: 214597 - DNA, 3217 bp, Zea Mays
agcataatgttcccctccccgactccgccttccccgcctcgtccttctcggaccgccggctccgcgtccccagttctacgtcgccagcacctcatccataccgttagcccgcacagcagtttttactgctctgtagtagtaggctgtagactctgtactctctagtctctactcccccctctccgccttctctctctccgcaggcggtatcctcccttcctcggttcctctcctctcccccaccaccccaccccagcgccccaaatgccgctccaaccctagcctcccgccacgcctttcgatctcggccggccatgggcaactgctgccgctcgccggccgccgtcgcgcgggaggacgtcagctcctcgcacttccccgcatccaacgcgaagaagaagccgcaccaagcgcgcaacggcggcggcgccgggcagaagcggctctcggttctgggcgacgaggggtgcgaggtcgtcgggatcgacgacaagtacgtcctggacagggagctcggccgcggggagttcggggtgacgtacctgtgtatggatcggggcaccaaggagctgctcgcctgcaagtccatctccaagcgcaagctgcggacggccgtcgacgtggaggacgtgcgccgggaggtggccatcatgcgccacctgcccaagagccccagcgtcgtgtccctgcgggaggcgtgcgaggacgacggcgccgtccacctcgtcatggagctctgcgagggcggcgagctcttcgaccgcatcgtcgcgcggggccactacaccgagcgcgccgccgccagtgtcacccgcaccatcctcgaggtcgtccagctctgccaccgccacggcgtcatccaccgcgacctcaagccggagaacttcctcttcgccaataagaaggagaactcgccgctcaaggccatcgacttcggtctctccatcttcttcaagcctggtgaaaagttttcagaaattgtgggaagcccctattacatggctcctgaagtattgaagagaaactatgggccagaaatagacatatggagtgcgggagttatcctgtatattttattatgtggagtccctccattttgggctgagactgaacaaggggtggcgcaggctattcttcgtggaaatatcgattttaagcgggaaccctggcctaatgtttcggaaaatgcaaaagatttagttcgacacatgttggagcctgatccaaagctcaggctaactgcaaagcaggttcttgaacatcattggcttcaaaatgcaaagaaggctcctaatgtccctcttggagatattgtaaagtcaaggctcaaacaattttctaggatgaatagattcaaaagaagggctctaagggtcattgctgatcatttgtctgctgaggaagttgaggatataaaggatatgttcaagactatggatactgacaatgatggaattgtatcttatgaagaactgaagactggaatagcaaaacttggttctcatcttgcggaatcagaagtacagatgctcattgaagctgagtactgcacatcattatattaagaagatgaaggtaatacagcaatacaaggcgagctcacggcagccagaaacgaaaatacacaaaagcatccattagggacacaaggacaaaaacaacccctcataggctgcctcggttgagaatttcacgttagaacccaatctaaaaatatgagaatcatccacatctggttgtagctccaccaaattgagaatatcccatagggtatgaaaatccatgaggacccgaacagtgatggcaccctgaatatccaatacctaggaagtattagtaagggtatcctccaccgtcctattagctctttgtataggagctgaacctcaactagctgactgcttactggcagatgtaaggcaagttggggtgatttcatcaatgaaatacatgcccttggtattatgtgtagtgtagcagcaatgtaagggcctgtttggcagacctccgagaacagcttctaggctgaatcaaggaggagttctgccaagcagggttttttttacagagacctgattcaatgctgattccatgaagtgatcatctgaaatgaactaggaggctgggagctgaaaattgtagcttctcttgattcgctccacaagcagaatccttttgcatagaatttcaccaacataatcgcttctcttagagaatcacttctcagtcctcacagatccaggagtgcaggaggagctctagcgctctaccaaacaggcctaacaagagaacggaagttatgggagtagtgttgcctacttgtcttgctctctttatttaatttctccaacacttcttgatcactgtgtggcaggaggtagcaagagcaggctagattattgaactgcgactgatctggactgtaactcgctccacattttctaccgagctctgtgctctgcagctcgcacgcctttgatcagtgctgatcggcgtgcaggtggacacaaacgggaggggggcactagactacggggaatttctggccgtctcgctccacctgcagaggatggcgaacgacgagcatctccggcgggccttcctgttcttcgacaaggacggcaacggtttcatcgagcccgaggagcttcgagaggctctggtggacgacggggcggccgacagcatggaggaagtggtgaacgacatactgcaagaagtcgacaccgacaaggacggcaagatcagctacgaggagtttgtggcgatgatgaagaccggcacggactggagaaaggcgtcccggcactactcgagagggaggttcaacagcctcagcatgaagcttataaaggacgggtcggtaaagctgggtgtcgagtgaaaaccgcaccgacgctcgttgatgtgtgtgtgggtgtgtgcgcgcatgtagttttaggcccttgggccactaagcagaagaactctaggccttcttcttctttttttgtcccctcgtgactgtcttgcgtggaaattttagataggtggaagtggcggaaccctccgatttgtcttactacctgtgtaattagctatcccggtctcgctgacaggcactgggccaaacggtgtacctaatgctctcacccgttctcttgatggcagcccgagtgctgtacgatacagtgtgttttgcggtctggaaatgctcaacaatgtgttgggagacgcc

SEQ ID NO: 214598 - DNA, 2240 bp, Zea Mays
agcataatgttcccctccccgactccgccttccccgcctcgtccttctcggaccgccggctccgcgtccccagttctacgtcgccagcacctcatccataccgttagcccgcacagcagtttttactgctctgtagtagtaggctgtagactctgtactctctagtctctactcccccctctccgccttctctctctccgcaggcggtatcctcccttcctcggttcctctcctctcccccaccaccccaccccagcgccccaaatgccgctccaaccctagcctcccgccacgcctttcgatctcggccggccatgggcaactgctgccgctcgccggccgccgtcgcgcgggaggacgtcagctcctcgcacttccccgcatccaacgcgaagaagaagccgcaccaagcgcgcaacggcggcggcgccgggcagaagcggctctcggttctgggcgacgaggggtgcgaggtcgtcgggatcgacgacaagtacgtcctggacagggagctcggccgcggggagttcggggtgacgtacctgtgtatggatcggggcaccaaggagctgctcgcctgcaagtccatctccaagcgcaagctgcggacggccgtcgacgtggaggacgtgcgccgggaggtggccatcatgcgccacctgcccaagagccccagcgtcgtgtccctgcgggaggcgtgcgaggacgacggcgccgtccacctcgtcatggagctctgcgagggcggcgagctcttcgaccgcatcgtcgcgcggggccactacaccgagcgcgccgccgccagtgtcacccgcaccatcctcgaggtcgtccagctctgccaccgccacggcgtcatccaccgcgacctcaagccggagaacttcctcttcgccaataagaaggagaactcgccgctcaaggccatcgacttcggtctctccatcttcttcaagcctgagactgaacaaggggtggcgcaggctattcttcgtggaaatatcgattttaagcgggaaccctggcctaatgtttcggaaaatgcaaaagatttagttcgacacatgttggagcctgatccaaagctcaggctaactgcaaagcaggttcttgaacatcattggcttcaaaatgcaaagaaggctcctaatgtccctcttggagatattgtaaagtcaaggctcaaacaattttctaggatgaatagattcaaaagaagggctctaagggtcattgctgatcatttgtctgctgaggaagttgaggatataaaggatatgttcaagactatggatactgacaatgatggaattgtatcttatgaagaactgaagactggaatagcaaaacttggttctcatcttgcggaatcagaagtacagatgctcattgaagctgaggtagcaagagcaggctagattattgaactgcgactgatctggactgtaactcgctccacattttctaccgagctctgtgctctgcagctcgcacgcctttgatcagtgctgatcggcgtgcaggtggacacaaacgggaggggggcactagactacggggaatttctggccgtctcgctccacctgcagaggatggcgaacgacgagcatctccggcgggccttcctgttcttcgacaaggacggcaacggtttcatcgagcccgaggagcttcgagaggctctggtggacgacggggcggccgacagcatggaggaagtggtgaacgacatactgcaagaagtcgacaccgacaaggacggcaagatcagctacgaggagtttgtggcgatgatgaagaccggcacggactggagaaaggcgtcccggcactactcgagagggaggttcaacagcctcagcatgaagcttataaaggacgggtcggtaaagctgggtgtcgagtgaaaaccgcaccgacgctcgttgatgtgtgtgtgggtgtgtgcgcgcatgtagttttaggcccttgggccactaagcagaagaactctaggccttcttcttctttttttgtcccctcgtgactgtcttgcgtggaaattttagataggtggaagtggcggaaccctccgatttgtcttactacctgtgtaattagctatcccggtctcgctgacaggcactgggccaaacggtgtacctaatgctctcacccgttctcttgatggcagcccgagtgctgtacgatacagtgtgttttgcggtctggaaatgctcaacaatgtgttgggagacgcc

SEQ ID NO: 214599 - DNA, 846 bp, Zea Mays
atggctgaagatgacatggaactatggaagtgggtgttgcttccgaggatcaggacagtgacgacgatgttgatgaggatagaaaggaacaaatttctcattgattttttgagttgggaagtggcaaccacacttcaagtggtgggaacacaaaaaaacagatgtacaatcaatcctggtgacagctgtaagcctaaatggtattctcctgttggtaggtcattttactctcccaacttagggagacgtcaaaaacttggtgagggattagaaagttggcgtggtttttaccaaagcataaggccgacacagatgggcctttcactgaatattgatatgtcctctactgcatttatcgagcctctccctgtgattgattttgttgctcagcttcttaacagagatatctcagttagaccattatctgattctgatcgcgtgaagattaaaaaagccctaagaggtgtgaaggttgaggtgactggaaacatgcgcagaaaatatcacatttctggcctcacctcacaagcaacaagagagctatcgtatgtgtctttcattgctggtatgagattccctgttgatgatcgtggtactgtgaagactgtggtgcaatacttcatggagacttatggttttagtatccagcacaccactttaccatgcttgcaagtgggcaatcaacaaagaccaaattatctgcctatggaggtttgcaagatagttgaaggacagcattactcaaagagactcaatgagaaacaaatcactgctctactgaaagtgacctgccagcgccctcaagagcgtgagctggacatcttacaggattccggctctcatcaa

SEQ ID NO: 214600 - DNA, 1533 bp, Zea Mays
atggcgcgggtgcgagaaacccagccatggcggcaccggccccaagcccaagccctggcggcggcgcgccatcaagccccggtcccaccggcgggcgtggtcctcctgggctgcctgccgctgcgtagatgggacgagctcaatgtgttcttacagaaaaccaggccaaggatcgtttttgggctgaatgctctgaacggtcgggtcccgatgcctgacgattctttaggggggccatggaattacacgaacgcagcttctttcattcgctacaccgtgagcaagggatacgatgtacatggatgggagctcggaaatgagctcagtggcagcggagtcagggctcgaatcgacgcggatcagtacgcagcagacgtgatcgctctaaaacacatcgtcgatagcgcctaccagggcaagccatcgaagcctctcgtgcttgcgtcaggaggcttcttcgacgcggtctggttcacccaactcgtcagcaagacaaagccagaccagatggacgcgatcactcaccatatctacaatctaggccccggggttgacgaccatctggttcagaaaatccttgacccttcttaccttgacggcaaggcgagcacgttcagcaactttcagcaaccttcaggggatactcaagtccgcaggcacgtccgctgtcgcctgggttggcgaggctggaggcacgtacaacagttgccaccaccttgtcactgatgcgtttgtgttcagcttctggtatctggatcagctttagtacgacacaaagagctactgcagacagaccttggttggaggcaactatggcctgctcaacacaatgctttgctgtggcaccgcctcatgggcaccaaggtcctctcgacgacattcaacagcacaaacaagatccgtgcctacgcacactgcgtgaaaaactcagaagggatcgctctgctcctgatcaacctggacggcatcagcacgaaccgcatctacgtgacgagccaaggcgcgcacgcccagagcgaaaggaagaaggggagcgggacctccgacgtccacatcatccctgtagggctcggcgaagcagcagccgcgctcacgagacaggagtaccatctgactcctaaggacgggaacttgcagagccagcagctgctgctgaacggcaacgtcctggcaaccgacgccgacggggagatcccggagctggagcccgtgcaggtggaggggacgcagcccataaccgtgggcccttactctaccgtgtttgctcacgtccccagcttctacgctcctacgtgcctgtagctagagttttcgtctggattttttttcagcctttctcggtgtgcatctcgtaggttaggtaagtctgtccgggtgaaaggcgaagcttgttcatctttgcccatagtccgtgaagtgtaagctgctaggctggaaggagtggtcagatatataatgtgtgagcaaaagatggaaggaagctggaaatgagataataaaagaaagggttttgagttttagtctcattttgtt

SEQ ID NO: 214601 - DNA, 1943 bp, Zea Mays
ttgaaacgtaaaatctaacgtgtcgttaccctattagggaaagagcatggcattaatttctctacccacagctcactcactaaatggggtctcaaaacggtcagattcaagagttgcctccacctctacatcctacaaatataggtgatcaacctcctccagttgagaaaacaaagaggcagtgccctgggtgccaactagatgaggtgaacaaggctagcaataaggtcccctacctcaacttctgcttcatctggatcatctgcctcactgctactctaccaatccaatcgttgttcccatatctatacttcatgatcagggacttgaaagttgcaaaagaagagcaagacattggattttatgctggttttgtcggggcaacatatttcctcggaagaaccataagtgctgtgccatggggcatatttgctgacaagtatggaaggaagccatgcattgtgattagcatcctctcagtgattgttttcaacacactctttggacttagcacaacttactggatggcaattgtaactaggggattgcttggattgctttgtggtatattgggacccatcaaggcctatgcttcagaagtcagtaggaaggaacatcaagctctagggatatcttttgttacatcatcacgagcgatagctcttgttattgggccatctattggaggctttcttgcacagcctgcacaaaagtacccgaaattgttctctgaagagtccatatttgggaggtttccatacttcctcccttgctttgtcatatcggtgctagcggttggatcatgtattgcatgcatttggcttccggaaacgctgcactttcatgatgatgaaaaagcagaatgtattcaagaattagaatcacaagttggtggttctaaatctacagagaatctgctaaagaactggccgttgatgtcagcaataatcctattttctatcttttctctccatgacactgcttatcttgagatattttcactctgggctgtgagcagcagaaaattccagggccttagctttacatcccaggatgttggtactgtgttcgccttctcaggactcagtgtactggtatatcaacttactatttatcccctcctttcgaagtattttggaccagtcaagatatttcggcctgcagtgatcttgtccataattcttctcataacatatccattcatgtccaatctacacggcctggagctcaaaatacttgttaacatagcctcaattctgaagaacgtgtttgctgccactattactattgcgtgcaacattttgcaaaatactgcagtgacacaaaagcagagaggcactgctaatggcatctctgttactatgatgtcaatgttcaaagctgcagctccggcagcagcaggaattattttttcatgggctcagaagcacatatatgggctattcttacctggtaaccagatcttgttcctgacgctaaacatggtgtcaataattgggctagtgctgacattcaagccatttctctcccagccaatccaatgaagcattaataaatatgggtatatgaagttcgttacctatgaattacatctggagtgcattgtcaggttacacacaagaaatatggggatccatgacgaacaccatgtgacctttcagtagaatgtcataataatattgtgataaaatggttagctaccatggatgtttcatctacacaccagcttggtttgttatttatactaaggaagaacaaattctagtcttatgatcaactacagtcaggttttgaactgcaagagatcatatcttaagtggtacatacatttcgtcttatgtccaattaagtcatcaaatgtaaaggcttctctaaattttgtcttgtgtggacaccgatggaccagatgctctacctctatttatctataccttagagtaaaa

SEQ ID NO: 214602 - DNA, 1911 bp, Zea Mays
cacctatttaaacaagaacaataatagttttcttcaaaaaggaagagagagggggaaaggcagaaggaaagaactggagaagtcctcaaagagctcactcactaaatggggtctcaaaacggtcagattcaagagttgcctccacctctacatcctacaaatataggtgatcaacctcctccagttgagaaaacaaagaggcagtgccctgggtgccaactagatgaggtgaacaaggctagcaataaggtcccctacctcaacttctgcttcatctggatcatctgcctcactgctactctaccaatccaatcgttgttcccatatctatacttcatgatcagggacttgaaagttgcaaaagaagagcaagacattggattttatgctggttttgtcggggcaacatatttcctcggaagaaccataagtgctgtgccatggggcatatttgctgacaagtatggaaggaagccatgcattgtgattagcatcctctcagtgattgttttcaacacactctttggacttagcacaacttactggatggcaattgtaactaggggattgcttggattgctttgtggtatattgggacccatcaaggttacatcatcacgagcgatagctcttgttattgggccatctattggaggctttcttgcacagcctgcacaaaagtacccgaaattgttctctgaagagtccatatttgggaggtttccatacttcctcccttgctttgtcatatcggtgctagcggttggatcatgtattgcatgcatttggcttccggaaacgctgcactttcatgatgatgaaaaagcagaatgtattcaagaattagaatcacaagttggtggttctaaatctacagagaatctgctaaagaactggccgttgatgtcagcaataatcctattttctatcttttctctccatgacactgcttatcttgagatattttcactctgggctgtgagcagcagaaaattccagggccttagctttacatcccaggatgttggtactgtgttcgccttctcaggactcagtgtactggtatatcaacttactatttatcccctcctttcgaagtattttggaccagtcaagatatttcggcctgcagtgatcttgtccataattcttctcataacatatccattcatgtccaatctacacggcctggagctcaaaatacttgttaacatagcctcaattctgaagaacgtgtttgctgccactattactattgcgtgcaacattttgcaaaatactgcagtgacacaaaagcagagaggcactgctaatggcatctctgttactatgatgtcaatgttcaaagctgcagctccggcagcagcaggaattattttttcatgggctcagaagcacatatatgggctattcttacctggtaaccagatcttgttcctgacgctaaacatggtgtcaataattgggctagtgctgacattcaagccatttctctcccagccaatccaatgaagcattaataaatatgggtatatgaagttcgttacctatgaattacatctggagtgcattgtcaggttacacacaagaaatatggggatccatgacgaacaccatgtgacctttcagtagaatgtcataataatattgtgataaaatggttagctaccatggatgtttcatctacacaccagcttggtttgttatttatactaaggaagaacaaattctagtcttatgatcaactacagtcaggttttgaactgcaagagatcatatcttaagtggtacatacatttcgtcttatgtccaattaagtcatcaaatgtaaaggcttctctaaattttgtcttgtgtggacaccgatggaccagatgctctacctctatttatctataccttagagtaaaa

SEQ ID NO: 214603 - DNA, 2087 bp, Zea Mays
ctcatgaagtcatcacgatgcaataatattttatatagagcccatgtaaactagcctctatagtaggagtcaaagatgtgcaccgcgttatatccctatgtatctaatcatagccaacaccacacctatttaaacaagaacaataatagttttcttcaaaaaggaagagagagggggaaaggcagaaggaaagaactggagaagtcctcaaagagctcactcactaaatggggtctcaaaacggtcagattcaagagttgcctccacctctacatcctacaaatataggtgatcaacctcctccagttgagaaaacaaagaggcagtgccctgggtgccaactagatgaggtgaacaaggctagcaataaggtcccctacctcaacttctgcttcatctggatcatctgcctcactgctactctaccaatccaatcgttgttcccatatctatacttcatgatcagggacttgaaagttgcaaaagaagagcaagacattggattttatgctggttttgtcggggcaacatatttcctcggaagaaccataagtgctgtgccatggggcatatttgctgacaagtatggaaggaagccatgcattgtgattagcatcctctcagtgattgttttcaacacactctttggacttagcacaacttactggatggcaattgtaactaggggattgcttggattgctttgtggtatattgggacccatcaaggcctatgcttcagaagtcagtaggaaggaacatcaagctctagggatatcttttgttacatcatcacgagcgatagctcttgttattgggccatctattggaggctttcttgcacagcctgcacaaaagtacccgaaattgttctctgaagagtccatatttgggaggtttccatacttcctcccttgctttgtcatatcggtgctagcggttggatcatgtattgcatgcatttggcttccggaaacgctgcactttcatgatgatgaaaaagcagaatgtattcaagaattagaatcacaagttggtggttctaaatctacagagaatctgctaaagaactggccgttgatgtcagcaataatcctattttctatcttttctctccatgacactgcttatcttgagatattttcactctgggctgtgagcagcagaaaattccagggccttagctttacatcccaggatgttggtactgtgttcgccttctcaggactcagtgtactggtatatcaacttactatttatcccctcctttcgaagtattttggaccagtcaagatatttcggcctgcagtgatcttgtccataattcttctcataacatatccattcatgtccaatctacacggcctggagctcaaaatacttgttaacatagcctcaattctgaagaacgtgtttgctgccactattactattgcgtgcaacattttgcaaaatactgcagtgacacaaaagcagagaggcactgctaatggcatctctgttactatgatgtcaatgttcaaagctgcagctccggcagcagcaggaattattttttcatgggctcagaagcacatatatgggctattcttacctggtaaccagatcttgttcctgacgctaaacatggtgtcaataattgggctagtgctgacattcaagccatttctctcccagccaatccaatgaagcattaataaatatgggtatatgaagttcgttacctatgaattacatctggagtgcattgtcaggttacacacaagaaatatggggatccatgacgaacaccatgtgacctttcagtagaatgtcataataatattgtgataaaatggttagctaccatggatgtttcatctacacaccagcttggtttgttatttatactaaggaagaacaaattctagtcttatgatcaactacagtcaggttttgaactgcaagagatcatatcttaagtggtacatacatttcgtcttatgtccaattaagtcatcaaatgtaaaggcttctctaaattttgtcttgtgtggacaccgatggaccagatgctctacctctatttatctataccttagagtaaaa

SEQ ID NO: 214604 - DNA, 2557 bp, Zea Mays
cgcagagtcgcatcgcacggtggagtggaggtgtcctgcgcgccgcacccccgcgttatcaggctccgatcccatccccgtcccgctctgcctggcctctgtcgcggggtcgcatcgcatgcctccatgccttggctggcagcatttactatttagccgaggtgtgggtgggggcgttggcggcaaccggcaacaccgtcctcccctccccctcctcctcccgcgtgctctcctctcctatcctctctgcccccggtaactacaactgttggagtaggcccgggttggccacggccgccacactgctccgctctgctctctgaaggcattgcctgcgcggcttcttcctccgccggcgtcggtccgcgagttgttggcatggccgccgcagggacgcagctaggccggcttctgggcggcctatggttcctggccgcgttgctaggacgaccgggcgccacggcggcggccgccgggcagccggcggcaccagcggtggccgccgtcgacgggcggcgcgccgtcgcggcgaccggggaggacttcgtgtgcgcgacgttggactggtggccgccggacaagtgcgactacggcacctgcgcctggggccgcgccggcctgctcaacctgtttctctctgtcctctcgcgccgccgcaggatctctccaacaaggtcctgctcaatgccgtcagagccttctcgccgccgctgctgctccgcctgggagggtcgctgcaggacaaggtgatgtacgggtacggcgccgggcggccgtgcgcgccgttcgtcaggaacgcgtcggagatgcacggcttctcgcagggctgcctgcccctgcgcaggtgggacgacctcaacgccttcttccggagatccggtgccaaggtcgtgttcgggctcaacgcgctcaacggccgcgtcccgttgccggacgggtccatgggagggccgtgggactacaccaacgcggcgtcgctgatccggtacaccgcgaacaagggctaccgaatccatggatgggagcttgggaacgaactgagcggcactggagtgggagctcgggttggcgcggaccagtacgccgcagacgtgatcgccctgaaagcgctagtcgacgacgtgtaccggagcgagccatcgaagccgctggtggttgctcccggaggattcttcgaccaagcctggtttactgagcttgtcgtcaagaccgggccggatctactgagcgtggtcacgcaccacgtctacaatctaggaccaggaagggacacgcacctgatcgacaagatcctcgacccgtcaaccctcgacgggatggtcagcacgttcagcgacctccagcggctgctcaagtccacggggacgtcggctgtggcgtgggtcggggaagccggaggcgcctacaacagcggccgccacctcgtcactgacgcgttcgtgttcagcttctggtttttagatcagcttgggatggcagcgaggttcgacaccaagagctactgcaggcagagtttggtcggcggcaactacggcctgctaaacaccacgacgttccagcctaaccctgactattacagtgctctactgtggcatcgcctcatggggaccaaagttctagcagtaacattcagcggcacgaacaagatccgcgcgtacgcgcactgcgcgagagattcagtaagcaattcagccgcccttttttttcatctcctagagaattcacgctctctcgatgttgcgtccagccaggaatcactctgctgctgatcaacctgagcggcaacgccaccgcgcgggtctcggtgacggcccaaggggctgccgcggcgcacgcgcacaggcacaggcacgacgcgaggaagcacggcggcggcaggaagttccggcacgtgcacgtccccggcttcgccggcggcggcgaggcggcggcgggcgccgtgagacacgagtaccacctcacccccaaggacggcgacctgacgagccaggtcgtgatgctgaacggcagggcgttggccaccgacgcggcggggaacatccccgccctggaggcggtcgaggtggacgcggcgcggcccatcgccgtcacgccctactccatcgtgttcgctcgcgttccgcatttcagtgccccggcgtgtagggtagaccggtagagtagcggtttagatgggtagattcataatgggtttggcgtgattggtgatgatggacagctaagctttccatctggtgagatgaggtgaagtgaggtgcaaggcatctgtcgaaagaaaagggatgcaatgcaatgggggtgagtttgttttctttttacgattggaattgtaaaaggtcgaagaaatttatgatgatcagcgatgggaaagggaaaaactcgttcccgtttgtctttctgttcatggttggaaacaccagtgaaatcgacgtaagagcggtactaacgaaatttggtgagctcaaggaaagcatcagcttttcaaaaagagcaaaaaaaataacggaaagcatctaagaattactttgcctagaaccaaagaaataccagaatattg

SEQ ID NO: 214605 - DNA, 2456 bp, Zea Mays
cgcagagtcgcatcgcacggtggagtggaggtgtcctgcgcgccgcacccccgcgttatcaggctccgatcccatccccgtcccgctctgcctggcctctgtcgcggggtcgcatcgcatgcctccatgccttggctggcagcatttactatttagccgaggtgtgggtgggggcgttggcggcaaccggcaacaccgtcctcccctccccctcctcctcccgcgtgctctcctctcctatcctctctgcccccggtaactacaactgttggagtaggcccgggttggccacggccgccacactgctccgctctgctctctgaaggcattgcctgcgcggcttcttcctccgccggcgtcggtccgcgagttgttggcatggccgccgcagggacgcagctaggccggcttctgggcggcctatggttcctggccgcgttgctaggacgaccgggcgccacggcggcggccgccgggcagccggcggcaccagcggtggccgccgtcgacgggcggcgcgccgtcgcggcgaccggggaggacttcgtgtgcgcgacgttggactggtggccgccggacaagtgcgactacggcacctgcgcctggggccgcgccggcctgctcaacctggatctctccaacaaggtcctgctcaatgccgtcagagccttctcgccgccgctgctgctccgcctgggagggtcgctgcaggacaaggtgatgtacgggtacggcgccgggcggccgtgcgcgccgttcgtcaggaacgcgtcggagatgcacggcttctcgcagggctgcctgcccctgcgcaggtgggacgacctcaacgccttcttccggagatccggtgccaaggtcgtgttcgggctcaacgcgctcaacggccgcgtcccgttgccggacgggtccatgggagggccgtgggactacaccaacgcggcgtcgctgatccggtacaccgcgaacaagggctaccgaatccatggatgggagcttgggaacgaactgagcggcactggagtgggagctcgggttggcgcggaccagtacgccgcagacgtgatcgccctgaaagcgctagtcgacgacgtgtaccggagcgagccatcgaagccgctggtggttgctcccggaggattcttcgaccaagcctggtttactgagcttgtcgtcaagaccgggccggatctactgagcgtggtcacgcaccacgtctacaatctaggaccaggaagggacacgcacctgatcgacaagatcctcgacccgtcaaccctcgacgggatggtcagcacgttcagcgacctccagcggctgctcaagtccacggggacgtcggctgtggcgtgggtcggggaagccggaggcgcctacaacagcggccgccacctcgtcactgacgcgttcgtgttcagcttctggtttttagatcagcttgggatggcagcgaggttcgacaccaagagctactgcaggcagagtttggtcggcggcaactacggcctgctaaacaccacgacgttccagcctaaccctgactattacagtgctctactgtggcatcgcctcatggggaccaaagttctagcagtaacattcagcggcacgaacaagatccgcgcgtacgcgcactgcgcgagagattcagaatcactctgctgctgatcaacctgagcggcaacgccaccgcgcgggtctcggtgacggcccaaggggctgccgcggcgcacgcgcacaggcacaggcacgacgcgaggaagcacggcggcggcaggaagttccggcacgtgcacgtccccggcttcgccggcggcggcgaggcggcggcgggcgccgtgagacacgagtaccacctcacccccaaggacggcgacctgacgagccaggtcgtgatgctgaacggcagggcgttggccaccgacgcggcggggaacatccccgccctggaggcggtcgaggtggacgcggcgcggcccatcgccgtcacgccctactccatcgtgttcgctcgcgttccgcatttcagtgccccggcgtgtagggtagaccggtagagtagcggtttagatgggtagattcataatgggtttggcgtgattggtgatgatggacagctaagctttccatctggtgagatgaggtgaagtgaggtgcaaggcatctgtcgaaagaaaagggatgcaatgcaatgggggtgagtttgttttctttttacgattggaattgtaaaaggtcgaagaaatttatgatgatcagcgatgggaaagggaaaaactcgttcccgtttgtctttctgttcatggttggaaacaccagtgaaatcgacgtaagagcggtactaacgaaatttggtgagctcaaggaaagcatcagcttttcaaaaagagcaaaaaaaataacggaaagcatctaagaattactttgcctagaaccaaagaaataccagaatattg

SEQ ID NO: 214606 - DNA, 935 bp, Zea Mays
  misc_feature (934)..(935): n is a, c, g, or t
gctcgtttcaattgcccccgtccatcctctctctctgcgccgcgaagcttccagaaccctctattcatggaatccacctccggggagcattcagagacgggagacgaaccgtgccctctccagtttcgatacacatacaattctccccgcgatgaaaaggaacggcgagacggctgatggagcaaactgggatgaccgtggacgaggtgatgagacgtatccaggtcgaggatgcattggagcagggttacggtccggtgcacatggcggcgtcttatgggaacttaaaggtctgcaagttcctgctcaaggagctcaagctcgatgtcaacgctactgccagggatggtgcgacaccactagctttcgcaatgtatggtaatgcatctttggctattgtgatgcttcttctcgattatggtgctaatcctaacaaagaagacaaaaatgggatttatcctctccacattgcagcgcagagaggttactatgaaatagcagaattgttattgtcaagaggggcttatgttgaccctcagtgggaatctagaagcccactatatattgctgccaattatggaaatgcaagaatagtggagttattgttgcatcatggcgcacagcctaacatagcgatgaaagcagcaatctcggaacgttcattcataggcttgaaatcacttatcgaggctggtgctcctgttaatattggtctgcctgaaactccattgatagcagctgcaactgctggcttaactgacttcgtcaagtgtttggtgcaagctggcgcagatgcaaacatacccgatgataatggtagggttgcggtagaaattgctgcaatccaaggataccaagaatgtgtcgaggttcttttccctgccacggcccctttggctggagttgcagattggagcattggtggattacttcnn

SEQ ID NO: 214607 - DNA, 805 bp, Zea Mays
  misc_feature (804)..(805): n is a, c, g, or t
ggcgattacggtttctctgtgctctggatgaacggcgagacggctgatggagcaaactgggatgaccgtggacgaggtgatgagacgtatccaggtcgaggatgcattggagcagggttacggtccggtgcacatggcggcgtcttatgggaacttaaaggtctgcaagttcctgctcaaggagctcaagctcgatgtcaacgctactgccagggatggtgcgacaccactagctttcgcaatgtatggtaatgcatctttggctattgtgatgcttcttctcgattatggtgctaatcctaacaaagaagacaaaaatgggatttatcctctccacattgcagcgcagagaggttactatgaaatagcagaattgttattgtcaagaggggcttatgttgaccctcagtgggaatctagaagcccactatatattgctgccaattatggaaatgcaagaatagtggagttattgttgcatcatggcgcacagcctaacatagcgatgaaagcagcaatctcggaacgttcattcataggcttgaaatcacttatcgaggctggtgctcctgttaatattggtctgcctgaaactccattgatagcagctgcaactgctggcttaactgacttcgtcaagtgtttggtgcaagctggcgcagatgcaaacatacccgatgataatggtagggttgcggtagaaattgctgcaatccaaggataccaagaatgtgtcgaggttcttttccctgccacggcccctttggctggagttgcagattggagcattggtggattacttcnn

SEQ ID NO: 214608 - DNA, 2206 bp, Zea Mays
gccggactcgtgtgctcacattctcactagtttcaaattttcatctgttaaaccctacccacccggcgaatcccttgacaaatccaaccagcttgccggaggaatacaccgggaggtacgtcaaacggcggggagagggaggagtaggtcgctgagggagggttagagctgggcaaggccgtcgctgtcatggaggcgcaggcgacggcgacggtgaaggaggcgcttgcggcgctgtaccaccacccggacgacgccatccgcaccgccgcggaccgctggcttcaggagttccagcacacgctcgacgcctggcaggtagctgacagtttgcttcatgatgaaagcagtaatttggaaactctcatattctgttctcagacccttagaagcaaggtacaaagggactttgaagagttaccctcggaagcttttcgatcattacaggattctttatacgtattgctaaaaaagttcaataagggaccacaaaaagttagaacacagatttgtattgcaattgctgctctggctgtgcatgtacctgtagaggactggggagctggtggaattgtgaattggctaagtgatgaaatgaaaactcatccagaatttattccaggcttccttgaactgcttatagttttgccgcaggaaacttctagttataaaattgcggctcgtcctgaaaggcgcagacaatttgaaattgacctttgttcgtctgctaatgttgctattgatttattaactgcttgcatggccattgatcagctgaaagagcaggttttggagggattttcttcttggcttcgtttctgtcatggaatctctgcctctgaactcgcatcacatcctttggtccatctggcactctcttcattgaactctggtcaattcttggaggcagctgtaaatgttacatctgaactgatacatgctactgtatctcatggcgctggtactatggctgagcaagtgccactcattcaaattcttgtccctcatattatgggtctgaaagagcagctcaaagatccatctaaggatgaagaagatgtaaaagctattgctcgtttatatgcagacatgggtgaatcctatgttgacttgattgccacaggctcagacgattcaattcaaatagtgaacgcattactagaagttacttctcttctcgaatttgccatttcctccatgacgtttaatttctggcattgccttaagcgtaacctcattcgaagggactctgatgtatcatatggattagatgtgacggttgaaattgagaaaaacagaagattacaaatatttcgtccaaagtttgaaactctggtgtctctggtcagttttcgagttgaataccctgaggactaccacaccttttccgaggaagaccgcaaggattttagacatgttagatatgctgttagtgatgtgctacttgatgcaactgaagttcttgggggtgactcgacgctaaaactactttccaccaagcttgctcaggcatatgggagctgcaacaatgagcagaactccaagtggcaacctgtagaggctaccctgttttgtatacaagcaattgctagatcagtctcaattgaggagcgagaaattttaccacagattatgtcactgcttccctgccttcctcaacatgagcagttgctacaaacagtttgtttgaccattggagcattttcaaaatggattgatgctgcaccagctgaattatctattctaccacctctagttgatattctcaataagggtatgagtacatcagaggatacagctgcggctgcttctatggcctttaagtacatatgtgaagattgtaggacgaagttctcagggtccctggatggcctcttccagatataccatattgcaatcagtggagttggtggttataaagtttcttcagaggactcgttgcatttggttgaagccctaagtgtgattatcacaacgcttccaccagaatctgctagtagagccctggagttaatctgccagccagtaatcaatcccttgcaagaatttatccagcagggtgatcaagttcttcaacgagtccctgctcggcatttaactgtacatatagaccgactatcaagcattttcagtaatgtgaaacaaccagaagttgttgctgaagctgtatatagatattggccgacactcaagagtatctttgatc

SEQ ID NO: 214609 - DNA, 2078 bp, Zea Mays
gccggactcgtgtgctcacattctcactagtttcaaattttcatctgttaaaccctacccacccggcgaatcccttgacaaatccaaccagcttgccggaggaatacaccgggaggtacgtcaaacggcggggagagggaggagtaggtcgctgagggagggttagagctgggcaaggccgtcgctgtcatggaggcgcaggcgacggcgacggtgaaggaggcgcttgcggcgctgtaccaccacccggacgacgccatccgcaccgccgcggaccgctggcttcaggagttccagcacacgctcgacgcctggcaggtagctgacagtttgcttcatgatgaaagcagtaatttggaaactctcatattctgttctcagacccttagaagcaaggtacaaagggactttgaagagttaccctcggaagcttttcgatcattacaggattctttatacgtattgctaaaaaagttcaataagggaccacaaaaagttagaacacagatttgtattgcaattgctgctctggctgtgcatgtacctgtagaggactggggagctggtggaattgtgaattggctaagtgatgaaatgaaaactcatccagaatttattccaggcttccttgaactgcttatagttttgccgcaggaaacttctagttataaaattgcggctcgtcctgaaaggcgcagacaatttgaaattgacctttgttcgtctgctaatgttgctattgatttattaactgcttgcatggccattgatcagctgaaagagcaggttttggagggattttcttcttggcttcgtttctgtcatggaatctctgcctctgaactcgcatcacatcctttggtccatctggcactctcttcattgaactctggtcaattcttggaggcagctgtaaatgttacatctgaactgatacatgctactgtatctcatggcgctggtactatggctgagcaagtgccactcattcaaattcttgtccctcatattatgggtctgaaagagcagctcaaagatccatctaaggatgaagaagatgtaaaagctattgctcgtttatatgcagacatgggtgaatcctatgttgacttgattgccacagggactctgatgtatcatatggattagatgtgacggttgaaattgagaaaaacagaagattacaaatatttcgtccaaagtttgaaactctggtgtctctggtcagttttcgagttgaataccctgaggactaccacaccttttccgaggaagaccgcaaggattttagacatgttagatatgctgttagtgatgtgctacttgatgcaactgaagttcttgggggtgactcgacgctaaaactactttccaccaagcttgctcaggcatatgggagctgcaacaatgagcagaactccaagtggcaacctgtagaggctaccctgttttgtatacaagcaattgctagatcagtctcaattgaggagcgagaaattttaccacagattatgtcactgcttccctgccttcctcaacatgagcagttgctacaaacagtttgtttgaccattggagcattttcaaaatggattgatgctgcaccagctgaattatctattctaccacctctagttgatattctcaataagggtatgagtacatcagaggatacagctgcggctgcttctatggcctttaagtacatatgtgaaggacgaagttctcagggtccctggatggcctcttccagatataccatattgcaatcagtggagttggtggttataaagtttcttcagaggactcgttgcatttggttgaagccctaagtgtgattatcacaacgcttccaccagaatctgctagtagagccctggagttaatctgccagccagtaatcaatcccttgcaagaatttatccagcagggtgatcaagttcttcaacgagtccctgctcggcatttaactgtacatatagaccgactatcaagcattttcagtaatgtgaaacaaccagaagttgttgctgaagctgtatatagatattggccgacactcaagagtatctttgatc

SEQ ID NO: 214610 - DNA, 3612 bp, Zea Mays
gccggactcgtgtgctcacattctcactagtttcaaattttcatctgttaaaccctacccacccggcgaatcccttgacaaatccaaccagcttgccggaggaatacaccgggaggtacgtcaaacggcggggagagggaggagtaggtcgctgagggagggttagagctgggcaaggccgtcgctgtcatggaggcgcaggcgacggcgacggtgaaggaggcgcttgcggcgctgtaccaccacccggacgacgccatccgcaccgccgcggaccgctggcttcaggagttccagcacacgctcgacgcctggcaggtagctgacagtttgcttcatgatgaaagcagtaatttggaaactctcatattctgttctcagacccttagaagcaaggtacaaagggactttgaagagttaccctcggaagcttttcgatcattacaggattctttatacgtattgctaaaaaagttcaataagggaccacaaaaagttagaacacagatttgtattgcaattgctgctctggctgtgcatgtacctgtagaggactggggagctggtggaattgtgaattggctaagtgatgaaatgaaaactcatccagaatttattccaggcttccttgaactgcttatagttttgccgcaggaaacttctagttataaaattgcggctcgtcctgaaaggcgcagacaatttgaaattgacctttgttcgtctgctaatgttgctattgatttattaactgcttgcatggccattgatcagctgaaagagcaggttttggagggattttcttcttggcttcgtttctgtcatggaatctctgcctctgaactcgcatcacatcctttggtccatctggcactctcttcattgaactctggtcaattcttggaggcagctgtaaatgttacatctgaactgatacatgctactgtatctcatggcgctggtactatggctgagcaagtgccactcattcaaattcttgtccctcatattatgggtctgaaagagcagctcaaagatccatctaaggatgaagaagatgtaaaagctattgctcgtttatatgcagacatgggtgaatcctatgttgacttgattgccacaggctcagacgattcaattcaaatagtgaacgcattactagaagttacttctcttctcgaatttgccatttcctccatgacgtttaatttctggcattgccttaagcgtaacctcattcgaagggactctgatgtatcatatggattagatgtgacggttgaaattgagaaaaacagaagattacaaatatttcgtccaaagtttgaaactctggtgtctctggtcagttttcgagttgaataccctgaggactaccacaccttttccgaggaagaccgcaaggattttagacatgttagatatgggccattcgtgtttcagctgttagtgatgtgctacttgatgcaactgaagttcttgggggtgactcgacgctaaaactactttccaccaagcttgctcaggcatatgggagctgcaacaatgagcagaactccaagtggcaacctgtagaggctaccctgttttgtatacaagcaattgctagatcagtctcaattgaggagcgagaaattttaccacagattatgtcactgcttccctgccttcctcaacatgagcagttgctacaaacagtttgtttgaccattggagcattttcaaaatggattgatgctgcaccagctgaattatctattctaccacctctagttgatattctcaataagggtatgagtacatcagaggatacagctgcggctgcttctatggcctttaagtacatatgtgaagattgtaggacgaagttctcagggtccctggatggcctcttccagatataccatattgcaatcagtggagttggtggttataaagtttcttcagaggactcgttgcatttggttgaagccctaagtgtgattatcacaacgcttccaccagaatctgctagtagagccctggagttaatctgccagccagtaatcaatcccttgcaagaatttatccagcagggtgatcaagttcttcaacgagtccctgctcggcatttaactgtacatatagaccgactatcaagcattttcagtaatgtgaaacaaccagaagttgttgctgaagctgtatatagatattggccgacactcaagagtatctttgatcaacgagcatgggatacccgtaccatggagtcaatatgccgatcttgcaaatttgctgtaaggacatgtggaaggttcatgggaatgacgattggtgcaatgcttgaagaaatccaaactctctaccaacaacacaaacagtcttgcttcctttacttgtccagtgaagttatcaagatttttggatctgatccatcttgtgcgggctatcttactagcttgatacaaatacttttcagccatacagtgcagcttctcagaacgattcaagattttacagccagaccagatatagctgatgattgctatttgttagcatcaagatgtattcgttactgtcctgatctgtttatacctacagaaacgtttcaaagattggttgactgcgcaatggctggtataactatacatcacagggaagcctgtaaatcgatcttgtcttttctatctgatgtcattgatcttccaaactcatctggcgggggacagtaccgtgaagttattaacacaatcatacttcagcgtggtacaacccttactagaataatgattgctgccttaacaggggcgctaccatctggtcgtctggaggaggtttcatatgttctgctgtcacttagcagagcctttggtgaggatatgctgaactgggcaagggaaagcattaatcttataccaccacaagccttaacggatgctgaacgtttgcgattcttcaacatcatatctgatgctacttccgggtctagtcttcataacataacagatagattcggagaaatctcagatatctgtagacgaaacaaaacagtgcaagacctagttcaaagtgccttgcggcctcaggatttgaccgtcacggtggttcgacaacagatgtgataactggatgtctctgcaaggcaagtttagaaagccagtgagtcagtgttgattgaagactcacgtcatcttgggaattttttcttagttcatacaggtttgagttgcggcggcatacagttcagatttgttcagagcatagataggccagttagcattgtaattctttcgtgtttcccctttgtacatgtgccacaaattgtgtatttggggagggagataagttgtgttgtattatctcaaaaaacagtgttatacttggtataactggcagatcatgaggtatggtgatctaccgtgggcctgattttgcgttggccgttcagcttctttttgtaaagtagggtggccatcgattttattatgtaagcttataccggttgttaaagaaaattctagtctgtgttcccttatggtcaccaaatgtaatggccctaaaggtaattcaagtttgatgattagaacttgtgcaattttaagctcaccttgaatcgtgggcagaagtttg

SEQ ID NO: 214611 - DNA, 334 bp, Zea Mays
gtgtgctcacattctcactagtttcaaattttcatctgttaaaccctacccacccggcgaatcccttgacaaatccaaccagcttgccggaggaatacaccgggaggtacgtcaaacggcggggagagggaggagtaggtcgctgagggagggttagagctgggcaaggccgtcgctgtcatggaggcgcaggcgacggcgacggtgaaggaggcgcttgcggcgctgtaccaccacccggacgacgccatccgcaccgccgcggaccgctggcttcaggagttccagcacacgctcgacgcctggcaggacttctatgcgagctcgatgtgat

SEQ ID NO: 214612 - DNA, 2927 bp, Zea Mays
tatcaagaaaagaaaaagaaaatgcagctaatttgaggtgaccgcgttgttctgtatccctgcctccctggtcatttcttcttttccgtcaaccttctttctcgcgcccaaacaggagttctctcgttctaaaaaaagattgcgaaaggacatgaatcccatgaggatcgagcatatggaggagcctagttcttgatccaatctcccagcatgcttgacgaacgcgaagacgaacgtggggcgaacgctgcatgctaacgcggaagatggaggagcgcgtcgggtgcagcaatgccgcgacgtccttcgacgactccgccaccggcaggacggcgggcgccgcggcggcgcagtgctccacggtgtcggtgttcctcgccaagatcaacggcgccgcgcgccacgtcaccgccgtctggagcaagagcctcatcaaccagtccttcaccgtctccatcgaacggccgggcgacggcgacgggccggtcacccacagggtggagctgaagccgtggccgttctggagcaagaagggcggcaaggcgctcgacgtgggcggcggcgaccgcgtcgacatgttctgggacctgcgctcggccaagttcgcggcggcgggcagcagcccggagcctgccggcggctactacgtcgcgctggtcagcaacgacgaggtcgtcctcctgctcggcgactgcaagaaggacgcgtacaagcggaccaaggcccgcccgtcgctggaggacgccgtgctggtgtgccgccgggagagcgtgttcggccgccgcagcttcgcggcgcgcgcgcggctcgacgccaggaggagcaaggagcatgagatcgtcatcgagtacgcgctcgccgccgcgggctccagcagggacccggagatgtggatcacggtggacggctccgtgctgctgcatgtcaagagccttcagtggaagttccggggcaatgagacgctgctcgtcgacgaggagccggtgcaggtcatctgggacgtgcacgactggctcttcgccgggccgggcacgcaggcagtcttcgtcttcaagcccggcgcaccgccggagatccaagaggacagcggagggaacgccatccagggtgacgggactgacttctgcttcttccttcaggcatggaggacggaatgaggcggtgaaatttgaagggcaaggcaatgatcttgtcctcgcgctactgatctgttgatgtgaatgacattgaaagcgtatccagctttacaaatttgtaaccaggaacacttcgtcaatccaagtttctgtcactggaaatttaatccaagcacacaagatatacaactttctttttacactgcaatggaactgacgtaagatatcaggtacgtaagcaactgcgaagtgtttataactcatagcagatacaacaagagcacaagattcatatcgttggccctgatggccacatacattcactccaccagaaaagctgtgtagagcccaaagaactgcttattctagaacaagtcatgactatcatcatagcaactaatctctactctccatctctcccttgttaccaacgtagctgtgaactagtctatttcctccatctgcacagtggcactgcaatgtgcaatctcaaatacctgaacatggcaacaaaaatatgaaacaaaaaagaaggcgtgatgtctagatgatcatctatcattcactccatcacagcaacaccgccagctgcctttatctttgctatgatcgcttccgcttcctcctttgtgagcgattgcttcagaacgactggggccttctccaccagctccttggcctccttcagccccagatccgtaaacgtcctgatctccttgatgatcttgatcttcgcagcagcgtcgaacttctccaacctgacgtcgaagactgtcttctcggctttcttctcagcctttccagaacctgccccagagccgacctgggcaccgaaaccgaaaccctggccagataccgcctgtggcggctcctggttcagtctgaggagaagggctggagcaatctgtttgatctcctcgggagggagagcagcgatgcgatcagctagttccacgactttctccgaaggcggcggcataggcccgtaggggtcgtatacatcggggtacttgtacttcttagcacccatgtcctttgcagcctcagtgctgtatagatgagcccaaattgctgaaagacgactgccagaggatggttttgaaagacatagccgtcgtgctattgtacagagactcatcctaatatcagttattcagttatgtgagcgcaatattcttctcctgcaccataacaagcaagaatcagtacaaaatgagactttgaagaaaaacttccagatcagattgcaccctgaatccatgaacatctcgtagcatgcatatataagcatgtataggcatggtagtttaaagggatcagctacatataagtcacaaagccagtactgctagcgctaggtgacgttccggatcggagtcgccattttacaagtttttaaggtatctcatttaaaccaataaatagcataataagttaataacttgcgccagaaatgtatctctttcatatcaaaatttccccatccttttcccaacctcccagtttctgactttctgtaatctgcaccgggagcacaccgatatgcagtgcagcgagagcaacaaatacagcgaaactgcccaaggtcatctattcacgagcacgggatgatccagtacaggacatctgtggacatatgtgcaaccgataaagtttttttctcaaaaaaaaaacgaagtttctgcgtgtatacaaaacgtacgtatacgactgcgtcagatcccaatacacggagattaaggtttagggtttgggttactcggtttcggacagagcggggagggaagagac

SEQ ID NO: 214613 - DNA, 1203 bp, Zea Mays
ccacaattcccactacccaaaaagctaggtgctggcgccaagcaaagagcttgcctgaaatatggatctggatgaccaagtgcaatagaaatagttttagggtggagaaatgattgggactgatacctgatctatatttttcccttttgtgtgcacacatcttagctagcaatgcatgtattttatataacttctgttgctccttaatatcaggttggtcgtaccacagtcaaatctacagaagacctgattcttggcgttcccttgataactgtcaatctgttggacttgtacttaagtctcatgtatacacaattatacatatgaatatgttttggtgacacttttgttactgaggacactacaaatgtgatgtttcctcgggaagtaacagttccaggctatacacacccattggttgcagttggcacaggttacagagaaaagttttttgtcaaagtatatgctgccgcgttctatgtagattactcacttcgccttgatactgagcaatggaaagcaaagactggtattgagagctttgacagttcctctgttttcgactccatttttaaggcaccggttgtgaaatcattgagtataattcttgttagagccgttgatggcaagacctttgtgaatgctctaaatgatgtcattgcccgccaaataaaaaacccaaacgccgaggaagaatcttccctgtcaaccttgcagaatacctttcttgggcgcaatctcaaacagggaacaagcatatacttaacttggcttgaacccaaaagaatgctgatctccatttcggaagatgaagatccacgtcaagttgatgcagagatcaaatctgctactgttaattatgctctatatgatggcttctttggtaaatccacagtgtgcccttctttaagatcatctacagcccagttgctggacgcgcttctgcttgcgaagtgacaaaccagtcgtggttccatatcaatggttacgagtggttattcccttctcccttgttttcccgagggaacacaggacgggctaggtgtccataatcataagtcccataaaggaaattaatttaattattatagagttcatatgtaacatttttgtcgtccctgatgaaatatggtgaatttgtcacgcccctatgctgatattatgattggcagattgctttaggtagtgtttggttgaggagcc

SEQ ID NO: 214614 - DNA, 559 bp, Zea Mays
ggagtactcttgggggagataggcgttcgcttcatgcttatccaacagattggtgacacttttgttactgaggacactacaaatgtgatgtttcctcgggaagtaacagttccaggctatacacacccattggttgcagttggcacagatctccatttcggaagatgaagatccacgtcaagttgatgcagagatcaaatctgctactgttaattatgctctatatgatggcttctttggtaaatccacagtgtgcccttctttaagatcatctacagcccagttgctggacgcgcttctgcttgcgaagtgacaaaccagtcgtggttccatatcaatggttacgagtggttattcccttctcccttgttttcccgagggaacacaggacgggctaggtgtccataatcataagtcccataaaggaaattaatttaattattatagagttcatatgtaacatttttgtcgtccctgatgaaatatggtgaatttgtcacgcccctatgctgatattatgattggcagattgctttaggtagtgtttggttgaggagcc

SEQ ID NO: 214615 - DNA, 703 bp, Zea Mays
ggagtactcttgggggagataggcgttcgcttcatgcttatccaacagattggtgacacttttgttactgaggacactacaaatgtgatgtttcctcgggaagtaacagttccaggctatacacacccattggttgcagttggcacaggttacagagaaaagttttttgtcaaagtatatgctgccgcgttctatgtagattactcacttcgccttgatactgagcaatggaaagcaaagactggtattgagagctttgacagttcctctgttttcgactccatttttaaggatctccatttcggaagatgaagatccacgtcaagttgatgcagagatcaaatctgctactgttaattatgctctatatgatggcttctttggtaaatccacagtgtgcccttctttaagatcatctacagcccagttgctggacgcgcttctgcttgcgaagtgacaaaccagtcgtggttccatatcaatggttacgagtggttattcccttctcccttgttttcccgagggaacacaggacgggctaggtgtccataatcataagtcccataaaggaaattaatttaattattatagagttcatatgtaacatttttgtcgtccctgatgaaatatggtgaatttgtcacgcccctatgctgatattatgattggcagattgctttaggtagtgtttggttgaggagcc

SEQ ID NO: 214616 - DNA, 5161 bp, Zea Mays
gaaaaatccgctacgtacaagtcgaccgagtgaggaagttgaactaattgccgagcgaagaagcaaaaatcatatcaatagccatagaagcacatcattagtcttgcgcttttcactagtttggattcggacttcctgagctccgccgattccttcctcctccacctcctctcctcccccagccgccgccgctgctcatcttatctttatctcatccccatcgcccgcccttgctccgcccccgggaatcgtcgatggcggcgtcggcgttgtggcagccgcaggagcaggggctccgcgagatctgcgcccacctggaggcgcatatctcacccaactctgaccaggcccgcatctggcagcagctccagcagtacagccagttccccgacttcaacaattacctactcttcatcctggcccgcggagaggggaaatctattgaagttagacaggcagctggtctattactgaaaaacaatctgcgaacgacttacatttccatgcaatcttcatcccagcattatgttaagtctgagctgttaccatgtataggggcaaccaatagggcaattagatccacagttggaacagtgatcagtgtgcttttccaaattgtacgagttgctggatggattgagttgtttcaggcactccataagtgtttggagagtaatgacctggatcacatggaaggtgctatggatgcgatatacaagatctgtgaggatgtccctgaagagcttgatgttgatgttcctggtttgtctgaacgaccgatcaacgtgtttatgccaagaatactgcagtttttccagtcaccacatgcaagtttgagaaaactatcattgggtatcataaaccagtacatagtagtgatgccatcggcactctacatgtctatggatcagtatattcagggattattcaaccttgcaaaggactcttcagcagatgttcggaaactggtttgttcagcctgggttcagctcattgaagttcgcccatcaattttggagccacatcttaaaaatgttactgaattgattctgcaagctaataaagattcagatgatgaagttgctctggaagcttgtgagttctggtctgcatactgtgatgtgagcatgcctcctgaaggtttacaggagttcttgccgcacttaatcccgactttgttgtcgaacatggtatatgctgacggcgatgagtcccttgatgatgctgaggaagatgaatcctttccagacagggaccaggatttgaagccccgcttccatgattctcgattgcatggatcggaaactggagatgacgatgatgatgctgatgctgtaaatgtctggaacctgcggaagtgtagtgctgctgggttggatgttctctctaatgtgtttggtgacagcatccttccaactttaatgccattgattgagcaaaacttggctcgaacagatgatgattcttggaaggagagggaaactgctgttttatgtctaggcgctatagcagaggggtgcattagtggtctatacccacaccttcctcagattgttgcctttctaatcccacttcttgatgataaatttcctcttatacggagtattacgtgttggacgctctctcgatacagcaaattcattgttcagagccttgatcatccaaatggacgcggacaatttgataagattcttatgggagtgctcagaaggatattggatactaacaaaagagtgcaagaggctgcttgttcggcgtttgcaatccttgaagaggaagcttctgaagaattagtaccccatttggaagtaattttgcagcacctcatgtgtgcctatagaaaataccagagacgaaatctccggatactctatgacgccctcggtaccctggctgatgctgttggagcagaattaaatcaggcaaaatatctagacatatttatgccgcctttaatcacaaagtggcagcaactttccaattatgacaaagatctatttccactccttgaatgctttacatctatcgcacaggcattgggaccaggatttgctcagtttgcggaaccagtgtttcaaaggtgcattaatcttatccattcgcaacagttgtcaaagattgatcctactgcagctggtgcggtgtatgatagagaattcattgtttgttcgttggacctactatcaggacttgcagaaggtcttggcgctggtattgaaagtcttgtaagttcttgtctttgcatatggtatcattttcctttccaagtacattttagacatgatcacacaaacacaccactcacatacccacatgggtgcgtcaggggtggagttcaattatttaatcactgggttcaatcatactatcatattggggccatgctgaatatgtacttagaggaagaatttgctattgttaaaggggaactatagtgtattaaacaaaagtcatcagggccagctggctctgatggaagcacgtagctccgcccctggggtgtatcctagcacacatctaaactagggaggcctactcacagaatgtatcacatgcgatgatgtgagccttaagatctgagtgggttaaatcctaaacaactgactacacttggttctctttcggtagtatctgatgtttttgctgtatacgcatgaatctcttattccatttgaacttgttaatgtgagacaatacactgattgttccaatatctactgtattgtttacagaaactatcagttctgttacatggggctgtaccatgggtgccgagtagattgtccagctggtaattttgctggtagctgagtttaggcatttttaaacaagttccaattttgtctgtatagcatgtagcctggatgaatgttaggtgcgactcctcaggcttgagatctcacttctcactggaatacctggatatgtttttcttttccaatagaaagagttagttccacttgttatgttggttttaccaatgactgtcatatagcgaagtctgagtttattgaaactaagtgctgatgctcggccatgatactgtgcagtaataaaattgaattaaatccttccatctctcacccctctccaacctgtctatccgtccttcgacccaccatctttcactattacctttctagcattgagtttgggcttgcaaaaccttcgccgcaccattcatgtcatggcctggctgcctgagaccgtgtgcattgtggcacacctatggacatgtggttcgacttccacctttcttaaactcggagcaggtgcacacaatagccacccatttgagttgagcgctgaacctctctatggccagtatagtggccatgtgcaattctgctcaggtgaacagtgcgcgtgcattcctgttcacaacgggctcaaggtgggtatgttgcccgtttgttggttagagattagaccagattgcgctgttttctatttccttaatccaagagagctttattcaaggtcaagtctttccatgtcactaagcaaggaatagattgaagtttctagttacctccctgccctttgtggggtatagtcacactattgtggatttgtggtttagagccaaataaagtatggctgtgacatctgcactttcttgaagggcaattactctgaagaattttcctttgtttgctgattatacttaaaattttagtaccaaatatgcataagttcgataggtatcttttctttgttgtaggttgcacagagcaatttgagagatctacttttgcaatgctgcatggatgaagcagctgatgttcgacaaagtgcccttgcacttcttggagacctttctagggtttgcccaatacatttgcatccacgccttcaagaatttcttactgttgcagcgaagcaactgaaccctcaatctgtgaaggatgcggtatcagtagctaacaatgcttgttgggctattggagaattagcaatcaagattggcaaagaaatagcgcctgtggtgatcaccgttgtttcgtgcttggttcccattctaaaatccccagagggttcgaacaagtcacttgttgaaaacagcgcgatcactcttgggaggcttagctgggtgtgtccagacatcgtggcccctcatatggagcatttcatgcaagcatggtgcaaggcgttgtgcatgatcagagatgattttgagaaagaggactcgtttcatggattgtgtgcaatggtggcagcaaaccctacaggaggcgccggttcattagcttacatctgccaggcctgtgcgagttggactgagataaaaagtgaaggtcttcacaatgaggtgtgccagattctgaatggctacaagcagctgcttggaaacggtgggtgggaacaatgcatggccaccctgcaaccggatgttgtgcagaaattagctagatacggagtatgatggcagtggtcgtgtggtttcatcatctttttacgctggagacagagatcaggatggttggttgggtcacttgctcgtccctcccgcctcccagtcccaggcaaggcgacattgatgaaagaaaggtttttgtagcgtgtaattcttttcttcctcttcctcttagcagcaacaccaagcttttcatggatttcagttggcctgcattaaacatattaacatgtaaggattcgaggaacacatggtggaacacaaaatgcaaaaaagtagggaaaggtaattgttgggggccttcgtcttccaaaggtcctcaaaaacacgactaacatgtttttcaagtataatatactgttacaggaaccttcgactttgagatgaagatgcgcacggtatgaaaggcacggtctggaagattgatgaatcagttccgaagctatggatgaagaagcttcggcttagcgcaaagacggtgatggagaatgaaaccgacctaaaggggaaaagactgcttagtcctcgacagattactccttagtcaatagtaaatgtcaaggacatgaatgtaattttacccaggctgcgtcctgtgcctataaatagatgaacagtaacacaatattgttcacgctgatttgtaatcactcgcacgtcgctcttggattcttacattctgtcaagccgaagatacaaatgtaattcaatattattaatgtttgttcatgatcatataatgag

SEQ ID NO: 214617 - DNA, 5005 bp, Zea Mays
ctacgtacaagtcgaccgagtgaggaagttgaactaattgccgagcgaagaagcaaaaatcatatcaatagccatagaagcacatcattagtcttgcgcttttcactagtttggattcggacttcctgagctccgccgattccttcctcctccacctcctctcctcccccagccgccgccgctgctcatcttatctttatctcatccccatcgcccgcccttgctccgcccccgggaatcgtcgatggcggcgtcggcgttgtggcagccgcaggagcaggggctccgcgagatctgcgcccacctggaggcgcatatctcacccaactctgaccaggcccgcatctggcagcagctccagcagtacagccagttccccgacttcaacaattacctactcttcatcctggcccgcggagaggggaaatctattgaagttagacaggcagctggtctattactgaaaaacaatctgcgaacgacttacatttccatgcaatcttcatcccagcattatgttaagtctgagctgttaccatgtataggggcaaccaatagggcaattagatccacagttggaacagtgatcagtgtgcttttccaaattgtacgagttgctggatggattgagttgtttcaggcactccataagtgtttggagagtaatgacctggatcacatggaaggtgctatggatgcgatatacaagatctgtgaggatgtccctgaagagcttgatgttgatgttcctggtttgtctgaacgaccgatcaacgtgtttatgccaagaatactgcagtttttccagtcaccacatgcaagtttgagaaaactatcattgggtatcataaaccagtacatagtagtgatgccatcggcactctacatgtctatggatcagtatattcagggattattcaaccttgcaaaggactcttcagcagatgttcggaaactggtttgttcagcctgggttcagctcattgaagttcgcccatcaattttggagccacatcttaaaaatgttactgaattgattctgcaagctaataaagattcagatgatgaagttgctctggaagcttgtgagttctggtctgcatactgtgatgtgagcatgcctcctgaaggtttacaggagttcttgccgcacttaatcccgactttgttgtcgaacatggtatatgctgacggcgatgagtcccttgatgatgctgaggaagatgaatcctttccagacagggaccaggatttgaagccccgcttccatgattctcgattgcatggatcggaaactggagatgacgatgatgatgctgatgctgtaaatgtctggaacctgcggaagtgtagtgctgctgggttggatgttctctctaatgtgtttggtgacagcatccttccaactttaatgccattgattgagcaaaacttggctcgaacagatgatgattcttggaaggagagggaaactgctgttttatgtctaggcgctatagcagaggggtgcattagtggtctatacccacaccttcctcagattgttgcctttctaatcccacttcttgatgataaatttcctcttatacggagtattacgtgttggacgctctctcgatacagcaaattcattgttcagagccttgatcatccaaatggacgcggacaatttgataagattcttatgggagtgctcagaaggatattggatactaacaaaagagtgcaagaggctgcttgttcggcgtttgcaatccttgaagaggaagcttctgaagaattagtaccccatttggaagtaattttgcagcacctcatgtgtgcctatagaaaataccagagacgaaatctccggatactctatgacgccctcggtaccctggctgatgctgttggagcagaattaaatcaggcaaaatatctagacatatttatgccgcctttaatcacaaagtggcagcaactttccaattatgacaaagatctatttccactccttgaatgctttacatctatcgcacaggcattgggaccaggatttgctcagtttgcggaaccagtgtttcaaaggtgcattaatcttatccattcgcaacagttgtcaaagattgatcctactgcagctggtgcggtgtatgatagagaattcattgtttgttcgttggacctactatcaggacttgcagaaggtcttggcgctggtattgaaagtcttaaactatcagttctgttacatggggctgtaccatgggtgccgagtagattgtccagctggtaattttgctggtagctgagtttaggcatttttaaacaagttccaattttgtctgtatagcatgtagcctggatgaatgttaggtgcgactcctcaggcttgagatctcacttctcactggaatacctggatatgtttttcttttccaatagaaagagttagttccacttgttatgttggttttaccaatgactgtcatatagcgaagtctgagtttattgaaactaagtgctgatgctcggccatgatactgtgcagtaataaaattgaattaaatccttccatctctcacccctctccaacctgtctatccgtccttcgacccaccatctttcactattacctttctagcattgagtttgggcttgcaaaaccttcgccgcaccattcatgtcatggcctggctgcctgagaccgtgtgcattgtggcacacctatggacatgtggttcgacttccacctttcttaaactcggagcaggtgcacacaatagccacccatttgagttgagcgctgaacctctctatggccagtatagtggccatgtgcaattctgctcaggtgaacagtgcgcgtgcattcctgttcacaacgggctcaaggtgggtatgttgcccgtttgttggttagagattagaccagattgcgctgttttctatttccttaatccaagagagctttattcaaggtcaagtctttccatgtcactaagcaaggaatagattgaagtttctagttacctccctgccctttgtggggtatagtcacactattgtggatttgtggtttagagccaaataaagtatggctgtgacatctgcactttcttgaagggcaattactctgaagaattttcctttgtttgctgattatacttaaaattttagtaccaaatatgcataagttcgataggtatcttttctttgttgtaggttgcacagagcaatttgagagatctacttttgcaatgctgcatggatgaagcagctgatgttcgacaaagtgcccttgcacttcttggagacctttctagggtttgcccaatacatttgcatccacgccttcaagaatttcttactgttgcagcgaagcaactgaaccctcaatctgtgaaggatgcggtatcagtagctaacaatgcttgttgggctattggagaattagcaatcaagattggcaaagaaatagcgcctgtggtgatcaccgttgtttcgtgcttggttcccattctaaaatccccagagggttcgaacaagtcacttgttgaaaacagcgcgatcactcttgggaggcttagctgggtgtgtccagacatcgtggcccctcatatggagcatttcatgcaagcatggtgcaaggcgttgtgcatgatcagagatgattttgagaaagaggactcgtttcatggattgtgtgcaatggtggcagcaaaccctacaggaggcgccggttcattagcttacatctgccaggcctgtgcgagttggactgagataaaaagtgaaggtcttcacaatgaggtgtgccagattctgaatggctacaagcagctgcttggaaacggtgggtgggaacaatgcatggccaccctgcaaccggatgttgtgcagaaattagctagatacggagtatgatggcagtggtcgtgtggtttcatcatctttttacgctggagacagagatcaggatggttggttgggtcacttgctcgtccctcccgcctcccagtcccaggcaaggcgacattgatgaaagaaaggtttttgtagcgtgtaattcttttcttcctcttcctcttagcaggtgagtccaaaattacattaccaattcatttttgcccaataataaaagatgaagatccatgggatttgtttatcccccactcccttgtttctgttactaaccatcttcggcagcctattcatacccttgtttgtagtacaatctacaatacaaaacggtgacatttttagagaccatagatatgggtgaactagaactactactatacactgtggtcggtcaccgtttgttttgcactgtagattgtactgtttgtaaagtgtagattagatatagactagtcatatgcccgtacattgctacggtttttatatataacatagaatagatctctattatattaaaggatcagtttcaatggtcgttttgcgtcaatatttttttaaaaaaacatctatatttctttagaatcaacctgcactcctataatatcttctctactactataatatgagagtttatataaaaaataaggtgaaatcatgtataagttagtgtttgaaccttgttggctctacattcacacccacataatcaataacatatattttatgttttattaaaataaaatttattctatgttatatataaaaaccgtagcaatgcacggccatataactagtccatatttaatctacactcttaaggtgtttttttgaaaaatattgatgaaaccacacgaccaaggtataccagttggttgtccgtgcattaccacggctcacaataatatccacgtaaactatccaccaaaaagatcctaagatttttttattgattgtctctactctccgcataatatttttttatttgactaattaatattgtttacttcatccaatatgtcttggtacaacacagccaataaaaggatcgattataatagagttcacaacgattgactgaatgtatggagattatataatg

SEQ ID NO: 214618 - DNA, 3561 bp, Zea Mays
gtcgaccgagtgaggaagttgaactaattgccgagcgaagaagcaaaaatcatatcaatagccatagaagcacatcattagtcttgcgcttttcactagtttggattcggacttcctgagctccgccgattccttcctcctccacctcctctcctcccccagccgccgccgctgctcatcttatctttatctcatccccatcgcccgcccttgctccgcccccgggaatcgtcgatggcggcgtcggcgttgtggcagccgcaggagcaggggctccgcgagatctgcgcccacctggaggcgcatatctcacccaactctgaccaggcccgcatctggcagcagctccagcagtacagccagttccccgacttcaacaattacctactcttcatcctggcccgcggagaggggaaatctattgaagttagacaggcagctggtctattactgaaaaacaatctgcgaacgacttacatttccatgcaatcttcatcccagcattatgttaagtctgagctgttaccatgtataggggcaaccaatagggcaattagatccacagttggaacagtgatcagtgtgcttttccaaattgtacgagttgctggatggattgagttgtttcaggcactccataagtgtttggagagtaatgacctggatcacatggaaggtgctatggatgcgatatacaagatctgtgaggatgtccctgaagagcttgatgttgatgttcctggtttgtctgaacgaccgatcaacgtgtttatgccaagaatactgcagtttttccagtcaccacatgcaagtttgagaaaactatcattgggtatcataaaccagtacatagtagtgatgccatcggcactctacatgtctatggatcagtatattcagggattattcaaccttgcaaaggactcttcagcagatgttcggaaactggtttgttcagcctgggttcagctcattgaagttcgcccatcaattttggagccacatcttaaaaatgttactgaattgattctgcaagctaataaagattcagatgatgaagttgctctggaagcttgtgagttctggtctgcatactgtgatgtgagcatgcctcctgaaggtttacaggagttcttgccgcacttaatcccgactttgttgtcgaacatggtatatgctgacggcgatgagtcccttgatgatgctgaggaagatgaatcctttccagacagggaccaggatttgaagccccgcttccatgattctcgattgcatggatcggaaactggagatgacgatgatgatgctgatgctgtaaatgtctggaacctgcggaagtgtagtgctgctgggttggatgttctctctaatgtgtttggtgacagcatccttccaactttaatgccattgattgagcaaaacttggctcgaacagatgatgattcttggaaggagagggaaactgctgttttatgtctaggcgctatagcagaggggtgcattagtggtctatacccacaccttcctcagattgttgcctttctaatcccacttcttgatgataaatttcctcttatacggagtattacgtgttggacgctctctcgatacagcaaattcattgttcagagccttgatcatccaaatggacgcggacaatttgataagattcttatgggagtgctcagaaggatattggatactaacaaaagagtgcaagaggctgcttgttcggcgtttgcaatccttgaagaggaagcttctgaagaattagtaccccatttggaagtaattttgcagcacctcatgtgtgcctatagaaaataccagagacgaaatctccggatactctatgacgccctcggtaccctggctgatgctgttggagcagaattaaatcaggcaaaatatctagacatatttatgccgcctttaatcacaaagtggcagcaactttccaattatgacaaagatctatttccactccttgaatgctttacatctatcgcacaggcattgggaccaggatttgctcagtttgcggaaccagtgtttcaaaggtgcattaatcttatccattcgcaacagttgtcaaagattgatcctactgcagctggtgcggtgtatgatagagaattcattgtttgttcgttggacctactatcaggacttgcagaaggtcttggcgctggtattgaaagtcttgttgcacagagcaatttgagagatctacttttgcaatgctgcatggatgaagcagctgatgttcgacaaagtgcccttgcacttcttggagacctttctagggtttgcccaatacatttgcatccacgccttcaagaatttcttactgttgcagcgaagcaactgaaccctcaatctgtgaaggatgcggtatcagtagctaacaatgcttgttgggctattggagaattagcaatcaagattggcaaagaaatagcgcctgtggtgatcaccgttgtttcgtgcttggttcccattctaaaatccccagagggttcgaacaagtcacttgttgaaaacagcgcgatcactcttgggaggcttagctgggtgtgtccagacatcgtggcccctcatatggagcatttcatgcaagcatggtgcaaggcgttgtgcatgatcagagatgattttgagaaagaggactcgtttcatggattgtgtgcaatggtggcagcaaaccctacaggaggcgccggttcattagcttacatctgccaggcctgtgcgagttggactgagataaaaagtgaaggtcttcacaatgaggtgtgccagattctgaatggctacaagcagctgcttggaaacggtgggtgggaacaatgcatggccaccctgcaaccggatgttgtgcagaaattagctagatacggagtatgatggcagtggtcgtgtggtttcatcatctttttacgctggagacagagatcaggatggttggttgggtcacttgctcgtccctcccgcctcccagtcccaggcaaggcgacattgatgaaagaaaggtttttgtagcgtgtaattcttttcttcctcttcctcttagcagcaacaccaagcttttcatggatttcagttggcctgcattaaacatattaacatgtaaggattcgaggaacacatggtggaacacaaaatgcaaaaaagtagggaaaggaaccttcgactttgagatgaagatgcgcacggtatgaaaggcacggtctggaagattgatgaatcagttccgaagctatggatgaagaagcttcggcttagcgcaaagacggtgatggagaatgaaaccgacctaaaggggaaaagactgcttagtcctcgacagattactccttagtcaatagtaaatgtcaaggacatgaatgtaattttacccaggctgcgtcctgtgcctataaatagatgaacagtaacacaatattgttcacgctgatttgtaatcactcgcacgtcgctcttggattcttacattctgtcaagccgaagatacaaatgtaattcaatattattaatgtttgttcatgatcatataatgag

SEQ ID NO: 214619 - DNA, 3970 bp, Zea Mays
agcgaagaagcaaaaatcatatcaatagccatagaagcacatcattagtcttgcgcttttcactagtttggattcggacttcctgagctccgccgattccttcctcctccacctcctctcctcccccagccgccgccgctgctcatcttatctttatctcatccccatcgcccgcccttgctccgcccccgggaatcgtcgatggcggcgtcggcgttgtggcagccgcaggagcaggggctccgcgagatctgcgcccacctggaggcgcatatctcacccaactctgaccaggcccgcatctggcagcagctccagcagtacagccagttccccgacttcaacaattacctactcttcatcctggcccgcggagaggggaaatctattgaagttagacaggcagctggtctattactgaaaaacaatctgcgaacgacttacatttccatgcaatcttcatcccagcattatgttaagtctgagctgttaccatgtataggggcaaccaatagggcaattagatccacagttggaacagtgatcagtgtgcttttccaaattgtacgagttgctggatggattgagttgtttcaggcactccataagtgtttggagagtaatgacctggatcacatggaaggtgctatggatgcgatatacaagatctgtgaggatgtccctgaagagcttgatgttgatgttcctggtttgtctgaacgaccgatcaacgtgtttatgccaagaatactgcagtttttccagtcaccacatgcaagtttgagaaaactatcattgggtatcataaaccagtacatagtagtgatgccatcggcactctacatgtctatggatcagtatattcagggattattcaaccttgcaaaggactcttcagcagatgttcggaaactggtttgttcagcctgggttcagctcattgaagttcgcccatcaattttggagccacatcttaaaaatgttactgaattgattctgcaagctaataaagattcagatgatgaagttgctctggaagcttgtgagttctggtctgcatactgtgatgtgagcatgcctcctgaaggtttacaggagttcttgccgcacttaatcccgactttgttgtcgaacatggtatatgctgacggcgatgagtcccttgatgatgctgaggaagatgaatcctttccagacagggaccaggatttgaagccccgcttccatgattctcgattgcatggatcggaaactggagatgacgatgatgatgctgatgctgtaaatgtctggaacctgcggaagtgtagtgctgctgggttggatgttctctctaatgtgtttggtgacagcatccttccaactttaatgccattgattgagcaaaacttggctcgaacagatgatgattcttggaaggagagggaaactgctgttttatgtctaggcgctatagcagaggggtgcattagtggtctatacccacaccttcctcagattgttgcctttctaatcccacttcttgatgataaatttcctcttatacggagtattacgtgttggacgctctctcgatacagcaaattcattgttcagagccttgatcatccaaatggacgcggacaatttgataagattcttatgggagtgctcagaaggatattggatactaacaaaagagtgcaagaggctgcttgttcggcgtttgcaatccttgaagaggaagcttctgaagaattagtaccccatttggaagtaattttgcagcacctcatgtgtgcctatagaaaataccagagacgaaatctccggatactctatgacgccctcggtaccctggctgatgctgttggagcagaattaaatcaggcaaaatatctagacatatttatgccgcctttaatcacaaagtggcagcaactttccaattatgacaaagatctatttccactccttgaatgctttacatctatcgcacaggcattgggaccaggatttgctcagtttgcggaaccagtgtttcaaaggtgcattaatcttatccattcgcaacagttgtcaaagattgatcctactgcagctggtgcggtgtatgatagagaattcattgtttgttcgttggacctactatcaggacttgcagaaggtcttggcgctggtattgaaagtcttgttgcacagagcaatttgagagatctacttttgcaatgctgcatggatgaagcagctgatgttcgacaaagtgcccttgcacttcttggagacctttctagggtttgcccaatacatttgcatccacgccttcaagaatttcttactgttgcagcgaagcaactgaaccctcaatctgtgaaggatgcggtatcagtagctaacaatgcttgttgggctattggagaattagcaatcaagattggcaaagaaatagcgcctgtggtgatcaccgttgtttcgtgcttggttcccattctaaaatccccagagggttcgaacaagtcacttgttgaaaacagcgcgatcactcttgggaggcttagctgggtgtgtccagacatcgtggcccctcatatggagcatttcatgcaagcatggtgcaaggcgttgtgcatgatcagagatgattttgagaaagaggactcgtttcatggattgtgtgcaatggtggcagcaaaccctacaggaggcgccggttcattagcttacatctgccaggcctgtgcgagttggactgagataaaaagtgaaggtcttcacaatgaggtgtgccagattctgaatggctacaagcagctgcttggaaacggtgggtgggaacaatgcatggccaccctgcaaccggatgttgtgcagaaattagctagatacggagtatgatggcagtggtcgtgtggtttcatcatctttttacgctggagacagagatcaggatggttggttgggtcacttgctcgtccctcccgcctcccagtcccaggcaaggcgacattgatgaaagaaaggtttttgtagcgtgtaattcttttcttcctcttcctcttagcaggtgagtccaaaattacattaccaattcatttttgcccaataataaaagatgaagatccatgggatttgtttatcccccactcccttgtttctgttactaaccatcttcggcagcctattcatacccttgtttgtagtacaatctacaatacaaaacggtgacatttttagagaccatagatatgggtgaactagaactactactatacactgtggtcggtcaccgtttgttttgcactgtagattgtactgtttgtaaagtgtagattagatatagactagtcatatgcccgtacattgctacggtttttatatataacatagaatagatctctattatattaaaggatcagtttcaatggtcgttttgcgtcaatatttttttaaaaaaacatctatatttctttagaatcaacctgcactcctataatatcttctctactactataatatgagagtttatataaaaaataaggtgaaatcatgtataagttagtgtttgaaccttgttggctctacattcacacccacataatcaataacatatattttatgttttattaaaataaaatttattctatgttatatataaaaaccgtagcaatgcacggccatataactagtccatatttaatctacactcttaaggtgtttttttgaaaaatattgatgaaaccacacgaccaaggtataccagttggttgtccgtgcattaccacggctcacaataatatccacgtaaactatccaccaaaaagatcctaagatttttttattgattgtctctactctccgcataatatttttttatttgactaattaatattgtttacttcatccaatatgtcttggtacaacacagccaataaaaggatcgattataatagagttcacaacgattgactgaatgtatggagattatataatg

SEQ ID NO: 214620 - DNA, 975 bp, Zea Mays
gtgtaagcagccttcaccgtaacacaaacccacgcggccacgccactctagctaccgagcgagccatgtcgcctgcgcggcctcctccgccttccgctcgcctccgcgccttcccccgcgatggagtcctcacctccttctatgccggtcgattccccagtatccctggatgccttaatcgccgatcctgcggccgcgccggccgcgtgtactgcctcttctctggcggtgataaccgcaagaaacaggatgaagctaggaaagcactggaaaatgccctagggaagaaggctgagtttgacaaatggggtgtggaaattgaaaggaggcaaaggggctaccctagagatcctgctgcttgtggtggaggatggtcaggaggaggcagctggtttaggcggcttactggtggaggtttctgggatgcagcaaaacaaactgttcttacaatccttggcattatcgcggcgggcgcattggttgaaaggtctggaccaaagtcaagtacccttggccttagcaatgtggctggagtgcctgtgaaagaaaaggctggaatgtctgcgaaagaaagagtagttgggaaatgggcaatggactgaagtagtgcacagttatgtcttgtgagcaactctctctgtttcaatgtatgtacgacagtagacatgttacaataatttctatgaaactatgaccttttaaatgaaatatgttgtgatgctagtcaatgttagaaaaaatttgaccaaaaggattcctaaaatcagacggagtatttcttgttcagagttttgcagacactgaaatgttgatgtttgccgaattgtttgagatgaagaccgtgattagtggttgttcagagttttgtatcagcgttgccactcaatatgaagtacgagcattcgtgttttaagttgtttttattacgtgtaacatttctgagtcattctgtaagctctacacgctgtaatcctg

SEQ ID NO: 214621 - DNA, 831 bp, Zea Mays
ttttaaactagccctaacagtttgttcacgagaacagactctgaaggcaaaaaaaaaaaaagtaggcccagcccagttgtgtaagcagccttcaccgtaacacaaacccacgcggccacgccactctagctaccgagcgagccatgtcgcctgcgcggcctcctccgccttccgctcgcctccgcgccttcccccgcgatggagtcctcacctccttctatgccggtcgattccccagtatccctggatgccttaatcgccgatcctgcggccgcgccggccgcgtgtactgcctcttctctggcggtgataaccgcaagaaacagggcgcattggttgaaaggtctggaccaaagtcaagtacccttggccttagcaatgtggctggagtgcctgtgaaagaaaaggctggaatgtctgcgaaagaaagagtagttgggaaatgggcaatggactgaagtagtgcacagttatgtcttgtgagcaactctctctgtttcaatgtatgtacgacagtagacatgttacaataatttctatgaaactatgaccttttaaatgaaatatgttgtgatgctagtcaatgttagaaaaaatttgaccaaaaggattcctaaaatcagacggagtatttcttgttcagagttttgcagacactgaaatgttgatgtttgccgaattgtttgagatgaagaccgtgattagtggttgttcagagttttgtatcagcgttgccactcaatatgaagtacgagcattcgtgttttaagttgtttttattacgtgtaacatttctgagtcattctgtaagctctacacgctgtaatcctg

SEQ ID NO: 214622 - DNA, 8512 bp, Zea Mays
  misc_feature (1)..(2): n is a, c, g, or t
nncagcactcggggtaagcttgctgttggagaaggtgataaagttgctataaaggatgtgggacaaatcattggacagcctactgcagcacctattacagcagacaaaaccaatatgaagcccctttccaggaatattgtccgctttgaaattgtccatttagtttacaatccattggtggaccattaccttgctgttgctggatatgaggattgccaagtgttaacattaaatagtcgtggtgaagtaactgatcgccttgccatagaacttgctctgcaaggaccatatattcgtcgtttggaatgggttcagggttctcaggtacaactcatggtagtaacaaacctgtttgtgaagatatatgatctctcacaggataatattagccccatgcattattttaccgtagctgatgatgtgatagttgatgcaaccctcgtcccctcctcaatggggaaattggtgctacttgttctttctgaaagcggtgttttatataggctgaatgttacattggagggtgatattggtgccaagatattgactgaaacagtcttggtcgaagatgtcatatccatgcatagagggttatcattgtacttctcatcaacctacaggcttctttttgtatctcaccaagatggtacaaccttcatgggacgtttgaatgctgattcttcatcaataacggaattgtcatatataaatgaggatcatgatggtaaatctaagccagctggactctactgttggagagagctagtagctggcagtggtatccttacttgcctatcgaaatctaaatcaaatgctcctcttgtggcgttgttgagtcctcatcaattggttgcacaaaacatgaggcacaatactggtgcaaattcctcagtggttggtgttgctgcctataagcctttatccaaagataaaacacattgtcttcttttgtatgatgatggaagccttcatatttactctcatacacctagtggaggtgacggttcgatgaaccttacagcagagcaaacaaagaagctgggcagcagcatactcagcagtagagcttacactggcacaaaaccagaatttccacttgatttctttgagaagacaacttgccttacatgcgatgttaagttcaatagtgaaacaacaaagagtggcgattctgaaagcattaagcaaagattgacatcagatgatgggtatttagagagtttgacacctgctggcttcaaggtggctatttcaaatcctaaccctgatatagtcatggttggttgccggattcacgttggcaacacatctgctagcaatattccttctgagatcacaatttttcatagagtcattaagcttgatgaaggcatgagatcatggatagattgtattgaaatttatggccgagccaaagatgaatttggatggaaggaaaaaatggatgcagcgcttgatatggaagcattgggtggtaatgctactggtggtagatctggaaagagactccaaatcgtgaaggctgctcctatccaggagcaagttctggcagatgcccttaggattctctcacgaatatacctgctatgccaaccaagttgctttactgacatggttgatggaggcatggaacttgataatatgaaatgccgagctttactggaaaccatttttcaaagtgacagggaacctctgctacattccgccgcatgtcgtgtccttcaggctgtgttcccaaagaaggacatgtaccatcatgttaaggacaccatgcgtctccttggggtaataaaatcactcccagcaataacttcaagaattggagttggaggtgccgcatcgagttgggtgataaaagaatttattgcccagatccatacagtttcaaaagttgcattgcacaggaaatcaaacctagcctcttttcttgaaagtcacggtacagaactagtcgatggtcttatgcaggtattctggtgtatattagatttagacaggccggacacacagacaataaatagtcttgttgtgccttgtgtggaatttatttatagctatgctgaatgcctggctttgcattccaatgaaaaaactagtgtgtcagtgggacctgcagttgctctgctgaaggagctgctctttgcaccatatgaagcagtacagacatctagcagtttggctatctcatcccgatttcttcaagtccctttccccaagcagacaatgatagctaatgatgatgctcctgaaaaccaagctaaagcaagtgcttctgctatgaattcaaccagtgcaaactctcaggttatgattgaagaagatcctgtcacatcatcagtgcaatattgttgtgatggctgttccaccgttcctatacttcggcaaaggtggcactgtagcatatgtccagattttgacctatgtgaaacttgctatgagatacttgatgcagatcgtttaccagcaccccattctaaagatcatccaatgtcagcaatacctattgaagttgatacatttggaggtgaaggcagtgaaatccatttctctgtcgatgagctaacagattcaggtgttcttcatgctgataggagtgttcagacctccccatcatcaattcatatatttgatgcaagtgagtctgcagacttacctgagactattacagaccaggcaactgtttcgatttctgcatcaaaacgtgccattaactccctggtacttaaccacctaattgaagagcttagaggctggatggggaccactgctggtactcgagccatacctttaatgcagttattctacaggctttcttctgctgttggtggtcctttcatggatagttcaaagccagaaaattttgatttggagaagtttgtgaagtggctaatggatgaagtcaacataaataaacagttccctgccaaaacacgatgcacatttggtgaagtattgatccttgttttcatgttcttcacacttatgttccgcaactggcatcaacctgggagtgataattctcattcaaagtcaagtgggagctctgatttgacagataaaggtcctgctcaggttctgggatcaacaacaataactcttccgtcatctagtgctgacctggataaaaatgagtttgcttcccagttagtccgtgcctgttctgccctcaggcagcagaaatttttgaattatcttatggatattctgcagcaacttgttcatattttcaagtcatcatccataaatggagaagctggttcttctggttcaggctgtggatccctattgacaataagaagagagctgccagctggaaatttctctccctttttttcagattcatatgctaaatctcatccaactgatctgttcatggactactacaaattattgttggagaatactttccggcttgtatatagtatggttagaccagaaaaggagaagtctgctgagaaggatagatgctacaaggttcccaacactaaggatctaaagttggatggatatcaagatgtgctttgcagctatattagcaatcctcatactgcatttgtccggagatatgcaaggaggctcttccttcatttatgtggcagcaagactcactattacagtgtgagggattcgtggcaatgttcccatgaagttaagaaacttaataagatcataaacaagtctgggggtttcagaaatcctgtgccttacgagagaagtgtcaagctcataaaatgtttatctactctttgtgatgtggctacggcaagaccaaaaaattggcaaaagttctgtttgaagcacatggatcttcttccatttctcatggacaatgtttatcatttcagtgaagagtgtgttattcagactctcaagcttctaaatctggctttctattcaggaaaagatgctaatcataatgcacaaaaagcagagactactgatctaggaggttctacgaggactagctcacagtctccagatatgaaaaagaaccggaaggctgatgatggttctgaaggttcctcagaaaagtcgtgcatggacatggaacaggttgtagagatgttcagtgataaggaaggtgacatgttgaaaaactttatcaacatattcttactagaatggaactcagcaggtgtccgtcatgaggctaaatgtgttctatttggagtgtggtaccatgcaaaaaaccgacttagggagacaatgctatcgattctgctacagaaggtaatacatcttcctttatatggacaaaacattgttgagtacactgacctcatcacctgtttacttgggaaagtgaacgacttcagtgcaaagcagaatcactctgaacttgtgaataaatgtttgacatctgaggtcataagctgcatctttgacacactccattctcagaatgagctattggcaaatcatccaaattcacgtatatacaacacattgagttgcttagtggagtttgatggctattacttagagagtgagccttgtgttacctgcagctgccctgatgttccgtattcaaggacgaagcttgaaaccctcaagtctgagacaaaatttactgacaacagaattataataaaatgcactggaagctttactatacagtcagttacaatgaacgtttatgatgctcgtaagtctaaatcggtcaaagtacttaacctgtattacaacaacaggcctgtgactgacttatcagaattgaagaataattggactctttggaagcgtgctaagagctgccatcttacatttaatcagacagaattgaaggttgaatttcccattccgattacagcatgcaatttcatgattgaacttgattcattttatgagaatcttcaagcttcttcccttgagtcactgcaatgcccacggtgtagcaggtctgtcactgataaacatggcatatgtagtaattgccatgaaaatgcatatcagtgccggcagtgtagaaatattaactatgaaaatcttgactcttttctctgcaatgagtgtggatacagcaaatatggtcgttttgaattccacttcatggcaaaacctagtttttcatttgacaacatggaaaatgatgatgacatgagaaaaggattggcagcaatagagtcagagtcagaaaatgctcataggcggtaccagcaactgatgggatttaaaaagcctctcatcaaacttgtgtcaagcataggtgaacaggaggtagactcgcagcagaaggatgctgtccagcagatgatggtgtccttgcctgggcccacatgcaaggtaaatcgcaagattgcacttcttggtgttctatatggtgaaaaatgcaaagccgcttttgattctgtgagcaaaagtgttcagacattgcaagggctccgccgtgttttaatgacatatctacaccaaaaaagttctagtgacaccaatgcattaccagcattttcaataccaaggtctccaaatagttgttatgggtgtagcaccacgtttgttacacaatgcttagagttattacaagtgctttcaaaacatgaaaactgcaggaagcagcttataagtgctggagttttgtcagagttatttgaaaacaacattcatcagggccctaggacagcacgcactcttgctagggctgtgctatcttcgttttctgaaagtgatgaagatgcagttcatgaattgaacaacttgattcagaagaaagtgatgtattgccttgagcaccatcgttccatggacattgcacaatcaacacgagaagacttactgctgctatcagagacttgtgctcttgtggatgagttttgggaggcacgattacgtgtcacctttcaactgttgttctcttctattaaggttggagcaaaacatcctgcaatttcggaacatattattcttccttgtttgaggataatttctcaggcttgcacgcctccaaaatctgattgtggggacaaagagtcaggtttgggagtatctagcttgacgttgcactctaagaatgatgatacaactggtaacacagcatctaataaccccaatactaagattcagtcagatatatctggaaaaatttatgatggaagtcgaagagaccaggatattccacttttgagctattctgaatgggagggcggtgcgtcatatttagatttcgtccggaggcagtacaaagtatcccaggcagtgaaaggatctgctcagaagacacgccatgattcatataagtctgactatctggttctcaaatatggactcagatggaagcgtcgtgcatgtttgaagtcaagtaagagtgacttctcaaaatttgccttgggctactgggtatcagacttgatcttgagttcgtgttcccagtcaataagatctgagatttgcactctcataagcttgctatgcccatctaactctcctagacaatttcagttattgaacttgctcatgtcactacttcctcgaacactctcagctggtgaaagtgcagcagagtactttgagttactagggacaatgattgattcagagtcttctcgtctattcctaactgttcgtggttgtttgacaacattatgttctttgataacaaaagaagtgtccaatgttgaatcacaggagagaagcctaagcattgatatctcacagggattcattctccataagcttgttgagctcctgaacaagtttcttgaagttcccaatatcagagcaaggtttatgagtgataggttactatctgaggtgttggaagcttttttggtgatccgtgggcttgtcgtgcaaaagacaaagttaattaatgactgcaatcatcttttgaaagaccttcttgatagcttgcttcttgagagtactgaaaacaaacgtcaatttattcgtgcttgcatctctggattgcagaggcatgtgaaggaaaaaaagagacggacgtctttgtttattttggagcaactctgcaatctgatttgcccagtgaaaccagagcctgtttatcttttgatactgaacaaggcacatactcaagaagagttcatcaggggttctatgacaaagaacccatactccagtgtggatgttggccctctaatgcgggatgtgaaaaataaaatatgtaaccagcttgatttaattggacttttggaggatgattatggtatggaattattagttggtggtagtataatctcacttgatctgagcatttcccaagtctatgagcaagtatggaggaagcaccatggtcaaactcaacattgtttgtccaatgtcagcgcaataactggtgcttcatctatcagagattgcccaccaatgacagtgacctacagactgcagggtttagatggtgaagctactgagcctatgattaaagagctggaagaggaaagggaggaatcacaagatcctgaaatcgagtttgctatagcaggtgctgttagggaatgtggaggccttgagattattttgagcatgattcagagcctgcatgatgatgagttcaggtctaatcaagaagagttgacttctgttcttaaccttctaaaatattgttgcaaaatccgtgaaaataggtgtgcactgttatgtctgggtgctttgggtttgcttcttgagacagctagacgcgcattttctgcggacgcaatggaacctgctgaaggtattctactaattgtagaaagtcttactatggaagctaatgagagtgacataagcattgcccaaagtgtttttacaactagtactgaagcgattggcgctggtgaggaggccaggaaaattgttctcatgtttttggagagaatatgtcatccttcaggtgccaaaaaatcaaacaagcaacaaaggaatgaggagatggtggcaaggatcctgccgtacttgacctatggggaaccaacagctatggaagctcttattcaacattttgagccctaccttagggactggtctgaatttgatcaattgcagaagcaacatgaagataatccaaaagatgataatataagccaaaagctgtcaacacagcgatctgctatcgacaactttgttcgtgtatcagagtcactcaagactagttcatgtggtgagaggctaaaggatattattctggagaagggcatcacaaaagctgctgttgagcatgtaaaggaaagctttgcttctgctggacagactggcttcagaacaagtgaagaatggacaacaggcttaaaactgccatctattccacccattctgtcaatgttgaaggggctggctaagggccatctgcctacacagaaatgcattgatgaagaaggcatattaccactgctccatgctctggaaggggtgcctggtgaaaatgaaattggtgcaagagcagaaaatcttttggatacactagccaataatgaaaataatggtgatggcttccttggagagaagattcaagagctgcggcacgctacaagggatgagatgcgtcgccgtgctctttgagaaagagtgatgctacttcagg

SEQ ID NO: 214623 - DNA, 8601 bp, Zea Mays
  misc_feature (1)..(2): n is a, c, g, or t
nncagcactcggggtaagcttgctgttggagaaggtgataaagttgctataaaggatgtgggacaaatcattggacagcctactgcagcacctattacagcagacaaaaccaatatgaagcccctttccaggaatattgtccgctttgaaattgtccatttagtttacaatccattggtggaccattaccttgctgttgctggatatgaggattgccaagtgttaacattaaatagtcgtggtgaagtaactgatcgccttgccatagaacttgctctgcaaggaccatatattcgtcgtttggaatgggttcagggttctcaggtacaactcatggtagtaacaaacctgtttgtgaagatatatgatctctcacaggataatattagccccatgcattattttaccgtagctgatgatgtgatagttgatgcaaccctcgtcccctcctcaatggggaaattggtgctacttgttctttctgaaagcggtgttttatataggctgaatgttacattggagggtgatattggtgccaagatattgactgaaacagtcttggtcgaagatgtcatatccatgcatagagggttatcattgtacttctcatcaacctacaggcttctttttgtatctcaccaagatggtacaaccttcatgggacgtttgaatgctgattcttcatcaataacggaattgtcatatataaatgaggatcatgatggtaaatctaagccagctggactctactgttggagagagctagtagctggcagtggtatccttacttgcctatcgaaatctaaatcaaatgctcctcttgtggcgttgttgagtcctcatcaattggttgcacaaaacatgaggcacaatactggtgcaaattcctcagtggttggtgttgctgcctataagcctttatccaaagataaaacacattgtcttcttttgtatgatgatggaagccttcatatttactctcatacacctagtggaggtgacggttcgatgaaccttacagcagagcaaacaaagaagctgggcagcagcatactcagcagtagagcttacactggcacaaaaccagaatttccacttgatttctttgagaagacaacttgccttacatgcgatgttaagttcaatagtgaaacaacaaagagtggcgattctgaaagcattaagcaaagattgacatcagatgatgggtatttagagagtttgacacctgctggcttcaaggtggctatttcaaatcctaaccctgatatagtcatggttggttgccggattcacgttggcaacacatctgctagcaatattccttctgagatcacaatttttcatagagtcattaagcttgatgaaggcatgagatcatggtatgatattccatttactactgctgaatcacttttggcagatgaagagttcacaattactgttggcccaacattcgatggttcatctatacctaggatagattgtattgaaatttatggccgagccaaagatgaatttggatggaaggaaaaaatggatgcagcgcttgatatggaagcattgggtggtaatgctactggtggtagatctggaaagagactccaaatcgtgaaggctgctcctatccaggagcaagttctggcagatgcccttaggattctctcacgaatatacctgctatgccaaccaagttgctttactgacatggttgatggaggcatggaacttgataatatgaaatgccgagctttactggaaaccatttttcaaagtgacagggaacctctgctacattccgccgcatgtcgtgtccttcaggctgtgttcccaaagaaggacatgtaccatcatgttaaggacaccatgcgtctccttggggtaataaaatcactcccagcaataacttcaagaattggagttggaggtgccgcatcgagttgggtgataaaagaatttattgcccagatccatacagtttcaaaagttgcattgcacaggaaatcaaacctagcctcttttcttgaaagtcacggtacagaactagtcgatggtcttatgcaggtattctggtgtatattagatttagacaggccggacacacagacaataaatagtcttgttgtgccttgtgtggaatttatttatagctatgctgaatgcctggctttgcattccaatgaaaaaactagtgtgtcagtgggacctgcagttgctctgctgaaggagctgctctttgcaccatatgaagcagtacagacatctagcagtttggctatctcatcccgatttcttcaagtccctttccccaagcagacaatgatagctaatgatgatgctcctgaaaaccaagctaaagcaagtgcttctgctatgaattcaaccagtgcaaactctcaggttatgattgaagaagatcctgtcacatcatcagtgcaatattgttgtgatggctgttccaccgttcctatacttcggcaaaggtggcactgtagcatatgtccagattttgacctatgtgaaacttgctatgagatacttgatgcagatcgtttaccagcaccccattctaaagatcatccaatgtcagcaatacctattgaagttgatacatttggaggtgaaggcagtgaaatccatttctctgtcgatgagctaacagattcaggtgttcttcatgctgataggagtgttcagacctccccatcatcaattcatatatttgatgcaagtgagtctgcagacttacctgagactattacagaccaggcaactgtttcgatttctgcatcaaaacgtgccattaactccctggtacttaaccacctaattgaagagcttagaggctggatggggaccactgctggtactcgagccatacctttaatgcagttattctacaggctttcttctgctgttggtggtcctttcatggatagttcaaagccagaaaattttgatttggagaagtttgtgaagtggctaatggatgaagtcaacataaataaacagttccctgccaaaacacgatgcacatttggtgaagtattgatccttgttttcatgttcttcacacttatgttccgcaactggcatcaacctgggagtgataattctcattcaaagtcaagtgggagctctgatttgacagataaaggtcctgctcaggttctgggatcaacaacaataactcttccgtcatctagtgctgacctggataaaaatgagtttgcttcccagttagtccgtgcctgttctgccctcaggcagcagaaatttttgaattatcttatggatattctgcagcaacttgttcatattttcaagtcatcatccataaatggagaagctggttcttctggttcaggctgtggatccctattgacaataagaagagagctgccagctggaaatttctctccctttttttcagattcatatgctaaatctcatccaactgatctgttcatggactactacaaattattgttggagaatactttccggcttgtatatagtatggttagaccagaaaaggagaagtctgctgagaaggatagatgctacaaggttcccaacactaaggatctaaagttggatggatatcaagatgtgctttgcagctatattagcaatcctcatactgcatttgtccggagatatgcaaggaggctcttccttcatttatgtggcagcaagactcactattacagtgtgagggattcgtggcaatgttcccatgaagttaagaaacttaataagatcataaacaagtctgggggtttcagaaatcctgtgccttacgagagaagtgtcaagctcataaaatgtttatctactctttgtgatgtggctacggcaagaccaaaaaattggcaaaagttctgtttgaagcacatggatcttcttccatttctcatggacaatgtttatcatttcagtgaagagtgtgttattcagactctcaagcttctaaatctggctttctattcaggaaaagatgctaatcataatgcacaaaaagcagagactactgatctaggaggttctacgaggactagctcacagtctccagatatgaaaaagaaccggaaggctgatgatggttctgaaggttcctcagaaaagtcgtgcatggacatggaacaggttgtagagatgttcagtgataaggaaggtgacatgttgaaaaactttatcaacatattcttactagaatggaactcagcaggtgtccgtcatgaggctaaatgtgttctatttggagtgtggtaccatgcaaaaaaccgacttagggagacaatgctatcgattctgctacagaaggtaatacatcttcctttatatggacaaaacattgttgagtacactgacctcatcacctgtttacttgggaaagtgaacgacttcagtgcaaagcagaatcactctgaacttgtgaataaatgtttgacatctgaggtcataagctgcatctttgacacactccattctcagaatgagctattggcaaatcatccaaattcacgtatatacaacacattgagttgcttagtggagtttgatggctattacttagagagtgagccttgtgttacctgcagctgccctgatgttccgtattcaaggacgaagcttgaaaccctcaagtctgagacaaaatttactgacaacagaattataataaaatgcactggaagctttactatacagtcagttacaatgaacgtttatgatgctcgtaagtctaaatcggtcaaagtacttaacctgtattacaacaacaggcctgtgactgacttatcagaattgaagaataattggactctttggaagcgtgctaagagctgccatcttacatttaatcagacagaattgaaggttgaatttcccattccgattacagcatgcaatttcatgattgaacttgattcattttatgagaatcttcaagcttcttcccttgagtcactgcaatgcccacggtgtagcaggtctgtcactgataaacatggcatatgtagtaattgccatgaaaatgcatatcagtgccggcagtgtagaaatattaactatgaaaatcttgactcttttctctgcaatgagtgtggatacagcaaatatggtcgttttgaattccacttcatggcaaaacctagtttttcatttgacaacatggaaaatgatgatgacatgagaaaaggattggcagcaatagagtcagagtcagaaaatgctcataggcggtaccagcaactgatgggatttaaaaagcctctcatcaaacttgtgtcaagcataggtgaacaggaggtagactcgcagcagaaggatgctgtccagcagatgatggtgtccttgcctgggcccacatgcaaggtaaatcgcaagattgcacttcttggtgttctatatggtgaaaaatgcaaagccgcttttgattctgtgagcaaaagtgttcagacattgcaagggctccgccgtgttttaatgacatatctacaccaaaaaagttctagtgacaccaatgcattaccagcattttcaataccaaggtctccaaatagttgttatgggtgtagcaccacgtttgttacacaatgcttagagttattacaagtgctttcaaaacatgaaaactgcaggaagcagcttataagtgctggagttttgtcagagttatttgaaaacaacattcatcagggccctaggacagcacgcactcttgctagggctgtgctatcttcgttttctgaaagtgatgaagatgcagttcatgaattgaacaacttgattcagaagaaagtgatgtattgccttgagcaccatcgttccatggacattgcacaatcaacacgagaagacttactgctgctatcagagacttgtgctcttgtggatgagttttgggaggcacgattacgtgtcacctttcaactgttgttctcttctattaaggttggagcaaaacatcctgcaatttcggaacatattattcttccttgtttgaggataatttctcaggcttgcacgcctccaaaatctgattgtggggacaaagagtcaggtttgggagtatctagcttgacgttgcactctaagaatgatgatacaactggtaacacagcatctaataaccccaatactaagattcagtcagatatatctggaaaaatttatgatggaagtcgaagagaccaggatattccacttttgagctattctgaatgggagggcggtgcgtcatatttagatttcgtccggaggcagtacaaagtatcccaggcagtgaaaggatctgctcagaagacacgccatgattcatataagtctgactatctggttctcaaatatggactcagatggaagcgtcgtgcatgtttgaagtcaagtaagagtgacttctcaaaatttgccttgggctactgggtatcagacttgatcttgagttcgtgttcccagtcaataagatctgagatttgcactctcataagcttgctatgcccatctaactctcctagacaatttcagttattgaacttgctcatgtcactacttcctcgaacactctcagctggtgaaagtgcagcagagtactttgagttactagggacaatgattgattcagagtcttctcgtctattcctaactgttcgtggttgtttgacaacattatgttctttgataacaaaagaagtgtccaatgttgaatcacaggagagaagcctaagcattgatatctcacagggattcattctccataagcttgttgagctcctgaacaagtttcttgaagttcccaatatcagagcaaggtttatgagtgataggttactatctgaggtgttggaagcttttttggtgatccgtgggcttgtcgtgcaaaagacaaagttaattaatgactgcaatcatcttttgaaagaccttcttgatagcttgcttcttgagagtactgaaaacaaacgtcaatttattcgtgcttgcatctctggattgcagaggcatgtgaaggaaaaaaagagacggacgtctttgtttattttggagcaactctgcaatctgatttgcccagtgaaaccagagcctgtttatcttttgatactgaacaaggcacatactcaagaagagttcatcaggggttctatgacaaagaacccatactccagtgtggatgttggccctctaatgcgggatgtgaaaaataaaatatgtaaccagcttgatttaattggacttttggaggatgattatggtatggaattattagttggtggtagtataatctcacttgatctgagcatttcccaagtctatgagcaagtatggaggaagcaccatggtcaaactcaacattgtttgtccaatgtcagcgcaataactggtgcttcatctatcagagattgcccaccaatgacagtgacctacagactgcagatggtgaagctactgagcctatgattaaagagctggaagaggaaagggaggaatcacaagatcctgaaatcgagtttgctatagcaggtgctgttagggaatgtggaggccttgagattattttgagcatgattcagagcctgcatgatgatgagttcaggtctaatcaagaagagttgacttctgttcttaaccttctaaaatattgttgcaaaatccgtgaaaataggtgtgcactgttatgtctgggtgctttgggtttgcttcttgagacagctagacgcgcattttctgcggacgcaatggaacctgctgaaggtattctactaattgtagaaagtcttactatggaagctaatgagagtgacataagcattgcccaaagtgtttttacaactagtactgaagcgattggcgctggtgaggaggccaggaaaattgttctcatgtttttggagagaatatgtcatccttcaggtgccaaaaaatcaaacaagcaacaaaggaatgaggagatggtggcaaggatcctgccgtacttgacctatggggaaccaacagctatggaagctcttattcaacattttgagccctaccttagggactggtctgaatttgatcaattgcagaagcaacatgaagataatccaaaagatgataatataagccaaaagctgtcaacacagcgatctgctatcgacaactttgttcgtgtatcagagtcactcaagactagttcatgtggtgagaggctaaaggatattattctggagaagggcatcacaaaagctgctgttgagcatgtaaaggaaagctttgcttctgctggacagactggcttcagaacaagtgaagaatggacaacaggcttaaaactgccatctattccacccattctgtcaatgttgaaggggctggctaagggccatctgcctacacagaaatgcattgatgaagaaggcatattaccactgctccatgctctggaaggggtgcctggtgaaaatgaaattggtgcaagagcagaaaatcttttggatacactagccaataatgaaaataatggtgatggcttccttggagagaagattcaagagctgcggcacgctacaagggatgagatgcgtcgccgtgctctttgagaaagagtgatgctacttcagg

SEQ ID NO: 214624 - DNA, 8600 bp, Zea Mays
cagcactcggggtaagcttgctgttggagaaggtgataaagttgctataaaggatgtgggacaaatcattggacagcctactgcagcacctattacagcagacaaaaccaatatgaagcccctttccaggaatattgtccgctttgaaattgtccatttagtttacaatccattggtggaccattaccttgctgttgctggatatgaggattgccaagtgttaacattaaatagtcgtggtgaagtaactgatcgccttgccatagaacttgctctgcaaggaccatatattcgtcgtttggaatgggttcagggttctcaggtacaactcatggtagtaacaaacctgtttgtgaagatatatgatctctcacaggataatattagccccatgcattattttaccgtagctgatgatgtgatagttgatgcaaccctcgtcccctcctcaatggggaaattggtgctacttgttctttctgaaagcggtgttttatataggctgaatgttacattggagggtgatattggtgccaagatattgactgaaacagtcttggtcgaagatgtcatatccatgcatagagggttatcattgtacttctcatcaacctacaggcttctttttgtatctcaccaagatggtacaaccttcatgggacgtttgaatgctgattcttcatcaataacggaattgtcatatataaatgaggatcatgatggtaaatctaagccagctggactctactgttggagagagctagtagctggcagtggtatccttacttgcctatcgaaatctaaatcaaatgctcctcttgtggcgttgttgagtcctcatcaattggttgcacaaaacatgaggcacaatactggtgcaaattcctcagtggttggtgttgctgcctataagcctttatccaaagataaaacacattgtcttcttttgtatgatgatggaagccttcatatttactctcatacacctagtggaggtgacggttcgatgaaccttacagcagagcaaacaaagaagctgggcagcagcatactcagcagtagagcttacactggcacaaaaccagaatttccacttgatttctttgagaagacaacttgccttacatgcgatgttaagttcaatagtgaaacaacaaagagtggcgattctgaaagcattaagcaaagattgacatcagatgatgggtatttagagagtttgacacctgctggcttcaaggtggctatttcaaatcctaaccctgatatagtcatggttggttgccggattcacgttggcaacacatctgctagcaatattccttctgagatcacaatttttcatagagtcattaagcttgatgaaggcatgagatcatggtatgatattccatttactactgctgaatcacttttggcagatgaagagttcacaattactgttggcccaacattcgatggttcatctatacctaggatagattgtattgaaatttatggccgagccaaagatgaatttggatggaaggaaaaaatggatgcagcgcttgatatggaagcattgggtggtaatgctactggtggtagatctggaaagagactccaaatcgtgaaggctgctcctatccaggagcaagttctggcagatgcccttaggattctctcacgaatatacctgctatgccaaccaagttgctttactgacatggttgatggaggcatggaacttgataatatgaaatgccgagctttactggaaaccatttttcaaagtgacagggaacctctgctacattccgccgcatgtcgtgtccttcaggctgtgttcccaaagaaggacatgtaccatcatgttaaggacaccatgcgtctccttggggtaataaaatcactcccagcaataacttcaagaattggagttggaggtgccgcatcgagttgggtgataaaagaatttattgcccagatccatacagtttcaaaagttgcattgcacaggaaatcaaacctagcctcttttcttgaaagtcacgaactagtcgatggtcttatgcaggtattctggtgtatattagatttagacaggccggacacacagacaataaatagtcttgttgtgccttgtgtggaatttatttatagctatgctgaatgcctggctttgcattccaatgaaaaaactagtgtgtcagtgggacctgcagttgctctgctgaaggagctgctctttgcaccatatgaagcagtacagacatctagcagtttggctatctcatcccgatttcttcaagtccctttccccaagcagacaatgatagctaatgatgatgctcctgaaaaccaagctaaagcaagtgcttctgctatgaattcaaccagtgcaaactctcaggttatgattgaagaagatcctgtcacatcatcagtgcaatattgttgtgatggctgttccaccgttcctatacttcggcaaaggtggcactgtagcatatgtccagattttgacctatgtgaaacttgctatgagatacttgatgcagatcgtttaccagcaccccattctaaagatcatccaatgtcagcaatacctattgaagttgatacatttggaggtgaaggcagtgaaatccatttctctgtcgatgagctaacagattcaggtgttcttcatgctgataggagtgttcagacctccccatcatcaattcatatatttgatgcaagtgagtctgcagacttacctgagactattacagaccaggcaactgtttcgatttctgcatcaaaacgtgccattaactccctggtacttaaccacctaattgaagagcttagaggctggatggggaccactgctggtactcgagccatacctttaatgcagttattctacaggctttcttctgctgttggtggtcctttcatggatagttcaaagccagaaaattttgatttggagaagtttgtgaagtggctaatggatgaagtcaacataaataaacagttccctgccaaaacacgatgcacatttggtgaagtattgatccttgttttcatgttcttcacacttatgttccgcaactggcatcaacctgggagtgataattctcattcaaagtcaagtgggagctctgatttgacagataaaggtcctgctcaggttctgggatcaacaacaataactcttccgtcatctagtgctgacctggataaaaatgagtttgcttcccagttagtccgtgcctgttctgccctcaggcagcagaaatttttgaattatcttatggatattctgcagcaacttgttcatattttcaagtcatcatccataaatggagaagctggttcttctggttcaggctgtggatccctattgacaataagaagagagctgccagctggaaatttctctccctttttttcagattcatatgctaaatctcatccaactgatctgttcatggactactacaaattattgttggagaatactttccggcttgtatatagtatggttagaccagaaaaggagaagtctgctgagaaggatagatgctacaaggttcccaacactaaggatctaaagttggatggatatcaagatgtgctttgcagctatattagcaatcctcatactgcatttgtccggagatatgcaaggaggctcttccttcatttatgtggcagcaagactcactattacagtgtgagggattcgtggcaatgttcccatgaagttaagaaacttaataagatcataaacaagtctgggggtttcagaaatcctgtgccttacgagagaagtgtcaagctcataaaatgtttatctactctttgtgatgtggctacggcaagaccaaaaaattggcaaaagttctgtttgaagcacatggatcttcttccatttctcatggacaatgtttatcatttcagtgaagagtgtgttattcagactctcaagcttctaaatctggctttctattcaggaaaagatgctaatcataatgcacaaaaagcagagactactgatctaggaggttctacgaggactagctcacagtctccagatatgaaaaagaaccggaaggctgatgatggttctgaaggttcctcagaaaagtcgtgcatggacatggaacaggttgtagagatgttcagtgataaggaaggtgacatgttgaaaaactttatcaacatattcttactagaatggaactcagcaggtgtccgtcatgaggctaaatgtgttctatttggagtgtggtaccatgcaaaaaaccgacttagggagacaatgctatcgattctgctacagaaggtaatacatcttcctttatatggacaaaacattgttgagtacactgacctcatcacctgtttacttgggaaagtgaacgacttcagtgcaaagcagaatcactctgaacttgtgaataaatgtttgacatctgaggtcataagctgcatctttgacacactccattctcagaatgagctattggcaaatcatccaaattcacgtatatacaacacattgagttgcttagtggagtttgatggctattacttagagagtgagccttgtgttacctgcagctgccctgatgttccgtattcaaggacgaagcttgaaaccctcaagtctgagacaaaatttactgacaacagaattataataaaatgcactggaagctttactatacagtcagttacaatgaacgtttatgatgctcgtaagtctaaatcggtcaaagtacttaacctgtattacaacaacaggcctgtgactgacttatcagaattgaagaataattggactctttggaagcgtgctaagagctgccatcttacatttaatcagacagaattgaaggttgaatttcccattccgattacagcatgcaatttcatgattgaacttgattcattttatgagaatcttcaagcttcttcccttgagtcactgcaatgcccacggtgtagcaggtctgtcactgataaacatggcatatgtagtaattgccatgaaaatgcatatcagtgccggcagtgtagaaatattaactatgaaaatcttgactcttttctctgcaatgagtgtggatacagcaaatatggtcgttttgaattccacttcatggcaaaacctagtttttcatttgacaacatggaaaatgatgatgacatgagaaaaggattggcagcaatagagtcagagtcagaaaatgctcataggcggtaccagcaactgatgggatttaaaaagcctctcatcaaacttgtgtcaagcataggtgaacaggaggtagactcgcagcagaaggatgctgtccagcagatgatggtgtccttgcctgggcccacatgcaaggtaaatcgcaagattgcacttcttggtgttctatatggtgaaaaatgcaaagccgcttttgattctgtgagcaaaagtgttcagacattgcaagggctccgccgtgttttaatgacatatctacaccaaaaaagttctagtgacaccaatgcattaccagcattttcaataccaaggtctccaaatagttgttatgggtgtagcaccacgtttgttacacaatgcttagagttattacaagtgctttcaaaacatgaaaactgcaggaagcagcttataagtgctggagttttgtcagagttatttgaaaacaacattcatcagggccctaggacagcacgcactcttgctagggctgtgctatcttcgttttctgaaagtgatgaagatgcagttcatgaattgaacaacttgattcagaagaaagtgatgtattgccttgagcaccatcgttccatggacattgcacaatcaacacgagaagacttactgctgctatcagagacttgtgctcttgtggatgagttttgggaggcacgattacgtgtcacctttcaactgttgttctcttctattaaggttggagcaaaacatcctgcaatttcggaacatattattcttccttgtttgaggataatttctcaggcttgcacgcctccaaaatctgattgtggggacaaagagtcaggtttgggagtatctagcttgacgttgcactctaagaatgatgatacaactggtaacacagcatctaataaccccaatactaagattcagtcagatatatctggaaaaatttatgatggaagtcgaagagaccaggatattccacttttgagctattctgaatgggagggcggtgcgtcatatttagatttcgtccggaggcagtacaaagtatcccaggcagtgaaaggatctgctcagaagacacgccatgattcatataagtctgactatctggttctcaaatatggactcagatggaagcgtcgtgcatgtttgaagtcaagtaagagtgacttctcaaaatttgccttgggctactgggtatcagacttgatcttgagttcgtgttcccagtcaataagatctgagatttgcactctcataagcttgctatgcccatctaactctcctagacaatttcagttattgaacttgctcatgtcactacttcctcgaacactctcagctggtgaaagtgcagcagagtactttgagttactagggacaatgattgattcagagtcttctcgtctattcctaactgttcgtggttgtttgacaacattatgttctttgataacaaaagaagtgtccaatgttgaatcacaggagagaagcctaagcattgatatctcacagggattcattctccataagcttgttgagctcctgaacaagtttcttgaagttcccaatatcagagcaaggtttatgagtgataggttactatctgaggtgttggaagcttttttggtgatccgtgggcttgtcgtgcaaaagacaaagttaattaatgactgcaatcatcttttgaaagaccttcttgatagcttgcttcttgagagtactgaaaacaaacgtcaatttattcgtgcttgcatctctggattgcagaggcatgtgaaggaaaaaaagagacggacgtctttgtttattttggagcaactctgcaatctgatttgcccagtgaaaccagagcctgtttatcttttgatactgaacaaggcacatactcaagaagagttcatcaggggttctatgacaaagaacccatactccagtgtggatgttggccctctaatgcgggatgtgaaaaataaaatatgtaaccagcttgatttaattggacttttggaggatgattatggtatggaattattagttggtggtagtataatctcacttgatctgagcatttcccaagtctatgagcaagtatggaggaagcaccatggtcaaactcaacattgtttgtccaatgtcagcgcaataactggtgcttcatctatcagagattgcccaccaatgacagtgacctacagactgcagggtttagatggtgaagctactgagcctatgattaaagagctggaagaggaaagggaggaatcacaagatcctgaaatcgagtttgctatagcaggtgctgttagggaatgtggaggccttgagattattttgagcatgattcagagcctgcatgatgatgagttcaggtctaatcaagaagagttgacttctgttcttaaccttctaaaatattgttgcaaaatccgtgaaaataggtgtgcactgttatgtctgggtgctttgggtttgcttcttgagacagctagacgcgcattttctgcggacgcaatggaacctgctgaaggtattctactaattgtagaaagtcttactatggaagctaatgagagtgacataagcattgcccaaagtgtttttacaactagtactgaagcgattggcgctggtgaggaggccaggaaaattgttctcatgtttttggagagaatatgtcatccttcaggtgccaaaaaatcaaacaagcaacaaaggaatgaggagatggtggcaaggatcctgccgtacttgacctatggggaaccaacagctatggaagctcttattcaacattttgagccctaccttagggactggtctgaatttgatcaattgcagaagcaacatgaagataatccaaaagatgataatataagccaaaagctgtcaacacagcgatctgctatcgacaactttgttcgtgtatcagagtcactcaagactagttcatgtggtgagaggctaaaggatattattctggagaagggcatcacaaaagctgctgttgagcatgtaaaggaaagctttgcttctgctggacagactggcttcagaacaagtgaagaatggacaacaggcttaaaactgccatctattccacccattctgtcaatgttgaaggggctggctaagggccatctgcctacacagaaatgcattgatgaagaaggcatattaccactgctccatgctctggaaggggtgcctggtgaaaatgaaattggtgcaagagcagaaaatcttttggatacactagccaataatgaaaataatggtgatggcttccttggagagaagattcaagagctgcggcacgctacaagggatgagatgcgtcgccgtgctctttgagaaagagtgatgctacttcagg

SEQ ID NO: 214625 - DNA, 2226 bp, Zea Mays
tttttttttttttttttttgcaatgagcagcggccaaagaagatgctgactggtggagagtgggaatgccctcagtgtgatttctataattatgggaggaatatgtcatgtttaaaatgtgattgcaagaggccagcaacaatcccatcgattcctgcatctgttggttctggtttaggtggtgtggcacagcttcttagtgtaacgagtgctggtaaatctgaaattgagagaaaacttgctgaaagtgataaaaaagcagaaagatggttgagcaaagtatctcaacttcaagattcagctgacttaagtagtctagcagaagatgaggactttcctgagattatgcctatgcgcaagggggtgaataagtttgtggtgagcatgcacaaaacaccactggaaagaaggcttacaaatgcacagtacagaagtaacaatagccccccagcatccgacccaaagataagtcaaactttggacaggatacttgggcgttcaactcctactacagccccaaacaatcaatctgttactagtgatgcacctactgaagctctgaagaaatcaacagaccacctcggtggcattgatcctgttccgtttgtgcccctgtctgcagatctctttgcaaaaccacagactaataatggacagagcaatcagaatggaaaaatcaatgcagaagatgacagttccatggtaaataatgcagtccctttacctgagaggcaaagcacaggatcattagataccgctgagatatggtctgagaaagtagcagaacctgacaatgcaaaggattccccaagtgcagtttctgatgaaaattttcctgagattatgccaataaggaaaggtgaaaaccgatttgttgttagtaagaaaaaagatcgctcattgacatcacaacagtacaaaaggcgcagtattcttgagcaggcagacagttctgattttgtcccatttgttccatttcctcctggctactttgccaagaaagatacaccaatagagagtactacagacacaggaatcgtgcccgaaggcagtcaaccaaaaggtaacctgaataatgggaactggaacataaattacaataagcatcaatcacaatctcatggggcacaatgtaggcctagtggtgctgcatatactggcactcggatcatgggcaactcccaggggaactacaatgggagcaatggtgaatctacttaccatggagctaactttgaacaggaaccttataacaaaggttataggaacaacaactattggagcagtgataacaataacagcaacaatgcctggagtaacaacagcaattttaacaacaataatgactggagtggtaacaattcctataacagcagtactgagaacggtaatagcagctacaacagtagtcatggttataactacaatggtacatggagcgacagcaaccacagtgcatggagcagtagcagcagcaacaataaccagagtggttcatttgttgataataacagtgtcactagcagccgcagttccatgaatgatgcaaatcacgtgagtcacagctcaggttatggaggaagctcaaacagaggttatactggaaagagcttggaaggatctgctgtaaaggatcctgatccactagacatgtccgaggaagctaaggctgagagatggtttaggagggcagctcagataaaggacatctctgagctagcgaacattccggacgaggacttccctgagataatgccgatgaggaagggggtaaacagattcgttgtgagcaagaggaagacaccattggagaggagattaacttccccacagtacagaaggaacctgccaattgtcagatctgaaacggacgaggatgctagctgaaaacagaggtatgattgcctgcataccagtacggcagtataccaccacagccttaactgtgatgcgattgcgatgtaccatttttatttgtgacgataagcgagcgatcggaaacagaaatcatggaaaacaataccccaagatagttttctgtatagtaaaattttgttcgcaagcctgaggtttgcgggattgtctttgctacttctaaactatacagatttgcgttgtactaaaaccctttttaacattcaacctccgttttttttattccaaccattttaaagctatctgtaaaaataacatcataaaaaagttacaaaaactacatcaaaaaag

SEQ ID NO: 214626 - DNA, 3074 bp, Zea Mays
caccaatcgtctcacataccacccatccatccaatcatcatgcattcacattcttcctaattgatggattattcttgcggttgagctagcggtggtgagagactttattggaggagagagacgtaggcgtgcaatcccttgtgacacgcgcggctgcccaacatgctcagctcttcgacgtctaggcgggagagcaaaagcagcgacctcttcagggccgctgccatggccctccgggatgctgccaacaagaccgctggcattgagccgaacaaagcagcatccaacaacaacgtcgccaccgtcgctgctgtatcgatcaaggaggccatcgccgccgtgcgccatgagggttggatggtccgctacggtcgcaggaagatcggcaggtcattcttccacactcgctacttcgtgcttgacaacagactgcttgcgtactacaagaagaaaccaaaggacaacatggttccactcaactcgctgctaatagacgggaattgcagggtggaggaccgtgggctcaaaacactccatggacaaatgatttatgtcttgtgcatttacaacaagaaagaaaaggagcaccagataacgatgggagcgtatgatattgaggatgcaatggcatggaaaaagaagatagaactcatcattgatcagcaacaagactctatgacagctaagaaccgtaaggcctttgcttcaatggactttgacatggaacttggagggcagtttttgttttcagatcatgacagcacagctgaagatgacgaggaaaggcccactttgactcgcaaaactactatagggaacggcccccctgattcaatacatgactggaccaaagagcctgacattggtgtgtccaatcagaacgaccccaatcaattttgctccaagaagaattggcgactacttagatgccaaaatggcaagatcactttttatttctccccttaggtcaataattcttcctcttaagattttttttgaagttgaagttgtcgctggtttgatattgccagggttgcgcatttttgaagaacttctggaagtagattaccctgtatgctccagtttctctagatttttttagtgatttgtatgatgtgtaaaacattatgtattttcttttatttgtactctattgtgttgtaggcacgaggctgcagcagagctatgagggctgttggtgtagttgaagccacatgtgaagccatttttggtcttataatgagcatggatgtaacaagatacgagtgggactgtagcttccgtaacggtagtttagttgaagaggtcgatggtcacactgcaatactatatcataggctgcatctacactggtgcccaatgctagtctggccacgagatctttgctatgctcggtattggcgtcgtaacgatgatggaagttacgttgtgttgttccgatcaacagagcatcttaaatgtggtcggcgacgaggatttgtgagggcattcattgaaagtggaggtttcaagatttctcctctcaagtgtcgcaatggaagacctcgtactcaggttcaacaccttatgcaaattgatctgaagggatggttcctgaactactctctttcctttcagtatcattctttgttgcagatactaaactgtgttgcaggtataaaatactgttatttccatacaaacaataactaacaactccatctcatcatgagaacaatatactaagctagttcgtcagtgtgatagcatagtgctgttctccaactgattcaatttggtttcttatattttgcacccactcccaggactatgtgaatatttttcccaaacagatgacatccatataaccccaaggattcctgtaatggaaagcatgttcgatgcggattcagaaccaaaaaatcgtaagcttcaagaatttgacactaaggcaaatagaaacatgggaatgattgacgaagaatcagatgatgacgatgattatcaagttcctgaagctaatatagaggaagacgtgaacaaatctcatcatgatatcaagcgcacagatgagcctacagaaaaaattgatttatcttgttttttgagtattcttcatcgtgatcccgaggagaaaagtcgcaattgttggacaatacctgatagcaagatcttcaaagttcgtagcaaaaacttcccacaagacaaatcaaagatacctgcagcaagttatctcatggagcttgcagccattgactggtttaaggacaccaaacgtatggataatgttgccaggcaaaagggttgtgttgctcaggttgctgctgatcgagggatgcatacatttgttgtcaacatacaaactaaagcttataccatccgtccctaagggctcctggatagtgcgacagagtgttggaagcaccccttgtttgttgggaaaggctgttgattgtagttatgttcgaggtcctgcgtacttggaggtggacgttgacattgggtcttcggcggtagcaaatggagttttgggtattgtgtttggtgtggtgacgacgttagtagttgatatggccttcctaatacaggccaacacatacgaggagctaccagagcaggtgataggcgcagctcggttggctcatgttgaaccggccacagcagtagttcctgatcttagcaacacatcaaacgacagtagcaacagcaacaatgacaacaacaacaacaacaacaacaacaatgggtcctcagaggatgatttgtccaagaaaacaaactaattttattttaatctagtatcagagtgttgtgttgaacatctctttaattaatcttctagctagtcactcagtggaatccagagagccaataatatatgcttctctttgtaccagctttcttgtttatatattagatccaagtattatatttgtagctagaggcaacaatatgaatagtaaccgtggttatcctaaacttgtttgccgactaggaccgggagatggtttgtttgttttaagcttttactttttacaagacatgcctatctttattttccctttgcctttatctttgaactgctgctactcaag

SEQ ID NO: 214627 - DNA, 2932 bp, Zea Mays
gggaggggaacccatgcagagtgcgagcgtttttcgcgctgccacccctccaaaccctctattgtcgtagccatgcccgatgccttgctccaccttccgtattgccaccaatcgtctcacataccacccatccatccaatcatcatgcattcacattcttcctaattgatggattattcttgcggttgagctagcggtggtgagagactttattggaggagagagacgtaggcgtgcaatcccttgtgacacgcgcggctgcccaacatgctcagctcttcgacgtctaggcgggagagcaaaagcagcgacctcttcagggccgctgccatggccctccgggatgctgccaacaagaccgctggcattgagccgaacaaagcagcatccaacaacaacgtcgccaccgtcgctgctgtatcgatcaaggaggccatcgccgccgtgcgccatgagggttggatggtccgctacggtcgcaggaagatcggcaggtcattcttccacactcgctacttcgtgcttgacaacagactgcttgcgtactacaagaagaaaccaaaggacaacatggttccactcaactcgctgctaatagacgggaattgcagggtggaggaccgtgggctcaaaacactccatggacaaatgatttatgtcttgtgcatttacaacaagaaagaaaaggagcaccagataacgatgggagcgtatgatattgaggatgcaatggcatggaaaaagaagatagaactcatcattgatcagcaacaagactctatgacagctaagaaccgtaaggcctttgcttcaatggactttgacatggaacttggagggcagtttttgttttcagatcatgacagcacagctgaagatgacgaggaaaggcccactttgactcgcaaaactactatagggaacggcccccctgattcaatacatgactggaccaaagagcctgacattggtgtgtccaatcagaacgaccccaatcaattttgctccaagaagaattggcgactacttagatgccaaaatgggttgcgcatttttgaagaacttctggaagtagattaccctgcacgaggctgcagcagagctatgagggctgttggtgtagttgaagccacatgtgaagccatttttggtcttataatgagcatggatgtaacaagatacgagtgggactgtagcttccgtaacggtagtttagttgaagaggtcgatggtcacactgcaatactatatcataggctgcatctacactggtgcccaatgctagtctggccacgagatctttgctatgctcggtattggcgtcgtaacgatgatggaagttacgttgtgttgttccgatcaacagagcatcttaaatgtggtcggcgacgaggatttgtgagggcattcattgaaagtggaggtttcaagatttctcctctcaagtgtcgcaatggaagacctcgtactcaggttcaacaccttatgcaaattgatctgaagggatggttcctgaactactctctttcctttcagtatcattctttgttgcagatactaaactgtgttgcaggactatgtgaatatttttcccaaacagatgacatccatataaccccaaggattcctgtaatggaaagcatgttcgatgcggattcagaaccaaaaaatcgtaagcttcaagaatttgacactaaggcaaatagaaacatgggaatgattgacgaagaatcagatgatgacgatgattatcaagttcctgaagctaatatagaggaagacgtgaacaaatctcatcatgatatcaagcgcacagatgagcctacagaaaaaattgatttatcttgttttttgagtattcttcatcgtgatcccgaggagaaaagtcgcaattgttggacaatacctgatagcaagatcttcaaagttcgtagcaaaaacttcccacaagacaaatcaaagatacctgcagcaagttatctcatggagcttgcagccattgactggtttaaggacaccaaacgtatggataatgttgccaggcaaaagggttgtgttgctcaggttgctgctgatcgagggatgcatacatttgttgtcaacatacaacttggtcatgtattttgtcacaaataccttgagaaagggatccttactacaacgcttttttgatggcgatgacgaattccgcaatagcagactaaagcttataccatccgtccctaagggctcctggatagtgcgacagagtgttggaagcaccccttgtttgttgggaaaggctgttgattgtagttatgttcgaggtcctgcgtacttggaggtggacgttgacattgggtcttcggcggtagcaaatggagttttgggtattgtgtttggtgtggtgacgacgttagtagttgatatggccttcctaatacaggccaacacatacgaggagctaccagagcaggtgataggcgcagctcggttggctcatgttgaaccggccacagcagtagttcctgatcttagcaacacatcaaacgacagtagcaacagcaacaatgacaacaacaacaacaacaacaacaacaatgggtcctcagaggatgatttgtccaagaaaacaaactaattttattttaatctagtatcagagtgttgtgttgaacatctctttaattaatcttctagctagtcactcagtggaatccagagagccaataatatatgcttctctttgtaccagctttcttgtttatatattagatccaagtattatatttgtagctagaggcaacaatatgaatagtaaccgtggttatcctaaacttgtttgccgactaggaccgggagatggtttgtttgttttaagcttttactttttacaagacatgcctatctttattttccctttgcctttatctttgaactgctgctactcaag

SEQ ID NO: 214628 - DNA, 2927 bp, Zea Mays
gggaggggaacccatgcagagtgcgagcgtttttcgcgctgccacccctccaaaccctctattgtcgtagccatgcccgatgccttgctccaccttccgtattgccaccaatcgtctcacataccacccatccatccaatcatcatgcattcacattcttcctaattgatggattattcttgcggttgagctagcggtggtgagagactttattggaggagagagacgtaggcgtgcaatcccttgtgacacgcgcggctgcccaacatgctcagctcttcgacgtctaggcgggagagcaaaagcagcgacctcttcagggccgctgccatggccctccgggatgctgccaacaagaccgctggcattgagccgaacaaagcagcatccaacaacaacgtcgccaccgtcgctgctgtatcgatcaaggaggccatcgccgccgtgcgccatgagggttggatggtccgctacggtcgcaggaagatcggcaggtcattcttccacactcgctacttcgtgcttgacaacagactgcttgcgtactacaagaagaaaccaaaggacaacatgggtggaggaccgtgggctcaaaacactccatggacaacaacaagactctatgacagctaagaaccgtaaggcctttgcttcaatggactttgacatggaacttggagggcagtttttgttttcagatcatgacagcacagctgaagatgacgaggaaaggcccactttgactcgcaaaactactatagggaacggcccccctgattcaatacatgactggaccaaagagcctgacattggtgtgtccaatcagaacgaccccaatcaattttgctccaagaagaattggcgactacttagatgccaaaatgggttgcgcatttttgaagaacttctggaagtagattaccctgtatgctccagtttctctagatttttttagtgatttgtatgatgtgtaaaacattatgtattttcttttatttgtactctattgtgttgtaggcacgaggctgcagcagagctatgagggctgttggtgtagttgaagccacatgtgaagccatttttggtcttataatgagcatggatgtaacaagatacgagtgggactgtagcttccgtaacggtagtttagttgaagaggtcgatggtcacactgcaatactatatcataggctgcatctacactggtgcccaatgctagtctggccacgagatctttgctatgctcggtattggcgtcgtaacgatgatggaagttacgttgtgttgttccgatcaacagagcatcttaaatgtggtcggcgacgaggatttgtgagggcattcattgaaagtggaggtttcaagatttctcctctcaagtgtcgcaatggaagacctcgtactcaggttcaacaccttatgcaaattgatctgaagggatggttcctgaactactctctttcctttcagtatcattctttgttgcagatactaaactgtgttgcaggtataaaatactgttatttccatacaaacaataactaacaactccatctcatcatgagaacaatatactaagctagttcgtcagtgtgatagcatagtgctgttctccaactgattcaatttggtttcttatattttgcacccactcccaggactatgtgaatatttttcccaaacagatgacatccatataaccccaaggattcctgtaatggaaagcatgttcgatgcggattcagaaccaaaaaatcgtaagcttcaagaatttgacactaaggcaaatagaaacatgggaatgattgacgaagaatcagatgatgacgatgattatcaagttcctgaagctaatatagaggaagacgtgaacaaatctcatcatgatatcaagcgcacagatgagcctacagaaaaaattgatttatcttgttttttgagtattcttcatcgtgatcccgaggagaaaagtcgcaattgttggacaatacctgatagcaagatcttcaaagttcgtagcaaaaacttcccacaagacaaatcaaagatacctgcagcaagttatctcatggagcttgcagccattgactggtttaaggacaccaaacgtatggataatgttgccaggcaaaagggttgtgttgctcaggttgctgctgatcgagggatgcatacatttgttgtcaacatacaaactaaagcttataccatccgtccctaagggctcctggatagtgcgacagagtgttggaagcaccccttgtttgttgggaaaggctgttgattgtagttatgttcgaggtcctgcgtacttggaggtggacgttgacattgggtcttcggcggtagcaaatggagttttgggtattgtgtttggtgtggtgacgacgttagtagttgatatggccttcctaatacaggccaacacatacgaggagctaccagagcaggtgataggcgcagctcggttggctcatgttgaaccggccacagcagtagttcctgatcttagcaacacatcaaacgacagtagcaacagcaacaatgacaacaacaacaacaacaacaacaacaatgggtcctcagaggatgatttgtccaagaaaacaaactaattttattttaatctagtatcagagtgttgtgttgaacatctctttaattaatcttctagctagtcactcagtggaatccagagagccaataatatatgcttctctttgtaccagctttcttgtttatatattagatccaagtattatatttgtagctagaggcaacaatatgaatagtaaccgtggttatcctaaacttgtttgccgactaggaccgggagatggtttgtttgttttaagcttttactttttacaagacatgcctatctttattttccctttgcctttatctttgaactgctgctactcaag

SEQ ID NO: 214629 - DNA, 2937 bp, Zea Mays
gggaggggaacccatgcagagtgcgagcgtttttcgcgctgccacccctccaaaccctctattgtcgtagccatgcccgatgccttgctccaccttccgtattgccaccaatcgtctcacataccacccatccatccaatcatcatgcattcacattcttcctaattgatggattattcttgcggttgagctagcggtggtgagagactttattggaggagagagacgtaggcgtgcaatcccttgtgacacgcgcggctgcccaacatgctcagctcttcgacgtctaggcgggagagcaaaagcagcgacctcttcagggccgctgccatggccctccgggatgctgccaacaagaccgctggcattgagccgaacaaagcagcatccaacaacaacgtcgccaccgtcgctgctgtatcgatcaaggaggccatcgccgccgtgcgccatgagggttggatggtccgctacggtcgcaggaagatcggcaggtcattcttccacactcgctacttcgtgcttgacaacagactgcttgcgtactacaagaagaaaccaaaggacaacatggttccactcaactcgctgctaatagacgggaattgcagggtggaggaccgtgggctcaaaacactccatggacaaatgatttatgtcttgtgcatttacaacaagaaagaaaaggagcaccagataacgatgggagcgtatgatattgaggatgcaatggcatggaaaaagaagatagaactcatcattgatcagcaacaagactctatgacagctaagaaccgtaaggcctttgcttcaatggactttgacatggaacttggagggcagtttttgttttcagatcatgacagcacagctgaagatgacgaggaaaggcccactttgactcgcaaaactactatagggaacggcccccctgattcaatacatgactggaccaaagagcctgacattggtgtgtccaatcagaacgaccccaatcaattttgctccaagaagaattggcgactacttagatgccaaaatgggttgcgcatttttgaagaacttctggaagtagattaccctgcacgaggctgcagcagagctatgagggctgttggtgtagttgaagccacatgtgaagccatttttggtcttataatgagcatggatgtaacaagatacgagtgggactgtagcttccgtaacggtagtttagttgaagaggtcgatggtcacactgcaatactatatcataggctgcatctacactggtgcccaatgctagtctggccacgagatctttgctatgctcggtattggcgtcgtaacgatgatggaagttacgttgtgttgttccgatcaacagagcatcttaaatgtggtcggcgacgaggatttgtgagggcattcattgaaagtggaggtttcaagatttctcctctcaagtgtcgcaatggaagacctcgtactcaggttcaacaccttatgcaaattgatctgaagggatggttcctgaactactctctttcctttcagtatcattctttgttgcagatactaaactgtgttgcaggactatgtgaatatttttcccaaacagatgacatccatataaccccaaggattcctgtaatggaaagcatgttcgatgcggattcagaaccaaaaaatcgtaagcttcaagaatttgacactaaggcaaatagaaacatgggaatgattgacgaagaatcagatgatgacgatgattatcaagttcctgaagctaatatagaggaagacgtgaacaaatctcatcatgatatcaagcgcacagatgagcctacagaaaaaattgatttatcttgttttttgagtattcttcatcgtgatcccgaggagaaaagtcgcaattgttggacaatacctgatagcaagatcttcaaagttcgtagcaaaaacttcccacaagacaaatcaaagatacctgcagcaagttatctcatggagcttgcagccattgactggtttaaggacaccaaacgtatggataatgttgccaggcaaaagggttgtgttgctcaggttgctgctgatcgagggatgcatacatttgttgtcaacatacaatacagcttggtcatgtattttgtcacaaataccttgagaaagggatccttactacaacgcttttttgatggcgatgacgaattccgcaatagcagactaaagcttataccatccgtccctaagggctcctggatagtgcgacagagtgttggaagcaccccttgtttgttgggaaaggctgttgattgtagttatgttcgaggtcctgcgtacttggaggtggacgttgacattgggtcttcggcggtagcaaatggagttttgggtattgtgtttggtgtggtgacgacgttagtagttgatatggccttcctaatacaggccaacacatacgaggagctaccagagcaggtgataggcgcagctcggttggctcatgttgaaccggccacagcagtagttcctgatcttagcaacacatcaaacgacagtagcaacagcaacaatgacaacaacaacaacaacaacaacaacaatgggtcctcagaggatgatttgtccaagaaaacaaactaattttattttaatctagtatcagagtgttgtgttgaacatctctttaattaatcttctagctagtcactcagtggaatccagagagccaataatatatgcttctctttgtaccagctttcttgtttatatattagatccaagtattatatttgtagctagaggcaacaatatgaatagtaaccgtggttatcctaaacttgtttgccgactaggaccgggagatggtttgtttgttttaagcttttactttttacaagacatgcctatctttattttccctttgcctttatctttgaactgctgctactcaag

SEQ ID NO: 214630 - DNA, 5351 bp, Zea Mays
ctactgtatgatttatcttttgcttggcgctcgtcatctcgccccgctccacgcccccatcgaaacacagccaaaaagccaccccgtgcaaaacacatagagctcccagtcccaacccggtcaccctccctctcctgctcctcgcatcgccggtgtcctcgacggctcgcgccgtcgcgctctcgcaaaaccctagctctgcttccctccgtcgtctcgcccgttcgattgaatcgcgccgcagaagctgttgcctctcatctctctccccgccctcctccggaaaccctagcccactccgcgaggccgcgatggcggagaggaagctggatcgaccctcggcgctcggcaaaggtgggctgtcgcttgggatcgaggaggacagggttgccgccgccatggggttcgtcgaccactcgaaagatcagcaccacctggataacagcattcccctctctcctcagtggctctacgccaaacctgctgatggaaagatctcgctgcctcatgggtcctcccttgaacttgctgaaaaggaagtgaggatgttggaaggaactgttgacaggaaagaacgaaggagaaatgcatttgatgctgacagtggtcttcgttggcttgaagaggagagggagacaagcctgcttgggagaagggagcgcaagaaggatgtggaccgggatgtggataatcgcaagattgatcgccgatctgacaatgtttctgcaagggatatcactgatccgcgtgcagctcctgcatctgaaaggtggcatgatggttccacccgtggcctggggaacgagggtcgccgggatggaaaatggtcatcaagatggggacccgatgacaaggagaaggactctaggtcagacaagaaggttgatgcagagaaggatgaaacccatgctgataaactgacattcacaggaaggctgctgtctgagtctgattcccgtgataaatggaggcctcgtcaccggcaggaaagtcattctgtcggaacagctacgcaccgtgctgctccaggctttggatccgagaaaggacgtgttaaggactcaacaaatgttggttttgccgctggaagaggaaggggaaacccgaactcagttgcatccttcaaccggccatcatctgcaggatcaatcggtgctccagctgtgcatgggaaatttgcaaaaactgctgttagtttctgctacccaagagggaagcttcttgatatatacaggcagaaaaatatgatgtcgtcgtttgatgatgtccacatgaaactggacgaaattccttctgtgacactctctactgctgcaaaacctctagcatttgttgcaccagatactgttgaagaggctctcctggaagatattagaaagggtaaagtcattagcagtgaaggaatcaatgggattggaaacaaaaaggagagggcaaaagagctcgaagttttgcaattgctgggttgggtcaagaagggtcgtcaggtttaatctcagtgaatgatgcctcctatgttgaagggacacttcctagtggtgtcagtacatctctgctgaagataagtctggaggaaaatgccatcagcaatcaacatgggattactgacacccaggaaggtttgaaaactgctgaaatcaaggaaaatgctgatcatgctcttggcactaagttacctgatgattcgaacaccctgtttgaggtaccatcctttgagcatcttcaagaacccactaggccataccaaagcaacaacatggatataaaagtgggtggccatgctaattatccagaagagttgacattatattatctggatccccaaggaggtgtgcagggtccatttctgggtgctgacataatctcttggtatgaagatggatacttcggtttggagttaccagtacgtctgtctcagtttccagatgatgttcctttccgtccacttgtcgaagtcatgccccaccttgcgcaaaagacgcaatcgcgtatacctctgccttgtgatggaaattctgagtctctggaatcatctcaaagtaaatttgaatccagtgtcccttctacttcctctgggaggactgaccaattttctatttgggattctgaaagcaatgctgttgatcctaaaagaggtgatcatgaagcatcaataccttctcgtagtggttggctgtcttcaccggaaacaggaaaggatatatcaaatactagtaatcgccagcaacacattcctgaatcagtgaatcaggatgctgaagaagtgttgtacactggtaggcctaacagcagcatgggtcaatccctacgagaccttgagaatgaccgtgcagatttccaatcgacaccacatgaccctcattctgtggctggagaagctaatttgctgcaacataatgtcccaagggacagtgatctgagtcctcttggcttactttggtctgagctggaaggacgtccaaaacaacctctctcatctaatgtacttagtgtaaatgaacgtagaaatcccaagcctacaacacccaaggacattccacctgtaaacatgagacaagggccacttagcagaatgaatgaagtttctagtgtgcgcgatgagtggcctgcaaactttggtcggctggacaacatgaatgatgcaaacatttctggcagaatccatcaggttgaagcggagcatcatttgaattttgatgggcacctgctgcttcaacagatccgacgggagcaacagcaacagcggcaggagcaattgatggcccataataatttagagttttctggtgcatttcccgggcaggtgtttgatcctttgaaccaacaccgacagcctatgaatcaacagattcctgatgtggagcatcttttgagaatccagtttgaacttgagcaacagcagcaacgccaactccaacaagagcagcaccaacggcagctacagcagcaacggcaagcccagcttttgcaacggcagcagcagcagcagcagcaacagcaacaacaaatgatccttgagcaattgttgcagcaacagctgcagggttcaaattttggcccaacaagtatggttgatcaagtcttacttcgtgaacatgtattaaatgaactgcaccagcagcctcaccatttgcaaaggcagcatgatgcagctattgaacagctcattcaagcaaaatttggtcatgggcttcatagggagcaccataatgatatgttggatgttctctcgcgttcaaatcagagacagatgcttcctttagagcagcaacttcttttaggccttcaacacgagcagcaacttaagtctcaacaattggcaaatgctctgcggcaacattcaggccaggaagaagaaaggcacttaagtggggtctggccaatggatgctgctgcccagtttatccgctcaggaaccagtccaaatcagatacacagtcgtttcgatctccttgagaaccttcagagatcgtcatcgtttgatcatcatgaacatctagaccgcagcttatccttacacgaacagttgcatatgggaggtcaaggtattcgctccctagagcggactggttctttgcctggtggtggtcctggaccaaacccagatgtcataaatgccctaacacgtcatcatggacttagtcagttggaaacacatggtgatgtataccctttagttcaaatgcctatgcttccttcaggtgttcatccccagcaacttaggcatcaggatcagcttcctggttctcacataggaaggcttgaaaggcactggtcggatgccaatggacagttacaaaacagtctaatggaatcttcacacatcaaccagttgcagattgaagcggagaaggagaggaggaatgtggaaatgaacctttctgttgacaatccacatgcatggggagcccttatgaataaagataggaatacagagcaagatttgactgatatgattcataaaaaacttgtccttcaatcacagcagtcccggggttttcctgatgtttctgttccggcatcatttcgacgtaaagatcactttgtgcaacctgttgtggagagccctctgagatcagtggacatgtcgtttgaggagtctctttctgaaaggtcactttatgcaaaatcagggcagttggcacaagaaggatcatctaatcttggtactttacccaacagtattgagaacactggaaaatttaaccttagatcaggatctggatcaatgcttgagcagaagcattttcttggaattgacgatgttcaaagtgactttctagagaccacaggtggtagaacatcagctaatcaactggttgggagtgtcaatgaattaacaaggggtaaaaggcagggttctagtgcgagtttggctggggatgatcctaatttggctgatgaaggtgttagtaaatggtctgattctggcatgtccaaaggaagctctcactccttactaaagcgctctacaaaccaacatactactacatctcagtctgttcccacagatctgtcagcaatcaggctgaagaaagcaggacttgcgtcctctgatgagaataagatggaagcaggatttgcctcagtagcccagggtatggaaggctgcgttcctagcaacaaagagacgggggcgtatggcatgccatcagccaccaacaatccagatgcctctggtcagtccttcagcgaagcgttgaagagctcgaggaagcctccgttgcagtacgatgcctccgaatctgcagactgtggcccaggtggtaagggcgcgaaaaagaaaacgaagaaaggaaagcagattgacccttctcttcttgggttcaaggtccacagtaaccggatcatgatgggcgagattgttcgagatgattagagtgtacatacgcggtaggaggtggccttagaagaatcaagattggctccaagccaaaccctaacctctgtacatgcccagccctggtgcccgctcacctcggcagaaattttgtgactgcatcttctcttagcctcttgctagctgtagtattgcccgatttctcagatttagaaaaaggagcctttcttatcggtgccccacagaagtgtcatagttttgttgatctgtgaagatatcgtagcactggagcatggaacgtttggtgtgctgttgtttcgctctgttttaataggggtaagggtctcacatgtaggagaggcctcctgctgctttggttggcattggacattgttcaactatcagatgtagaatgtcatcgcgatgtacaaacgtaataaacaaacttaggacgatcagtatcaactatatacaggcaaagagaaaaaaaacagtatcaactcttgttctt

SEQ ID NO: 214631 - DNA, 4996 bp, Zea Mays
cggacgccattgcctacggttcggtcggatcagcaccacctggataacagcattcccctctctcctcagtggctctacgccaaacctgctgatggaaagatctcgctgcctcatgggtcctcccttgaacttgctgaaaaggaagtgaggatgttggaaggaactgttgacaggaaagaacgaaggagaaatgcatttgatgctgacagtggtcttcgttggcttgaagaggagagggagacaagcctgcttgggagaagggagcgcaagaaggatgtggaccgggatgtggataatcgcaagattgatcgccgatctgacaatgtttctgcaagggatatcactgatccgcgtgcagctcctgcatctgaaaggtggcatgatggttccacccgtggcctggggaacgagggtcgccgggatggaaaatggtcatcaagatggggacccgatgacaaggagaaggactctaggtcagacaagaaggttgatgcagagaaggatgaaacccatgctgataaactgacattcacaggaaggctgctgtctgagtctgattcccgtgataaatggaggcctcgtcaccggcaggaaagtcattctgtcggaacagctacgcaccgtgctgctccaggctttggatccgagaaaggacgtgttaaggactcaacaaatgttggttttgccgctggaagaggaaggggaaacccgaactcagttgcatccttcaaccggccatcatctgcaggatcaatcggtgctccagctgtgcatgggaaatttgcaaaaactgctgttagtttctgctacccaagagggaagcttcttgatatatacaggcagaaaaatatgatgtcgtcgtttgatgatgtccacatgaaactggacgaaattccttctgtgacactctctactgctgcaaaacctctagcatttgttgcaccagatactgttgaagaggctctcctggaagatattagaaagggtaaagtcattagcagtgaaggaatcaatgggattggaaacaaaaaggagagggcaaaagagctcgaagaacctgcttctggcattgatgatgacatgggcaaagccagttttgcaattgctgggttgggtcaagaagggtcgtcaggtttaatctcagtgaatgatgcctcctatgttgaagggacacttcctagtggtgtcagtacatctctgctgaagataagtctggaggaaaatgccatcagcaatcaacatgggattactgacacccaggaaggtttgaaaactgctgaaatcaaggaaaatgctgatcatgctcttggcactaagttacctgatgattcgaacaccctgtttgaggtaccatcctttgagcatcttcaagaacccactaggccataccaaagcaacaacatggatataaaagtgggtggccatgctaattatccagaagagttgacattatattatctggatccccaaggaggtgtgcagggtccatttctgggtgctgacataatctcttggtatgaagatggatacttcggtttggagttaccagtacgtctgtctcagtttccagatgatgttcctttccgtccacttgtcgaagtcatgccccaccttgcgcaaaagacgcaatcgcgtatacctctgccttgtgatggaaattctgagtctctggaatcatctcaaagtaaatttgaatccagtgtcccttctacttcctctgggaggactgaccaattttctatttgggattctgaaagcaatgctgttgatcctaaaagaggtgatcatgaagcatcaataccttctcgtagtggttggctgtcttcaccggaaacaggaaaggatatatcaaatactagtaatcgccagcaacacattcctgaatcagtgaatcaggatgctgaagaagtgttgtacactggtaggcctaacagcagcatgggtcaatccctacgagaccttgagaatgaccgtgcagatttccaatcgacaccacatgaccctcattctgtggctggagaagctaatttgctgcaacataatgtcccaagggacagtgatctgagtcctcttggcttactttggtctgagctggaaggacgtccaaaacaacctctctcatctaatgtacttagtgtaaatgaacgtagaaatcccaagcctacaacacccaaggacattccacctgtaaacatgagacaagggccacttagcagaatgaatgaagtttctagtgtgcgcgatgagtggcctgcaaactttggtcggctggacaacatgaatgatgcaaacatttctggcagaatccatcaggttgaagcggagcatcatttgaattttgatgggcacctgctgcttcaacagatccgacgggagcaacagcaacagcggcaggagcaattgatggcccataataatttagagttttctggtgcatttcccgggcaggtgtttgatcctttgaaccaacaccgacagcctatgaatcaacagattcctgatgtggagcatcttttgagaatccagtttgaacttgagcaacagcagcaacgccaactccaacaagagcagcaccaacggcagctacagcagcaacggcaagcccagcttttgcaacggcagcagcagcagcagcagcaacagcaacaacaaatgatccttgagcaattgttgcagcaacagctgcagggttcaaattttggcccaacaagtatggttgatcaagtcttacttcgtgaacatgtattaaatgaactgcaccagcagcctcaccatttgcaaaggcagcatgatgcagctattgaacagctcattcaagcaaaatttggtcatgggcttcatagggagcaccataatgatatgttggatgttctctcgcgttcaaatcagagacagatgcttcctttagagcagcaacttcttttaggccttcaacacgagcagcaacttaagtctcaacaattggcaaatgctctgcggcaacattcaggccaggaagaagaaaggcacttaagtggggtctggccaatggatgctgctgcccagtttatccgctcaggaaccagtccaaatcagatacacagtcgtttcgatctccttgagaaccttcagagatcgtcatcgtttgatcatcatgaacatctagaccgcagcttatccttacacgaacagttgcatatgggaggtcaaggtattcgctccctagagcggactggttctttgcctggtggtggtcctggaccaaacccagatgtcataaatgccctaacacgtcatcatggacttagtcagttggaaacacatggtgatgtataccctttagttcaaatgcctatgcttccttcaggtgttcatccccagcaacttaggcatcaggatcagcttcctggttctcacataggaaggcttgaaaggcactggtcggatgccaatggacagttacaaaacagtctaatggaatcttcacacatcaaccagttgcagattgaagcggagaaggagaggaggaatgtggaaatgaacctttctgttgacaatccacatgcatggggagcccttatgaataaagataggaatacagagcaagatttgactgatatgattcataaaaaacttgtccttcaatcacagcagtcccggggttttcctgatgtttctgttccggcatcatttcgacgtaaagatcactttgtgcaacctgttgtggagagccctctgagatcagtggacatgtcgtttgaggagtctctttctgaaaggtcactttatgcaaaatcagggcagttggcacaagaaggatcatctaatcttggtactttacccaacagtattgagaacactggaaaatttaaccttagatcaggatctggatcaatgcttgagcagaagcattttcttggaattgacgatgttcaaagtgactttctagagaccacaggtggtagaacatcagctaatcaactggttgggagtgtcaatgaattaacaaggggtaaaaggcagggttctagtgcgagtttggctggggatgatcctaatttggctgatgaaggtgttagtaaatggtctgattctggcatgtccaaaggaagctctcactccttactaaagcgctctacaaaccaacatactactacatctcagtctgttcccacagatctgtcagcaatcaggctgaagaaagcaggacttgcgtcctctgatgagaataagatggaagcaggatttgcctcagtagcccagggtatggaaggctgcgttcctagcaacaaagagacgggggcgtatggcatgccatcagccaccaacaatccagatgcctctggtcagtccttcagcgaagcgttgaagagctcgaggaagcctccgttgcagtacgatgcctccgaatctgcagactgtggcccaggtggtaagggcgcgaaaaagaaaacgaagaaaggaaagcagattgacccttctcttcttgggttcaaggtccacagtaaccggatcatgatgggcgagattgttcgagatgattagagtgtacatacgcggtaggaggtggccttagaagaatcaagattggctccaagccaaaccctaacctctgtacatgcccagccctggtgcccgctcacctcggcagaaattttgtgactgcatcttctcttagcctcttgctagctgtagtattgcccgatttctcagatttagaaaaaggagcctttcttatcggtgccccacagaagtgtcatagttttgttgatctgtgaagatatcgtagcactggagcatggaacgtttggtgtgctgttgtttcgctctgttttaataggggtaagggtctcacatgtaggagaggcctcctgctgctttggttggcattggacattgttcaactatcagatgtagaatgtcatcgcgatgtacaaacgtaataaacaaacttaggacgatcagtatcaactatatacaggcaaagagaaaaaaaacagtatcaactcttgttctt

SEQ ID NO: 214632 - DNA, 5087 bp, Zea Mays
ttcgcgctgcgtgggtgcatgtgttcctatcagcaccacctggataacagcattcccctctctcctcagtggctctacgccaaacctgctgatggaaagatctcgctgcctcatgggtcctcccttgaacttgctgaaaaggaagtgaggatgttggaaggaactgttgacaggaaagaacgaaggagaaatgcatttgatgctgacagtggtcttcgttggcttgaagaggagagggagacaagcctgcttgggagaagggagcgcaagaaggatgtggaccgggatgtggataatcgcaagattgatcgccgatctgacaatgtttctgcaagggatatcactgatccgcgtgcagctcctgcatctgaaaggtggcatgatggttccacccgtggcctggggaacgagggtcgccgggatggaaaatggtcatcaagatggggacccgatgacaaggagaaggactctaggtcagacaagaaggttgatgcagagaaggatgaaacccatgctgataaactgacattcacaggaaggctgctgtctgagtctgattcccgtgataaatggaggcctcgtcaccggcaggaaagtcattctgtcggaacagctacgcaccgtgctgctccaggctttggatccgagaaaggacgtgttaaggactcaacaaatgttggttttgccgctggaagaggaaggggaaacccgaactcagttgcatccttcaaccggccatcatctgcaggatcaatcggtgctccagctgtgcatgggaaatttgcaaaaactgctgttagtttctgctacccaagagggaagcttcttgatatatacaggcagaaaaatatgatgtcgtcgtttgatgatgtccacatgaaactggacgaaattccttctgtgacactctctactgctgcaaaacctctagcatttgttgcaccagatactgttgaagaggtaatacttaggttatattcttcctactagctttaacctctaatctctctcttttttttctgtttatctaccttcttgattacttgttcaggctctcctggaagatattagaaagggtaaagtcattagcagtgaaggaatcaatgggattggaaacaaaaaggagagggcaaaagagctcgaagaacctgcttctggcattgatgatgacatgggcaaagccagttttgcaattgctgggttgggtcaagaagggtcgtcaggtttaatctcagtgaatgatgcctcctatgttgaagggacacttcctagtggtgtcagtacatctctgctgaagataagtctggaggaaaatgccatcagcaatcaacatgggattactgacacccaggaaggtttgaaaactgctgaaatcaaggaaaatgctgatcatgctcttggcactaagttacctgatgattcgaacaccctgtttgaggtaccatcctttgagcatcttcaagaacccactaggccataccaaagcaacaacatggatataaaagtgggtggccatgctaattatccagaagagttgacattatattatctggatccccaaggaggtgtgcagggtccatttctgggtgctgacataatctcttggtatgaagatggatacttcggtttggagttaccagtacgtctgtctcagtttccagatgatgttcctttccgtccacttgtcgaagtcatgccccaccttgcgcaaaagacgcaatcgcgtatacctctgccttgtgatggaaattctgagtctctggaatcatctcaaagtaaatttgaatccagtgtcccttctacttcctctgggaggactgaccaattttctatttgggattctgaaagcaatgctgttgatcctaaaagaggtgatcatgaagcatcaataccttctcgtagtggttggctgtcttcaccggaaacaggaaaggatatatcaaatactagtaatcgccagcaacacattcctgaatcagtgaatcaggatgctgaagaagtgttgtacactggtaggcctaacagcagcatgggtcaatccctacgagaccttgagaatgaccgtgcagatttccaatcgacaccacatgaccctcattctgtggctggagaagctaatttgctgcaacataatgtcccaagggacagtgatctgagtcctcttggcttactttggtctgagctggaaggacgtccaaaacaacctctctcatctaatgtacttagtgtaaatgaacgtagaaatcccaagcctacaacacccaaggacattccacctgtaaacatgagacaagggccacttagcagaatgaatgaagtttctagtgtgcgcgatgagtggcctgcaaactttggtcggctggacaacatgaatgatgcaaacatttctggcagaatccatcaggttgaagcggagcatcatttgaattttgatgggcacctgctgcttcaacagatccgacgggagcaacagcaacagcggcaggagcaattgatggcccataataatttagagttttctggtgcatttcccgggcaggtgtttgatcctttgaaccaacaccgacagcctatgaatcaacagattcctgatgtggagcatcttttgagaatccagtttgaacttgagcaacagcagcaacgccaactccaacaagagcagcaccaacggcagctacagcagcaacggcaagcccagcttttgcaacggcagcagcagcagcagcagcaacagcaacaacaaatgatccttgagcaattgttgcagcaacagctgcagggttcaaattttggcccaacaagtatggttgatcaagtcttacttcgtgaacatgtattaaatgaactgcaccagcagcctcaccatttgcaaaggcagcatgatgcagctattgaacagctcattcaagcaaaatttggtcatgggcttcatagggagcaccataatgatatgttggatgttctctcgcgttcaaatcagagacagatgcttcctttagagcagcaacttcttttaggccttcaacacgagcagcaacttaagtctcaacaattggcaaatgctctgcggcaacattcaggccaggaagaagaaaggcacttaagtggggtctggccaatggatgctgctgcccagtttatccgctcaggaaccagtccaaatcagatacacagtcgtttcgatctccttgagaaccttcagagatcgtcatcgtttgatcatcatgaacatctagaccgcagcttatccttacacgaacagttgcatatgggaggtcaaggtattcgctccctagagcggactggttctttgcctggtggtggtcctggaccaaacccagatgtcataaatgccctaacacgtcatcatggacttagtcagttggaaacacatggtgatgtataccctttagttcaaatgcctatgcttccttcaggtgttcatccccagcaacttaggcatcaggatcagcttcctggttctcacataggaaggcttgaaaggcactggtcggatgccaatggacagttacaaaacagtctaatggaatcttcacacatcaaccagttgcagattgaagcggagaaggagaggaggaatgtggaaatgaacctttctgttgacaatccacatgcatggggagcccttatgaataaagataggaatacagagcaagatttgactgatatgattcataaaaaacttgtccttcaatcacagcagtcccggggttttcctgatgtttctgttccggcatcatttcgacgtaaagatcactttgtgcaacctgttgtggagagccctctgagatcagtggacatgtcgtttgaggagtctctttctgaaaggtcactttatgcaaaatcagggcagttggcacaagaaggatcatctaatcttggtactttacccaacagtattgagaacactggaaaatttaaccttagatcaggatctggatcaatgcttgagcagaagcattttcttggaattgacgatgttcaaagtgactttctagagaccacaggtggtagaacatcagctaatcaactggttgggagtgtcaatgaattaacaaggggtaaaaggcagggttctagtgcgagtttggctggggatgatcctaatttggctgatgaaggtgttagtaaatggtctgattctggcatgtccaaaggaagctctcactccttactaaagcgctctacaaaccaacatactactacatctcagtctgttcccacagatctgtcagcaatcaggctgaagaaagcaggacttgcgtcctctgatgagaataagatggaagcaggatttgcctcagtagcccagggtatggaaggctgcgttcctagcaacaaagagacgggggcgtatggcatgccatcagccaccaacaatccagatgcctctggtcagtccttcagcgaagcgttgaagagctcgaggaagcctccgttgcagtacgatgcctccgaatctgcagactgtggcccaggtggtaagggcgcgaaaaagaaaacgaagaaaggaaagcagattgacccttctcttcttgggttcaaggtccacagtaaccggatcatgatgggcgagattgttcgagatgattagagtgtacatacgcggtaggaggtggccttagaagaatcaagattggctccaagccaaaccctaacctctgtacatgcccagccctggtgcccgctcacctcggcagaaattttgtgactgcatcttctcttagcctcttgctagctgtagtattgcccgatttctcagatttagaaaaaggagcctttcttatcggtgccccacagaagtgtcatagttttgttgatctgtgaagatatcgtagcactggagcatggaacgtttggtgtgctgttgtttcgctctgttttaataggggtaagggtctcacatgtaggagaggcctcctgctgctttggttggcattggacattgttcaactatcagatgtagaatgtcatcgcgatgtacaaacgtaataaacaaacttaggacgatcagtatcaactatatacaggcaaagagaaaaaaaacagtatcaactcttgttctt

SEQ ID NO: 214633 - DNA, 5010 bp, Zea Mays
ttcgcgctgcgtgggtgcatgtgttcctatcagcaccacctggataacagcattcccctctctcctcagtggctctacgccaaacctgctgatggaaagatctcgctgcctcatgggtcctcccttgaacttgctgaaaaggaagtgaggatgttggaaggaactgttgacaggaaagaacgaaggagaaatgcatttgatgctgacagtggtcttcgttggcttgaagaggagagggagacaagcctgcttgggagaagggagcgcaagaaggatgtggaccgggatgtggataatcgcaagattgatcgccgatctgacaatgtttctgcaagggatatcactgatccgcgtgcagctcctgcatctgaaaggtggcatgatggttccacccgtggcctggggaacgagggtcgccgggatggaaaatggtcatcaagatggggacccgatgacaaggagaaggactctaggtcagacaagaaggttgatgcagagaaggatgaaacccatgctgataaactgacattcacaggaaggctgctgtctgagtctgattcccgtgataaatggaggcctcgtcaccggcaggaaagtcattctgtcggaacagctacgcaccgtgctgctccaggctttggatccgagaaaggacgtgttaaggactcaacaaatgttggttttgccgctggaagaggaaggggaaacccgaactcagttgcatccttcaaccggccatcatctgcaggatcaatcggtgctccagctgtgcatgggaaatttgcaaaaactgctgttagtttctgctacccaagagggaagcttcttgatatatacaggcagaaaaatatgatgtcgtcgtttgatgatgtccacatgaaactggacgaaattccttctgtgacactctctactgctgcaaaacctctagcatttgttgcaccagatactgttgaagaggctctcctggaagatattagaaagggtaaagtcattagcagtgaaggaatcaatgggattggaaacaaaaaggagagggcaaaagagctcgaagaacctgcttctggcattgatgatgacatgggcaaagccagttttgcaattgctgggttgggtcaagaagggtcgtcaggtttaatctcagtgaatgatgcctcctatgttgaagggacacttcctagtggtgtcagtacatctctgctgaagataagtctggaggaaaatgccatcagcaatcaacatgggattactgacacccaggaaggtttgaaaactgctgaaatcaaggaaaatgctgatcatgctcttggcactaagttacctgatgattcgaacaccctgtttgaggtaccatcctttgagcatcttcaagaacccactaggccataccaaagcaacaacatggatataaaagtgggtggccatgctaattatccagaagagttgacattatattatctggatccccaaggaggtgtgcagggtccatttctgggtgctgacataatctcttggtatgaagatggatacttcggtttggagttaccagtacgtctgtctcagtttccagatgatgttcctttccgtccacttgtcgaagtcatgccccaccttgcgcaaaagacgcaatcgcgtatacctctgccttgtgatggaaattctgagtctctggaatcatctcaaagtaaatttgaatccagtgtcccttctacttcctctgggaggactgaccaattttctatttgggattctgaaagcaatgctgttgatcctaaaagaggtgatcatgaagcatcaataccttctcgtagtggttggctgtcttcaccggaaacaggaaaggatatatcaaatactagtaatcgccagcaacacattcctgaatcagtgaatcaggatgctgaagaagtgttgtacactggtaggcctaacagcagcatgggtcaatccctacgagaccttgagaatgaccgtgcagatttccaatcgacaccacatgaccctcattctgtggctggagaagctaatttgctgcaacataatgtcccaagggacagtgatctgagtcctcttggcttactttggtctgagctggaaggacgtccaaaacaacctctctcatctaatgtacttagtgtaaatgaacgtagaaatcccaagcctacaacacccaaggacattccacctgtaaacatgagacaagggccacttagcagaatgaatgaagtttctagtgtgcgcgatgagtggcctgcaaactttggtcggctggacaacatgaatgatgcaaacatttctggcagaatccatcaggttgaagcggagcatcatttgaattttgatgggcacctgctgcttcaacagatccgacgggagcaacagcaacagcggcaggagcaattgatggcccataataatttagagttttctggtgcatttcccgggcaggtgtttgatcctttgaaccaacaccgacagcctatgaatcaacagattcctgatgtggagcatcttttgagaatccagtttgaacttgagcaacagcagcaacgccaactccaacaagagcagcaccaacggcagctacagcagcaacggcaagcccagcttttgcaacggcagcagcagcagcagcagcaacagcaacaacaaatgatccttgagcaattgttgcagcaacagctgcagggttcaaattttggcccaacaagtatggttgatcaagtcttacttcgtgaacatgtattaaatgaactgcaccagcagcctcaccatttgcaaaggcagcatgatgcagctattgaacagctcattcaagcaaaatttggtcatgggcttcatagggagcaccataatgatatgttggatgttctctcgcgttcaaatcagagacagatgcttcctttagagcagcaacttcttttaggccttcaacacgagcagcaacttaagtctcaacaattggcaaatgctctgcggcaacattcaggccaggaagaagaaaggcacttaagtggggtctggccaatggatgctgctgcccagtttatccgctcaggaaccagtccaaatcagatacacagtcgtttcgatctccttgagaaccttcagagatcgtcatcgtttgatcatcatgaacatctagaccgcagcttatccttacacgaacagttgcatatgggaggtcaaggtattcgctccctagagcggactggttctttgcctggtggtggtcctggaccaaacccagatgtcataaatgccctaacacgtcatcatggacttagtcagttggaaacacatggtgatgtataccctttagttcaaatgcctatgcttccttcaggtgttcatccccagcaacttaggcatcaggatcagcttcctggttctcacataggaaggcttgaaaggcactggtcggatgccaatggacagttacaaaacagtctaatggaatcttcacacatcaaccagttgcagattgaagcggagaaggagaggaggaatgtggaaatgaacctttctgttgacaatccacatgcatggggagcccttatgaataaagataggaatacagagcaagatttgactgatatgattcataaaaaacttgtccttcaatcacagcagtcccggggttttcctgatgtttctgttccggcatcatttcgacgtaaagatcactttgtgcaacctgttgtggagagccctctgagatcagtggacatgtcgtttgaggagtctctttctgaaaggtcactttatgcaaaatcagggcagttggcacaagaaggatcatctaatcttggtactttacccaacagtattgagaacactggaaaatttaaccttagatcaggatctggatcaatgcttgagcagaagcattttcttggaattgacgatgttcaaagtgactttctagagaccacaggtggtagaacatcagctaatcaactggttgggagtgtcaatgaattaacaaggggtaaaaggcagggttctagtgcgagtttggctggggatgatcctaatttggctgatgaaggtgttagtaaatgatgtccatgtgcaggtctgattctggcatgtccaaaggaagctctcactccttactaaagcgctctacaaaccaacatactactacatctcagtctgttcccacagatctgtcagcaatcaggctgaagaaagcaggacttgcgtcctctgatgagaataagatggaagcaggatttgcctcagtagcccagggtatggaaggctgcgttcctagcaacaaagagacgggggcgtatggcatgccatcagccaccaacaatccagatgcctctggtcagtccttcagcgaagcgttgaagagctcgaggaagcctccgttgcagtacgatgcctccgaatctgcagactgtggcccaggtggtaagggcgcgaaaaagaaaacgaagaaaggaaagcagattgacccttctcttcttgggttcaaggtccacagtaaccggatcatgatgggcgagattgttcgagatgattagagtgtacatacgcggtaggaggtggccttagaagaatcaagattggctccaagccaaaccctaacctctgtacatgcccagccctggtgcccgctcacctcggcagaaattttgtgactgcatcttctcttagcctcttgctagctgtagtattgcccgatttctcagatttagaaaaaggagcctttcttatcggtgccccacagaagtgtcatagttttgttgatctgtgaagatatcgtagcactggagcatggaacgtttggtgtgctgttgtttcgctctgttttaataggggtaagggtctcacatgtaggagaggcctcctgctgctttggttggcattggacattgttcaactatcagatgtagaatgtcatcgcgatgtacaaacgtaataaacaaacttaggacgatcagtatcaactatatacaggcaaagagaaaaaaaacagtatcaactcttgttctt

SEQ ID NO: 214634 - DNA, 3976 bp, Zea Mays
ctactagtttgcaaagcacgttgggccttgagagcccatatatcccggtacagcaagcaattcagggagcggaagcggccgatccgcggggcgacgaaccgggtacacacgacacgacaaagagaggatgcatgcaccaccatgcgcgggagggggaagaggagtcagtgagacgaggccgcggaaccccgtgccatcggatcgaggcagacgatgcccgtgcaggacgacgacgagagcgtctcttggttggtgcatggctccgccggggacgcgccggcggtgctgctgcacggcagcctggacatctggatccacgaggcgaggaaccttcccaacaaggacatcctgtccaagaggatgcgggacctgctgtgcaagccgtcggagggcatgaccagcgacccgtacgtgacggtgcaggtcgcctccgcggtggtggcgcgcaccttcgtcatccccgacgacgagaaccccgtgtgggcgcagcagttcctggtgcccgtcgcgcacgaggccgccaccgtcaacttcgtcgtcaaggacagcgacgtcgtgggcgcggagctcatcggcgtcgtcgccgtccgcgccgaccagctgcaggccggggacatggtcgagggcgcgtacccggtcctggagcgcaacggcaaggagtgcgcgccgggggccgtgctccggctgtccgtgcagtacgtgcccgtggcgaggctcaccatgtaccaccacggcgtcaccccgggcccggacttcgccggcgtgcccaggacctacttcccgctgcgccggggcgggaaggtcacgctgtaccaggacgcgcacgtgcccgacggaacgctgccggaggtaaggctcggcaacggcgactgctaccggcacggccagtgctggcgcgacgtctacgacgccatatgccaggcccggaggctcatctacatcaccgggtggtccgtgttccacaccatccacctggtgcgcgacggccacgacgacatggcgctcggcgacctgctcaggaggaagtcgcaggagggcgtgcgggtgctgctgctcgtgtgggacgatcccacgtcccggagactccttggcatcaagatggaaggttacatgggcacaagggatgaggagacccggagatttttcaagcactcttcggtccagatactgctttgcccacgatctgcagggaagaggcacagctgggtgaagcaacaggaaacaggcactatctttactcatcaccagaagacagtgatcttggatgctgatgctgggaatcatagaaggaagattgttgcttttgtgggaggacttgatctatgtggaggccggtcgcataatgattcgctgctgtggatcaacaagatacctgatattatcgctattgacgacgaaatctattcaaacgacgatgatccagagagatgggacgtgcagattttccggtcaattgattcgaattctgtcaagggttttccaaaagatccacgggaggccactagtaagaatcttgtttgtgggaaaaatgtactgattgatatgagcgtgcatacagcatatgtgaatgccatccgaggtgctcaacatttcatctatattgagaaccagtacttccttggctcttcatttaactgggattcacatagagatgttggtgctaataatctgatacccattgagatagcactgaaaattgcaaacaagatttattcgaatgagagattttcagcttatatagtagttccaatgtggcctgagggaaatcctactggtactcctacgcaaaggattctttattggcagaaaatgacaatgcaaatgatgtatgagataatctataaggccttgaaagaagtaggactagatggtacatatgagccacaggattacctgaatttcttctgccttggtaaccgtgaagctgaggacactacttgcacatctagtggaccattctcagccagtaacccacaggaccaagctcggaagaataggagattcatggtgtatgtgcactcgaaaggcatgattgtggatgatgaatatgtgataattggatccgctaacatcaaccagagatccatggaaggaactagagatacagagattgcaatggctgcataccaaccccagcatacatgggcaaatatgctttctgctcctcgtggacagattttcgggtacaggatgtctctatgggcagagcacattggagccattgaggagagcttcaccagaccggagagcctagagtgcacgaggcaggtgcgtcacatcggacagcagaactgggagaaattcatctccagccatgtgaccgagatgaagggccacctgctcaagtaccccgtcagcatcgattccaggggcaaggtgaatcctctgtctgggtgtgccacattcccagatcttggcgggaacatctgcggctccttcctgaatatccaagagaacctcacaatatgagcagtgcttataggtcacccaagtcactgcagtgacattgaccccaccttcagcattgtatcagcagaaaagaaaactccatatttcctgaatcgattcaagagatcacctagctttctgtaggaaggtcaacaccagagattaataggttagtaccttgtaaccaacaacagggtcatcagtggttcgtcagttcagttcgcatggtgcatccaagcaaaatctaaatgtgactgctattttatatctaactcttccatctgatacataccacctattttacatttaactccttcgacctaaaataccagttactactttggccccattcatccatgagggtgaagaggtcggaacgatgttcctttatctaaaaaatcagttactactggattttgaccaacatgattattacattggacatgttcccatttttttgaagttaaacaatagtgcatctggctctatacttttgtaagtaaggcctcctttgggttgaagtataaattcctgaatcttgcgtttttcttgtgtttttgaactaattcatgtaaaattttttatagcattccaaaggagacctaaaagtagtttctgcataagataaaaaaggattgtagctcacctgcaggtgctactaacctactacttacaatcatctgacatatataatggaaagaatatccggattcgaatcggactaccttatccgacaacgaccgaatcgagtttaccaaaggaattcgacattttcaaaattggctaacccagcgtttggaagtcagtattgcagcgtggaattcggaattggcatttgtctgtacgaatactgttgtttggttggcgccggaattcgacggtggaattgcacgtcaataccgaggtggaattgcagcacacacgccgtcaattccgagggctacccctctgatttgcacagaattgaggtccatttcaataccgaggtagaattggtatttggatccatttcaattctatggatgtctacatccaaacggagcctaagcgcatttcgaaggagtagctcaaatatgttagtgaaacaaccgtcatttaattaatcaatctgataaatctcgcaagcaccgtagtagcagcaggaatccgaaataaggggaaccggacgtcgatagaacgagataatcacctgtagacgcccaccgggcgaacctccgagttccgccgctaccaggaaccgggagcaagcacctgtctccccactgattgattcatccgttgcggagcaacgccacgtaatcgaccccaacctccgtttcttcaccatgagctgcacactggtgcgtcgagattatggaacgaactcggttcagcgagtgttaggaggcgggcgaggggggacactgcagcatcggggtccggattagtattctagtagggcgcgcgacaggtgatatccgacgaaaggggaggcgaggccgcggaaggagcagaaccccatcgacgacgatggacggacgcatcggaa

SEQ ID NO: 214635 - DNA, 2233 bp, Zea Mays
ccgaaacgtccaaagaaaaaagagggaggaaacccaccgacccctgctcgctcaacacgcaacgacgcgcctcggcctcgcagaaacaggggccaaaaaggaaaagagaaaagaggaaaagaacgcagggaatgggcaagcagcagcaggcgccaccggcgcggcggtccacggcgatgtcggcgcctccgccaccgaagcgccggaagaagaagggccggccttccctcctcgacctccagaagcggagcctccgcctcgagcagcagctccagcagcagcagcccaaggggcgacgctccaaccgccggagcgccggctccgcggacgaggacgacgacggccccgcctccggctccggccgccgcgagaagaagctgcgcctcgtcatgggcctccacgacggatcacccaagcaggtagaaaagacgaggaaagcgacggatgggcatgaagagccgtcagattccgggcccacaacacctttgccaaacaaaaagttattgctcttcatccttgataggctacagaagaaggatacatatggtgtattttcagagcctgttgatcctgaagagctacctgactatcatgacattgtaaagcatccgatggatttttcgacaatacgtaagaagctcgataagggtgcctattccaacttggagcaatttgaggacgatgtgttcctgataagcaccaacgcgatgtgctacaattcaccagatacaatatactatcgacaggcacgaggtattcaagagatcgctaaaaaggattttgagaatcttaggcaagatagtgatgccagtgatccagaaccggaaccagaattggagctggagccagaaccagaagaaccaaagccacagcctcgcaggggcaggcctccaaacaagaacaatgccaaacagaaagttgggaagccaccaacagaacgtgctactgcagatttttctggtgcaacgcttgctactgccgcaaatattggacgccatgcacaggcagatgttgatctgtcacgaagagcaatggataaagcgatgatggatatgctgagagcttcttttgccaatagaaggaatgagcataattggtctggcgagcggaaatttgaaagatttgaagagtgctcaggggtacatggtccgcaaaaatggggaagaggccaattctgatggaagatagtcgccgaagcacatattgtgagactcaaccatccaattcaatatatgagctgccggtatcgtcatcctacaatgggacaaagaagctgctagtaccagttggggttcagttacagcagtcctattcccgcagcttggcacgatttgctgcacaacttggtcctgtgtgctgggagattgcatcaaggcgaattgaacgaagccttgctcctggaacaaagtttggtcgcgggtgggtaggagatggcgaaacaccaaactcttttcagccacccgtactagctgcattttcagaaacaacgacaccgcaagaccgtacagcagcttcaggtgagcagccatgcccatctatgagcagccctcctgccaccgaggcctgtgctggcaacgacagaagccatttggcgggatctcagccagatgctacgccatatgcttctaccagcacaacgcagaggatgagttccgaagcattagcaagccagcaatgtggatcactaccacaaatttcgataaaccgagctgaacgtacccttgagatgatgaagggcagccccaataatcttcacggacacccaggcatgcagcaaactgcgaatggtttcaatgctgttccaggaccaatgatgttcccacatgtggctcaactggtggtgaatcagatgcagacacatacggctgattgataacgttgtgtgtgtgtgccggggggcggggggtgtcgcctttgatccgtcgtgcctcaacctggggctgcaactgtgagcctgttgtgtaattgcttaagtagtcattaggatgatagcgtgcatagatgtgttgggtggatgctgtaacagcggtgaccggtgagttgcgattctgaatgtgtagcagaaaaaccacaggcgaaatgaaacatctgtatagattatcgaggaatttttttagcatgaaaccgtgcgaatcagtttgtctattgtctgtatggtttatatacatcaacctgacggtgttctcggactgcagatgccacaatgtagataagaagtactgcttccgttctt

SEQ ID NO: 214636 - DNA, 697 bp, Zea Mays
tgattatttcccagcactcaggaatgttttcagactgattgggaaagtgggtactacccacttacccttcatttcagtgaagattacccaagcaagcctcccaaatgcaagttcccacagggttttttccacccaaatgtttatccttcaggaacagtctgcctctcaattctcaatgaggatagtggttggagacctgctatcactgttaagcagattctagttggaatacaagacttgcttgatcagcccaatccagctgatcctgcccaaactgatggttatcacctattcatccaggatccaacagaatataagcgacgtgttcgtctgcaggccaagcaatatcctgctctggtctgaggatgttggcataccagagatccatgatccatcctgcacatccgcatagtagttgcaaatgttaaaattatggtctcaaattggatttgacaagacataagttgtctggaggattgtccagtgtaaacctgaaccttctatgatgtgtatgagtccagtattgatagcaagaacagattcgtttactgctgggagtgctgcagccactgatattttgtctatttaacttaaactatttgttgtgttggtgctctatcttgaagacatgtttcgtttgtttatcgaaggaggttatccgcttttgtctaaacagaataaaataaaagactaaaaa

SEQ ID NO: 214637 - DNA, 5123 bp, Zea Mays
accacagcctccgctcaacggcaggagaatcacggcgagcgcgtgctcgtgggcacccctctccatcaactggggtgcgcgatcgatcgatcaaaaccccaatccagccttctatttccgatcgagacgcaaacgaagcaggtagaaggccaaggccagcgcagacacggatggcgatgggagcgacggttcgcgcagcggctgcagatgccatggtgacgttcttgtgggtgttgtgcgcctccgcgctcgatgtctccatagcagccgtcacgtcgtaccaggggttgcaggagggcaccggccactatgcgctcctcgtcaccacgtccctcctctcggtgctcctcttcaccttcgacctcctctacggtgtgctcggtggtgccagcttcaacttcactgactttgccacctcctattccgccggactcgatagcccctccctcttctctgttgcgctccacttcctggcacggactgtcgtggtggtgaagaggaccactttgcgcgtggctcggaaggatgcctatatggcagagttagatttgtttgctaaaggattgcatgaaaggctggttcctttcctgggtcactgtcttgataaagaagaagaaaaggttcatgtgtataggtttgtccaaaatggtgacttgtcaagtgcactacacaaaaagtcaagggaggaagatgaaggcttgcaatctttggactggataaagaggttgaagattgcaacgggggtagctgaggctctttgctatctgcatcatgaatgttctccaccgatggttcatagggatgtgcaagccagcagcatccttcttgatgataaatttgatgtacgccttggtagcttgagcgagcttcctgcaattgaatcagtcttgaatgctatgaagagcaatacaaatcagcgagtatctccaatatttgctcttgtcctatgccctacaagagagcttgctattcagcttacagctgaagcaaatgtcttgttaaagtaccatgaaggaattggtgttcaatctcttattggtggcactagattcaagcttgatcagagacgattagaatctgatccatgccagccagatcatctattagatgaaaccaaccgtgctggaagcaagattagggtggaaagggctgagcgaagctcctacacgtttcaatcacagttagatggcggtgcacagttctgtgtatcacaagaggcatctaggttgacctcgctcttcttagtgttcatgcccactgcgcaagacaacaccacaacgccgatggagttggaagatttcatcaggctcgactcgatctggatgagatggactctgctcgctgaggaccgaacaccgaagccaggcagccagccgaggaagccaggcgacaggcgacgccaagtcgagaacaccctaggtggtcgctcgcaggctgcgagtgagagccgtggcggagtcgccgtccttgcccacggaggaggacacagccgccggcgcagtgggatggcgacgccgacgcccatgcccggaagcgaggggacgctcgtggcggtgatgccgcggtccccgtccccgacgccggcggaggcggggacctcggcgaccgagacgcccgtgctaatattcctttacttccacaaggcgatccgcgcggagctcgaggcgctgcacggcgccgccgtgctcctggccaccgagcgcaccggcgatgtcgcggcgctcgccgagcgctgccgctttttcttcagcatctacaaacaccactgcgatgccgaggacgcggtcatctttccagcacttgacatccgagtaaagaatgttgcagggacctattccttagagcataaaggagaaagcgatctttttagccagttatttgatctcctggaattggacatacagaatgatgatgctcttcgtagggagcttgcgtcatgtacaggcgcgatacaaacgtgtctcagccaacatatgtccaaggaggaagaacaggtctttccattgctgacaaagaaattttcatgtgaagaacaagctgatttagtgtggcaattcctctgcaacattcctgtcaatatggtagcagagttccttccatggctttcaacttctgtcacatctgatgagcaccaagacatccgtgactgcttatgtaaagtagttcctgatgagaaacttctccaacaggttgtattcacatggatggaggggaaagcagcaagagaagtggcagagagctttgccactggtaatttagtaagaaatcatagtgctgaggatgtctcagaccatggggagatttatgtttgttcacagcaagaatctaaacttgggagtaaaaactgtgcagaatctaatggttctcaagccgacaggcatcctatagatgatattttatactggcacaacgctatccgcatggagttacatgatataaaaaaagaaacaagaagggtgcaacagtctgggaatttttctgatatatcagccttcaatgagaggcttcagttcattgcagatgtatgcatctaccacagtatcgctgaggatcaggttgtttttcctgcagtcgatagtgagctgtcctttgtgcaggagcatgctgaagaagaacacaggtttaacaatttcaggtgtttaattcagcaattccaaatagcaggagccaaatcaactgcactggacttctactcaaaactgtgttcacatgctgataaaatattggagacaatcgaaaaacacttcagcaatgaagaaaccaaggtgcttcctcaagctaggatgtttttctctcctgaaaagcaaagggaactttcgtacaaaagtctgtgtgttatgccattgaaattattggaacgtgttttaccatggttggtgtcaaagctgagtgatgagcaggcaacttcatttcttcagaatatacgattggcagcatcaccatctgaaactgcactggtcactcttatctctggttgggcatgcaaaggccgggacaaatccaaatctggagaatatttatgcttaacatcaggtacagcaagatgcctgtcagatgatgtagatgatcagggaaaatgccgatcattctgcccatgtgcttcacacaacagctcagatctttctctgcagctacaaactgaaaatggttctaggccaggcaagcgaggaaaagatgcagtatcttttcctggtactaatggaagctactgctctcaaactgctgacattgatgcaagtccatgtagcaaaaagccttgttgtattcctgggttgagagtaaagagtagcaaccttggtattggttccctggcttctgtgaagtcctttcgctctttaccatacaattctactgctccttcaatatattcgagcctcttctcatgggagacagatgcatcattgtcttgttcggatggcatttcaaggccaattgatacaatattcaaatttcataaggcaattcgcaaggatttagagtacttagatgttgaatctggaaggctcattgatggtgatgagtcttgccttcgccaattcattggaaggttccgtttgttatggggtctttacagggctcacagcaatgctgaggatgaaattgtgttcccagcattggaatccagagaaacattgcacaatgtgagccattcatatactcttgaccacaagcaggaagaacaattattcgaagatatctctgatgttctctttcagctttcacaactacatgatagccagggccatgcccagactaaagttaatgaagtaaagcaaagctgtttccattcatctaatgacgttgattttactaggaagtataatgagcttgccacaaaacttcaggccatgtgcaagtctatccgggtcgccttgactaatcatgtccatagagaagaacttgaattgtggccgttgtttgacaaacatttttctgtggaggagcaagataaacttgtaggtcgtataattggttcaacaggtgctgaggttctccaatctatggtaccctgggttacatcagctctcactcaagaggagcagaacaaaatgcttgatacctggaagcaagcaacaaaaaatacaatgtttggggaatggctaaacgagtggtggaagggagctggaacatctgattcttcagcagaggcaccctctgctccagaagatagtcatttacaagataagcttgaacaaaatgaccagatgtttaagcctggctggaaggacatatttcgaatgaaccagagtgaacttgaggctgaggtgcgaaaggtttcacgagatcctacacttgacccaaggcggaaggcctatctaattcaaaatctcatgacaagccgctggatagctgctcagcaaaagttaccggaaccaaattctgaagaatgtagtgatgatgctagtatacctggatgtgcgccttcatatcgagaccaggagaaagaaatttatggttgtgaacattacaaacggaactgcaaacttgttgctgcatgctgcaacaagctgttcacatgcagattttgccatgataaagttagtgaccatacaatggaaaggaaagcaacacaggaaatgatgtgcatggtgtgcctaaagattcaacccgttggtccgttctgccaaaccccatcttgtaacagactatcgatggcaaagtactactgcaacatctgcaaatttttcgatgacgaaaggactgtgtaccactgcccgttttgtaatttgtgtcgtcttgggaaaggtcttggtgttgatttctttcattgcatgaaatgcaactgctgtcttggaatgaaattaactgagcacaaatgtcgggaaaaagggctagagacaaattgtccaatatgctgtgacttcctgtttacatcaagtgccgcagtcagagccctcccttgcggccacttcatgcattcagcttgctttcaggcatacacttgtagccactacacttgtcctatctgctgcaaatctctgggagatatggcgttcttttttgactcgtgagcggaaaacctgccaatcatcttgcttcaatgcctcagaatagcaatgtagcatcagtttatcggaagtgaaacacaatcttttcttaacttgaattcgctgtgagtctga

SEQ ID NO: 214638 - DNA, 5380 bp, Zea Mays
accacagcctccgctcaacggcaggagaatcacggcgagcgcgtgctcgtgggcacccctctccatcaactggggtgcgcgatcgatcgatcaaaaccccaatccagccttctatttccgatcgagacgcaaacgaagcaggtagaaggccaaggccagcgcagacacggatggcgatgggagcgacggttcgcgcagcggctgcagatgccatggtgacgttcttgtgggtgttgtgcgcctccgcgctcgatgtctccatagcagccgtcacgtcgtaccaggggttgcaggagggcaccggccactatgcgctcctcgtcaccacgtccctcctctcggtgctcctcttcaccttcgacctcctctacggtgtgctcggtggtgccagcttcaacttcactgactttgccacctcctattccgccggactcgatagcccctccctcttctctgttgcgctccacttcctggcacggactgtcgtggtggtgaagaggaccactttgcgcgtggctcggaaggatgcctatatggcagagttagatttgtttgctaaaggattgcatgaaaggctggttcctttcctgggtcactgtcttgataaagaagaagaaaaggttcatgtgtataggtttgtccaaaatggtgacttgtcaagtgcactacacaaaaagtcaagggaggaagatgaaggcttgcaatctttggactggataaagaggttgaagattgcaacgggggtagctgaggctctttgctatctgcatcatgaatgttctccaccgatggttcatagggatgtgcaagccagcagcatccttcttgatgataaatttgatgtacgccttggtagcttgagcgagcttcctgcaattgaatcagtcttgaatgctatgaagagcaatacaaatcagcgagtatctccaatatttgctcttgtcctatgccctacaagagagcttgctattcagcttacagctgaagcaaatgtcttgttaaagtaccatgaaggaattggtgttcaatctcttattggtggcactagattcaagcttgatcagagacgattagaatctgatccatgccagccagatcatctattagatgaaaccaaccgtgctggaagcaagattagggtggaaagggctgagcgaagctcctacacgtttcaatcacagttagatggcggtgcacagttctgtgtatcacaagaggcatctaggttgacctcgctcttcttagtgttcatgcccactgcgcaagacaacaccacaacgccgatggagttggaagatttcatcaggctcgactcgatctggatgagatggactctgctcgctgaggaccgaacaccgaagccaggcagccagccgaggaagccaggcgacaggcgacgccaagtcgagaacaccctaggtggtcgctcgcaggctgcgagtgagagccgtggcggagtcgccgtccttgcccacggaggaggacacagccgccggcgcagtgggatggcgacgccgacgcccatgcccggaagcgaggggacgctcgtggcggtgatgccgcggtccccgtccccgacgccggcggaggcggggacctcggcgaccgagacgcccgtgctaatattcctttacttccacaaggcgatccgcgcggagctcgaggcgctgcacggcgccgccgtgctcctggccaccgagcgcaccggcgatgtcgcggcgctcgccgagcgctgccgctttttcttcagcatctacaaacaccactgcgatgccgaggacgcggtcatctttccagcacttgacatccgagtaaagaatgttgcagggacctattccttagagcataaaggagaaagcgatctttttagccagttatttgatctcctggaattggacatacagaatgatgatgctcttcgtagggagcttgcgtcatgtacaggcttttctttccttcctctccctgcttctgttctgctgtttatcaggctggtctttccattgctgacaaagaaattttcatgtgaagaacaagctgatttagtgtggcaattcctctgcaacattcctgtcaatatggtagcagagttccttccatggctttcaacttctgtcacatctgatgagcaccaagacatccgtgactgcttatgtaaagtagttcctgatgagaaacttctccaacaggttgtattcacatggatggaggggaaagcagcaagagaagtggcagagagctttgccactgaatctaatggttctcaagccgacaggcatcctatagatgatattttatactggcacaacgctatccgcatggagttacatgatataaaaaaagaaacaagaagggtgcaacagtctgggaatttttctgatatatcagccttcaatgagaggcttcagttcattgcagatgtatgcatctaccacagtatcgctgaggatcaggttgtttttcctgcagtcgatagtgagctgtcctttgtgcaggagcatgctgaagaagaacacaggtttaacaatttcaggtgtttaattcagcaattccaaatagcaggagccaaatcaactgcactggacttctactcaaaactgtgttcacatgctgataaaatattggagacaatcgaaaaacacttcagcaatgaagaaaccaaggtgcttcctcaagctaggatgtttttctctcctgaaaagcaaagggaactttcgtacaaaagtctgtgtgttatgccattgaaattattggaacgtgttttaccatggttggtgtcaaagctgagtgatgagcaggcaacttcatttcttcagaatatacgattggcagcatcaccatctgaaactgcactggtcactcttatctctggttgggcatgcaaaggccgggacaaatccaaatctggagaatatttatgcttaacatcaggtacagcaagatgcctgtcagatgatgtagatgatcagggaaaatgccgatcattctgcccatgtgcttcacacaacagctcagatctttctctgcagctacaaactgaaaatggttctaggccaggcaagcgaggaaaagatgcagtatcttttcctggtactaatggaagctactgctctcaaactgctgacattgatgcaagtccatgtagcaaaaagccttgttgtattcctgggttgagagtaaagagtagcaaccttggtattggttccctggcttctgtgaagtcctttcgctctttaccatacaattctactgctccttcaatatattcgagcctcttctcatgggagacagatgcatcattgtcttgttcggatggcatttcaaggccaattgatacaatattcaaatttcataaggcaattcgcaaggatttagagtacttagatgttgaatctggaaggctcattgatggtgatgagtcttgccttcgccaattcattggaaggttccgtttgttatggggtctttacagggctcacagcaatgctgaggatgaaattgtgttcccagcattggaatccagagaaacattgcacaatgtgagccattcatatactcttgaccacaagcaggaagaacaattattcgaagatatctctgatgttctctttcagctttcacaactacatgatagccagggccatgcccagactaaagttaatgaagtaaagcaaagctgtttccattcatctaatgacgttgattttactaggaagtataatgagcttgccacaaaacttcaggccatgtgcaagtctatccgggtcgccttgactaatcatgtccatagagaagaacttgaattgtggccgttgtttgacaaacatttttctgtggaggagcaagataaacttgtaggtcgtataattggttcaacaggtgctgaggttctccaatctatggtaccctgggttacatcagctctcactcaagaggagcagaacaaaatgcttgatacctggaagcaagcaacaaaaaatacaatgtttggggaatggctaaacgagtggtggaagggagctggaacatctgattcttcagcagaggcaccctctgctccagaagatagtcatttacaagataagcttgaacaaaatgaccagatgtttaagcctggctggaaggacatatttcgaatgaaccagagtgaacttgaggctgaggtgcgaaaggtttcacgagatcctacacttgacccaaggcggaaggcctatctaattcaaaatctcatgacaagccgctggatagctgctcagcaaaagttaccggaaccaaattctgaagaatgtagtgatgatgctagtatacctggatgtgcgccttcatatcgagaccaggagaaagaaatttatggttgtgaacattacaaacggaactgcaaacttgttgctgcatgctgcaacaagctgttcacatgcagattttgccatgataaagttagtgaccatacaatggaaaggaaagcaacacaggaaatgatgtgcatggtgtgcctaaagattcaacccgttggtccgttctgccaaaccccatcttgtaacagactatcgatggcaaagtactactgcaacatctgcaaatttttcgatgacgaaaggactgtgtaccactgcccgttttgtaatttgtgtcgtcttgggaaaggtcttggtgttgatttctttcattgcatgaaatgcaactgctgtcttggaatgaaattaactgagcacaaatgtcgggaaaaagggctagagacaaattgtccaatatgctgtgacttcctgtttacatcaagtgccgcagtcagagccctcccttgcggccacttcatgcattcagcttgctttcaggcatacacttgtagccactacacttgtcctatctgctgcaaatctctgggagatatggcggtgtattttggcatgcttgatgccttgttggctgctgaagagcttccggaggaataccgtgataggtgtcaggatatactgtgcaatgactgtgagaggaaaggcagatgtcgatttcactggctataccacaaatgcggctcctgtgggtcgtacaatacccgagttatcaagactgacactgcagattgctccacaccaaattagctggagggaacatttgtgcttatttgtagcctttttttttctcttatgtaaatatcttctagcgggaaggaaaaaagagatgtcctgtaggatagttaacataatttcattcgtagcgatatcagttttgtaagtgtagcagtttacaatttactaggtctagtgcgttgtactgccaaaatggacggttctgctggacaaaggacataatccgagaaaataggctagttagaacaattgctcgcgtgcatgttctacatatttcgcggttcacgtatagc

SEQ ID NO: 214639 - DNA, 5351 bp, Zea Mays
accacagcctccgctcaacggcaggagaatcacggcgagcgcgtgctcgtgggcacccctctccatcaactggggtgcgcgatcgatcgatcaaaaccccaatccagccttctatttccgatcgagacgcaaacgaagcaggtagaaggccaaggccagcgcagacacggatggcgatgggagcgacggttcgcgcagcggctgcagatgccatggtgacgttcttgtgggtgttgtgcgcctccgcgctcgatgtctccatagcagccgtcacgtcgtaccaggggttgcaggagggcaccggccactatgcgctcctcgtcaccacgtccctcctctcggtgctcctcttcaccttcgacctcctctacggtgtgctcggtggtgccagcttcaacttcactgactttgccacctcctattccgccggactcgatagcccctccctcttctctgttgcgctccacttcctggcacggactgtcgtggtggtgaagaggaccactttgcgcgtggctcggaaggatgcctatatggcagagttagatttgtttgctaaaggattgcatgaaaggctggttcctttcctgggtcactgtcttgataaagaagaagaaaaggttcatgtgtataggtttgtccaaaatggtgacttgtcaagtgcactacacaaaaagtcaagggaggaagatgaaggcttgcaatctttggactggataaagaggttgaagattgcaacgggggtagctgaggctctttgctatctgcatcatgaatgttctccaccgatggttcatagggatgtgcaagccagcagcatccttcttgatgataaatttgatgtacgccttggtagcttgagcgagcttcctgcaattgaatcagtcttgaatgctatgaagagcaatacaaatcagcgagtatctccaatatttgctcttgtcctatgccctacaagagagcttgctattcagcttacagctgaagcaaatgtcttgttaaagtaccatgaaggaattggtgttcaatctcttattggtggcactagattcaagcttgatcagagacgattagaatctgatccatgccagccagatcatctattagatgaaaccaaccgtgctggaagcaagattagggtggaaagggctgagcgaagctcctacacgtttcaatcacagttagatggcggtgcacagttctgtgtatcacaagaggcatctaggttgacctcgctcttcttagtgttcatgcccactgcgcaagacaacaccacaacgccgatggagttggaagatttcatcaggctcgactcgatctggatgagatggactctgctcgctgaggaccgaacaccgaagccaggcagccagccgaggaagccaggcgacaggcgacgccaagtcgagaacaccctaggtggtcgctcgcaggctgcgagtgagagccgtggcggagtcgccgtccttgcccacggaggaggacacagccgccggcgcagtgggatggcgacgccgacgcccatgcccggaagcgaggggacgctcgtggcggtgatgccgcggtccccgtccccgacgccggcggaggcggggacctcggcgaccgagacgcccgtgctaatattcctttacttccacaaggcgatccgcgcggagctcgaggcgctgcacggcgccgccgtgctcctggccaccgagcgcaccggcgatgtcgcggcgctcgccgagcgctgccgctttttcttcagcatctacaaacaccactgcgatgccgaggacgcggtcatctttccagcacttgacatccgagtaaagaatgttgcagggacctattccttagagcataaaggagaaagcgatctttttagccagttatttgatctcctggaattggacatacagaatgatgatgctcttcgtagggagcttgcgtcatgtacaggcttttctttccttcctctccctgcttctgttctgctgtttatcaggctggtctttccattgctgacaaagaaattttcatgtgaagaacaagctgatttagtgtggcaattcctctgcaacattcctgtcaatatggtagcagagttccttccatggctttcaacttctgtcacatctgatgagcaccaagacatccgtgactgcttatgtaaagtagttcctgatgagaaacttctccaacaggttgtattcacatggatggaggggaaagcagcaagagaagtggcagagagctttgccactggtaatttagtaagaaatcatagtgctgaggatgtctcagaccatggggagatttatgtttgttcacagcaagaatctaaacttgggagtaaaaactgtgcagaatctaatggttctcaagccgacaggcatcctatagatgatattttatactggcacaacgctatccgcatggagttacatgatataaaaaaagaaacaagaagggtgcaacagtctgggaatttttctgatatatcagccttcaatgagaggcttcagttcattgcagatgtatgcatctaccacagtatcgctgaggatcaggttgtttttcctgcagtcgatagtgagctgtcctttgtgcaggagcatgctgaagaagaacacaggtttaacaatttcaggtgtttaattcagcaattccaaatagcaggagccaaatcaactgcactggacttctactcaaaactgtgttcacatgctgataaaatattggagacaatcgaaaaacacttcagcaatgaagaaaccaaggtgcttcctcaagctaggatgtttttctctcctgaaaagcaaagggaactttcgtacaaaagtctgtgtgttatgccattgaaattattggaacgtgttttaccatggttggtgtcaaagctgagtgatgagcaggcaacttcatttcttcagaatatacgattggcagcatcaccatctgaaactgcactggtcactcttatctctggttgggcatgcaaaggccgggacaaatccaaatctggagaatatttatgcttaacatcaggtacagcaagatgcctgtcagatgatgtagatgatcagggaaaatgccgatcattctgcccatgtgcttcacacaacagctcagatctttctctgcagctacaaactgaaaatggttctaggccaggcaagcgaggaaaagatgcagtatcttttcctggtactaatggaagctactgctctcaaactgctgacattgatgcaagtccatgtagcaaaaagccttgttgtattcctgggttgagagtaaagagtagcaaccttggtattggttccctggcttctgtgaagtcctttcgctctttaccatacaattctactgctccttcaatatattcgagcctcttctcatgggagacagatgcatcattgtcttgttcggatggcatttcaaggccaattgatacaatattcaaatttcataaggcaattcgcaaggatttagagtacttagatgttgaatctggaaggctcattgatggtgatgagtcttgccttcgccaattcattggaaggttccgtttgttatggggtctttacagggctcacagcaatgctgaggatgaaattgtgttcccagcattggaatccagagaaacattgcacaatgtgagccattcatatactcttgaccacaagcaggaagaacaattattcgaagatatctctgatgttctctttcagctttcacaactacatgatagccagggccatgcccagactaaagttaatgaagtaaagcaaagctgtttccattcatctaatgacgttgattttactaggaagtataatgagcttgccacaaaacttcaggccatgtgcaagtctatccgggtcgccttgactaatcatgtccatagagaagaacttgaattgtggccgttgtttgacaaacatttttctgtggaggagcaagataaacttgtaggtcgtataattggttcaacaggtgctgaggttctccaatctatggtaccctgggttacatcagctctcactcaagaggagcagaacaaaatgcttgatacctggaagcaagcaacaaaaaatacaatgtttggggaatggctaaacgagtggtggaagggagctggaacatctgattcttcagcagaggcaccctctgctccagaagatagtcatttacaagataagcttgaacaaaatgaccagatgtttaagcctggctggaaggacatatttcgaatgaaccagagtgaacttgaggctgaggtgcgaaaggtttcacgagatcctacacttgacccaaggcggaaggcctatctaattcaaaatctcatgacaagccgctggatagctgctcagcaaaagttaccggaaccaaattctgaagaatgtagtgatgatgctagtatacctggatgtgcgccttcatatcgagaccaggagaaagaaatttatggttgtgaacattacaaacggaactgcaaacttgttgctgcatgctgcaacaagctgttcacatgcagattttgccatgataaagttagtgaccatacaatggaaaggaaagcaacacaggaaatgatgtgcatggtgtgcctaaagattcaacccgttggtccgttctgccaaaccccatcttgtaacagactatcgatggcaaagtactactgcaacatctgcaaatttttcgatgacgaaagggctagagacaaattgtccaatatgctgtgacttcctgtttacatcaagtgccgcagtcagagccctcccttgcggccacttcatgcattcagcttgctttcaggcatacacttgtagccactacacttgtcctatctgctgcaaatctctgggagatatggcggtgtattttggcatgcttgatgccttgttggctgctgaagagcttccggaggaataccgtgataggtgtcaggatatactgtgcaatgactgtgagaggaaaggcagatgtcgatttcactggctataccacaaatgcggctcctgtgggtcgtacaatacccgagttatcaagactgacactgcagattgctccacaccaaattagctggagggaacatttgtgcttatttgtagcctttttttttctcttatgtaaatatcttctagcgggaaggaaaaaagagatgtcctgtaggatagttaacataatttcattcgtagcgatatcagttttgtaagtgtagcagtttacaatttactaggtctagtgcgttgtactgccaaaatggacggttctgctggacaaaggacataatccgagaaaataggctagttagaacaattgctcgcgtgcatgttctacatatttcgcggttcacgtatagc

SEQ ID NO: 214640 - DNA, 3229 bp, Zea Mays
ctcccagtctccctccctccctttctctaagcgcgacgaccggcgccgccaccgccaccgccttacgccagatacccaggtccgtcttagtcggcaccttctccagcaacaagcacccaacaaatgaatgctttggagcagttggcatccattgatctcattgagctatgcaaggaggccagaattgagcgctgccgtgcaactagagacttgagtagctgtggccgctatgtgcatcatgtgcttaactcatgtggccatgcctcattatgtgctgaatgcagccaaagatgcgacgtctgcccaatttgcaggagtccaataccggacaatggaaacagggttcagctacgtctttactacaagtgcctggaagagggccttatttctaagcagcacgatgaaaggtttcaggaaaaggaagaccatggcaatccagttagcatggatgtccagcagctgcattcattatatcacagatgtttgtttggatgagaatgctgtgtcaagtgatccacttctggcttttcttttggatgaggtggtcatcaaggactggtgcaagagggctgttaatgtgctcattactgagattggtgtgatctataggtctggattagaaacgatgagatctaggttatcccaactgcaaaagtttgccacacagttggcaggaatttacagtatacttgaagttatggtttcatctttcaatgaagcagtttcagcgcatgttaatgacctgcaccaactcattgagaacacattgaaggcaaagcagcatttggaggccatgatctggtgtatcaggcatagatttattcaggacatctgttcaaggtacactgatcatacatcatggagctctgatgtgattcaaaggaaggcatatgcagaagaaagaaaatggcctggattttctgataaagggtcagatataaatgaagccaatcagactacactattcatcgagcaggccctacaaaaccttggcattgaacaaaattatagggataaggaggaagacataacaataacatgtttacagaatgaacaatcatcatctatgttctgttccacaattacaaccgatcattgtagtattgacagatacccttttaagaatttgcgtgaggcagttgatgtactctttctacacggagcatcagacatggtgattgcaaagcaagctattttattgtattatctatttgatcgacattggagtagaccagattcagaatggaggtatctggtggatgattttgctactacctttgggattactaatagaacattgcttgagtgcctggtattttgtcttctagacgatcattcttcagaagccttgaaggaggcctgctctcttctccccaagatctttagcaaggaaacacatccaaagatagcacaagttcttctggaacgccagagacctgatatggcacttcttgtgctaaagtgcacagggcgtgatagcttctctgctacagagaacttcgaaaaggatggcatttcatctcttagcgaggcagtgactgcggtccgtgttagaattgaatgtggcctcctaacagaggcatttatgtatcataggagctactgctctaaggtgaaagagcaacactcagcaaatatgacacacacggaggatgcattcgaaggctcttggatttatcatgttgagatgatgatggtcgaattttgtactatctgcattgaaagaaatttagttgataaaatgattgatctgccctgggattctgaggaagagaaacatcttcacaagtccctcttcgagtctgctcatgaagcgcccatggatccaattggtagtctgcttgttgtctactaccttcggcgttatcgatatttggaggcatacggggttgatcgtagtcttcagaaatttgagcaaaaggaattggaaaatgccactgaagagattgcttcaaaaattagagcaattgctcaatggagagaaagtttggttgctaaatgccttgacatgcttccagaggttcagagagagaatgtgaaagccatcaacagtggagaacaaattcagtttgctcgaactgctcaaatatcttctccagctcatgtgggcaaatcacaaaatcctgtaatggacttgagcacaacttttaccagtgttcttcaaaataagtcaagcctcttctcaaaaaacaatgcattgactgattctagtggtctgatccgaagcagccactcagagagaaaggtcccatctgctctgcagaccagggcaccaccccatgggtcacctatatccaatatgagatcaactgtagggggtaagttccccacagtgggccagaatgttgacagtccatttttgaggggggctaaaggtatcagttctagaaaaggagagacgggattcaaagaagggattaaatatgctgatcacgatccactgcctatgtatttgaacttgagttctggtgatacacccaccaaagactaccgaacaagtttgttgaaggccgaggctaacaaaaccacttattttcaaggacaagattctgttggaaaaggagagttccactttggttcacgtgctgtgaagcctttcaacttaaatggaactggcgcaggtcaaaatggcctcgctaagatctcgggatatgctggttttcgtgaggattataaagtaccaactaaggagaacatcttgagctttagcaagaaatcttcagttggtggagcagaagccagcaaaggtgtgtcaaggtggagatccgatgagtctagtgaagaagagagaacaaaccgggagagcggagctcctcttgttactagaaggcgacctagattttcgagaagatgatatatccacatcctcagggatttttttaattgtttgcagctatgccctaatgtgacaacaattgttttaagggaatgtgtatgcgggatgcggctatcatgcataatctacattgccatggccgagatgtagttcaagtgtcactaaggatgctagaaaacaaaatcgagaaggcgtatgcatgtagcattcagagttcagtggctaaattatattttcccaacttttgtgccaaatgccttgtaaatatagtcgtactaatctcgtttcttgggctgatggtagtgttgtccgcgtcaaaaagttcaagggccaatacgtccgtaccttatggtatttatatatgaaccactgtggcagaaaaaaaaaaataca

SEQ ID NO: 214641 - DNA, 1302 bp, Zea Mays
ccgtctcacgcctgagctgcaagccctcttggcgccacacagcgcaggatgagccacagaacagaagcgtctcttcctcctcctcttcttcctcctcatctgcaccaccacagaacacagattcgcgagcccaagaccaagagcaagagaagaagagctcagctgctgctgcggtgctgccggtgccgggcggagtttaacatcgcgccgcagctaactcaacgcagttaagcttctcctactcctagcttagccaatagccatggcgctggctagccagtacgaggtgacgatcgagaagccgtacgggctcaagttcaccaagggccgcgacggcggcacgtacgtggaggccatccagcccggcgccgccgccgacctgaccggccagttcgaggtgggcgacaaggtgctggccaccagctccgtcttcggggaggagatctggccggcggcggggtacggccagaccatgtactgcatccgccagaggatcggccctctgtacatgaagatggagaggaggtttggtaagtgggacggcgccggcgacctcaccgagaaggagatcatcaggttcgagaggaactccggagtggtcagcggcagggtgcgggagatccagctgcaaaactaccagaggaagatggagcagaagatgcagagggaagaggacctccgcatggggctcaagctgtacaaggacgggaagtacgaggaggcgctggagaagttcgagtcggttctggggtcgaagccggagcccagcgaggccgccatcgccagctacaacgtcgcctgcagctactcgaagctgggccgggtagaggctgcgctttctgcgctggaggatgcgctcaagtcagggtatgaagacttcaaggcagttcgcaccgacccggatctcgcgaacctgaggaagtcggaggagttcgagcccttgctgaagaactacgacgagtcgttcatcaacgagaacgccatcaacgccatcaagtccttgttcggactcggaaacaagtgaggcgattgttagcttagcttgccctcgtacctgaccatttgccgtgcagatacattgtgtgtatgagtactgtccaaatgtaaaggaaaatatgcaattgtgcttgtcagccacatgccaaatatgttaaggatcaagaaggtgaatatgttagcggacaaactcacgagacaagtattgagaactctggattggattcttttttcaggttcaaacagtttaatgacttgtcaagaaaagaaaacgcatcaattcttcctggttcaccattttttact

SEQ ID NO: 214642 - DNA, 4643 bp, Zea Mays
cgcggggcacggtcgaggacggcggcgcagggcggggtggaggtctccaggacgcaaggcactagcgggctcctccctcccgcgcgggcaccaacggcgagcggaggactggcgctggcaatggctaatggcgcgaagcaacagctggtacgttctgcacttctgctccacctccctaaaatcttggccgagctccgccactgaccatccccacttgtttccccagatacgctgccgcctcctatcgctccccttcctccgccgcggcatccactcctccgtgccaacttcggtcggcgccgctacagatgctacactcctgggtcgcctcacccgcctcctcctcctccaccgtttctctgccgtcgctcgcctcctctcctcctcggcccccctcacccctgcactcctccacgcggcgctgcgccgggtccgcctcgacgccgacgccgcggtgcacctcttccgcctcgcccctttccccccttccctcctcgcgcacgcccagctgctccacatcctcgtccgcgcccggcgctccgccgacgcccgcgcgatcctggcatccctcctctccgcacggcccccggctccgcctctctttccgcacctcgtcgaggtatataaggagttctccttctccgcagcctcattcgacctgctcctccgtgcacttgccaacgccggccaactcgacggcgccctccaggtgttcgacgaaatgcgaacgctcgggtgccgccttagcatgcggtcctgcaacagtatactcaacaggttagcacagactggggacctgggcgccacagtggcagtgtttgagcagatgcagcgtgcaggggctctgccagacaagttcacggtggcgattatggcaaaggcttactgcaaggttaagggggtggtgcatgcattggagttcgtggaggagatgacaaagatgggtgtggaggtgaacctagtggcgtaccatgcggtgatgaatggctattgtgaggtggggcagaccaacgatgcaagaaggatgttggactcgctgcctgggagaggtttttcaccgaatatagttacatatacattgcttgtgaagggatattgtaatgagaagaacatggaggaggctgagggggttgttcaggagattaggaagaataagcagcttgtggttgatgaggctgtttttggtgcagtgatcaatggctattgccaaatgggaagaatggaggatgcagctcgattattgaatgagatggtggattctaggctccaggttaatttgtttgtgtataacataatgattaatggatattgcaagttggggagaatggtggaagcacataacattttgcatgaaatgacaggtgttggtgtgaggcctgacacatacagttacaatagcctagttgatgggtattgcaaaaagggtttgatgaacaaggctttcgaaacatataatacaatgttaaggaatggattcgcggcgacgacattaacatataatgccctcctaaaaggtttttgctcgcttggctcaatcgatgatgcgctcagactttggttcctgatgttgaagaaaggtattgcacctaatgaaatcagttgtagcaccttgcttgatggtttcttcaagtcaggtaaaactgagaaggccttaaatctttggaaagaaaccttagcaaggggtttagcaaaaaatacaaccacatttaacacagttatcaatgggttgtgtaagattgagaggatgcctgaagcagaagagcttgttgacaaaatgaagcaatggagatgtcctcctgatattataacttacagaacattatttagtggttattgtaagataggtgacatggatagagctagccgcattctgaatgaactggaaaatttaggttttgctcctacaattgaatttttcaattctttgataactggacacttcatagctaagcaacatggaaaggtgaatgatatactctttgaaatgagtaataggggactttctcctaacacggtcgcatatggagctctgattgctggatggtgtaaagagggagatttgcatacagcctataacttatatcttgaaatgattgagaaaggtctggtaccaaatctttttatttgcagttctttagtgagttgtttctacaggaagggaaagtttgatgaggcaaatttagtgttgcaaaatcttgtgggtactgacatgattccagatatcagtgcgcccagacttgagatagggaaagtagcaaatttcattgataccgttgctggtggaaatcatcattctgcaaaaatcatgtggaacattgttatttttggtctatgcaaattgggaaggattgaagatgctaaaaacttgttggcagatctaaaagacaaggggtttgttgctgataatttcacttattctagcctcatccatggttgttctgcttcaggatttgttgatgtagcttttgatttgagggatacaatgttgagtgttggtctcactccaaatatagtaacctacaattctcttatatatggtctctgcaagtctggggagttatccagggctgtcagtctttttaagaagttgtggacaaagggtatatcccctaatgctatcacatataatacattaattgataagcattgcaaggatggttacataaccgaggcctttaaactaaagcaaaggatgatagaggaaggtattcatcctactgtgttcacctattctatactgattaatggtctctgtactcaaggctatatggaagaagcaatcaagcttcttgatcaaatgattgagaataatgtggatccaaattatgtcacatattggacactgattcaaggttatgttagatgtggtaacatgatagagatttcaaagatttatgataagatgcatatccatggacttctgcccaccaatgtttctggggatgtaaaacaatcatgtcctgctatacacaacccgaatagagaaacatgtcagatgaagatgcacagccagtgctagctgctatcacattctttgcatgtctacttcttttgaaagatggcagtgacttatgtttgtatgaggagcaaatcatgggacccatttctatcttgggatgatatcgggcctggtcatatcatgagaaatgtttccaacctccctcacatgtcagccaagtggtatcttctaactacaggctggattggctttctaagtgcagagacttgttgctggtgactttgccccttttatctggacttaggaatggcaatactcagcttctgctgggaatttgctgggtatatcggctacaaactgtcaagccatcttaagtcttatcaagtgatagcatgcatatcggtcttctcgctgcagctgttcatgccgtttaaacaattagtcggcttacaattttctacagcccaaggcaagcccttcagattttgtcataccgcttgcaaagtctgttaagactgtatactataccagtgtatctgtggggatgtgtttcaagatgctttttgagacaggagagtctagcgtgaggagataagttcaaatctgtttgcaacatcacctcgttattgaagtgggagaaacgaaagacgactagtctttttcgtggtctcgatccacattctattccagcagaagaactgtcggcatctttgaggtacacgctacattccatcaatattgcagtccgtatcctatccacgattgttcttcatggatcaggctttaagtatggttcatgctcaaatatatggcagcagagttcctactgaagtatatgacagtcccagagcaaggtttaccctctttttatacctaggaaaaatgtttgcacaggtggtgaagaaaccccattgacagaaagtggttcgagttactttggagctgactctggattctgtcaagaaacagtcttttggttccaagagaagcaatagttttagtttctctggtgcatcttctcactccatggagaggcatcgatatttgcagagaggaatgttgtcgtcatcaaaggcccttcgaactgcttttgaatcgaacattgcttcaaggtcagaaaagcaagcgcagccgctaaacagattgatttgaagtgaagttcagccgtatcatcagacatcatgcacacaaccatcatggtaaattcctgttcagcacgcacagtaggtctccgtgtgctctgtacggcctagtgctgctgcgctagctggttgggtgcgtccgtgcgtggacgcgctgtagcaaccagggcacccctgtccatggtcgcgatcgcggcctccgctggcctggcccttggcgtgtgcggggcgtagagacggaggagaatgttgtactatgtgcgggcgcggcgagcgaagccggctggaccagaccagaccacaccagggccagagccagggccacgtggcattggctcggcgtagagaacgtcctcccaatatctatgaatttactacaatatacgtctcattatttttagattcatatatgtatccatcacgggggcctccggcctcgttatagcaagtatgggctgactgtaatataatatccaactccgattcaaaactgtaatgtttattacaaaatttgacttagaagtagtgtctaaaaagtggca

SEQ ID NO: 214643 - DNA, 6655 bp, Zea Mays
agagcagataatcctatcctcacttgaggatgctatgtggagcatgcacaaatcaatccacagatattcatttaaggctattgtgacgaaccacttagttctgcgtggaacttatcgcagtctcacccttgtaatttatggcaataccgccgaagaccttggtcaattcaacatagaactaggtctggaccattctcttgctaatgttgttagctctccatcagagggaaagcttgaagaccttccaccagcgctacattcatccaagttgtcatttgaagaatcattatcatcattgaaaccatcgagttttcatgccactgatgtcgacttatcaattgaagcgaagaaagtcttgcatttggctctgaaaatgtaccaaatatctgatgtggagaatcttattcccaacctaagaagtgcagttctctcagctatttcaaaatatgtgactgctagtacaaatcatattctacacactttgagtcaagattcagcaaatgcgtttatcaacagtgattttgattctcaggaaattaacaaaattcttgctgaagctggtaaggagctctctgaaatttggaagaatgtccatgctgttactgagagtaatcttttcaatgataatggttttaccattggagtagatgaagacttgcccacgaccaagattctaattgagttgtttaaccattgtttcccatattacaagaaattatctttacttgatctacaatgtccttctcagagcaaatggttggttctgtctttgagtttggttctcctgctatgctcctcaaaggagagttgcttttattttgttgatactggtgggatggagcaaattattaatctgctttgctggaggacaccaaaatctgcagctaccacattgcttctcctaggtattgtggagcatgctactcggaatggttttggatgtgaagcttttctgggatggtggccacgagctgagcacaccagcatacctgttggcagcagcgatggttattgctctttactgaagcttctactggaaaaggaaaggcatgatattgcctctctagctacatatgttctacagcgcttgcggttttatgagatactatctaaatacgagtctgcggtagtcaaagtgatttccaatattcaggcagataaactttctactgatggagttccatttcttatttctgctagtgttgaacttggtgaaatgctgaaattgataattttctgtggccctattgaagatccatcaccagtggctactgctagtagaatatttaagtctgaacatttagaaggcttgctttcgtacaaagcaacaattgatcttataacttcgtccaaatacagttttttgcagtatgatacggatccatacttattgtctcttatccaggaaagaagtttttttcctctgtcagcggccttattgtcatcacctatattgcatttaccaaatggccctgccgccgaaattttgatggggatagcatcatcaattgaatctattatcctctccctcctcttttgtcgttcagggttatcgttcttgctcagtcagcctgaagcaactgagcttatacttctttctcttcaagatgcagaaaaaatgaataaatcagaatgcataactcttcgacaggcttttgttcttttatcaaaagggttcttttgccgcccaaaagaagtgggattgataacagaattacatcttaaagtgggaagtgctgccactaggatcctctcagttcctccgaattctgatgaacttttgtgggttctctgggaactttgtgccatttcaaggtctgattctggccgacaagcattattagctcttgggtactttcctgaggcaatatcagttctactgagatctctctcttcatataaggatcttgattcagtcatggctgagaatggagggtcgcctttgggtcttgcaattttccattcagctgcagaaattcttgaagttttggttgtggattcaactgcttcatcgcttgaatcatggattgggtttgctgttgatctgcacaaggctctgcattcatcttctcctggttcaaacaggaaagatgcaccaacaaggttgcttgaatggattgatgctggtgttgtttatcagagaaatgttgctctatgcagcacttctgtggtccaattaacaacagctttccgtatcttggcatttatttcggatgataagcctgtggcgtcatccctttttgaagaaggcgccataactgttatatatgttgtcctgatgaactgcaagtctatgcttgagcgtttatcaaatagttatgattaccttgttgatgaaggggctgaactgagttctaccacagaattacttctagatcgaactcatgagaaagctattgttgacctcatgattccctcacttgtcttgttgataaatctccttcatatattacgtgaaacgaaagaacaataccgcaacaaaaaacttcttagttctcttctgcagttgcaccgagaagttagcccgaggctagcagcttgtgctgcagatttgtccttcatgtttcctacttttgctataggttttggtgttgtttgtcatcttatcacgtcagcacttgcttgctggccgttgtataattgggcacctggtctgtttcattgccttcttgaaaataccgaggctactaatgcgtccgtaccattgggcccgaaggctgcttttagtctgctttgtctcctgggtgatctgttcccagatgaaggcatatggctatggaaagttgaacttccttctctcagtgccattagatctttgagtactggagcagtgctagggcctcaagtggagaaaggggtgaactggtacctgcatcctgaacatgtgaccatattacttgtgaggctgatgccacaacttgataggcttgctcgtatcattgataactttgctacttcggtcttgatggtgatacaggacatgcttcgtgttttcattgttcgtgttgccttagaaaagattgagtgtgcagttgttcttctacgccctatatttatgtggttagatgataaagttgacaaaacttccctgtcagagagagacacctttaaggtccatcagttgcttcagtttactgtaaaattgtctgagcatcctactggcaaggcattgctttggaggatggggttcacaaggattcttagcaagttactacagaattgtagccgagcatctttcccgtatgataatcagacttttggaagggcgcactctaagaatgaccttatgctcaaatggaggatccctttgtttaaatctattgcatatatctttagtatcgacccatgtaataatgagaaggctgatgttgaagagtccctgaatgagaagtctgttcatgaatgctcttctgtcatgcatgacctcatgatgttctgccaggttttgcctgttggccgggaaatgttagcatgttcgttggcgttcaaggaattggtttattcttatacctgtagaagtgcagtaactttgatactttcacaaatacatacttccaacaaagatgttcttgaaaaagatgagagtgaccctaaccataactcaccatctctggatggttggaattgcttttcctcattgttcaagtgctggaagaagcttgtaaagtatgttggttctaatgaacgaacagattatttagtagaaactatttattccttgacactaggtgctatcaccctcagccagtatggtgaaaatcttgagggtctgttaatactgaggtatctatttgggctcccttctgatcctagtggttccttggaatcatctggtgagagtccaagtgagattgagttattcatgaagacatatgaagagaagatatgccagggcattgaaaattcagcgactgctgttggaaagactcttttacgcaagctactgaattcgatcaaattactacgctcaattcttgagaattctggtcaatccgcagatacagttcagatggttcttgaagaaggcactgactcactgtctgaaattgctcgctctgttgttatgacagctcatcttatgccatccctagccaatgtgtcagtaaatgatgaatctccttttctcttctctaatatgtggaaggttattgttgattcagaagagcctcttgactgccaagagggtgaatttgcaaagaggctagtttgggagttgcctgattcttctcttgatagacaactagcacctggccaatctgccaggaggaaattagcactgggagagagtgcaagtaggcgtgtaagggataatcaactgcctgaacccactgggcagttctcacgaggtttaaatacatccaatgcttcttcgggacatacacgcagagacactttccgtcagcggaaacctaacacaagtagaccaccttcaatgcatgtagatgactatgttgcaagagagagaaacatagatggtgcaagtagtgcgtcaaatattgtgaactctaccccacgaggaacacttagtggaaggcctccatccattcatgttgatgaatttatggcaaggcagagagaacgtcaaaatcatgcgccagccccaactggagatgcacctcaagctaaaagtcagacaacaagtttagatgacagtcttcgtactaagccagagaacttgcgtcaacccaagactgatctcgatgatgatcaagaaattgaaattgtctttgatgaggaatcaggttcggatgataaacttcctttccctcaaccagatgatagtctccaatctccacctgtcattattggggaaaattctcctggtcctgttattgacgagacagaaaatcaggagaatgaaagagttccctttttccagagggccacatctatcccgaaggacgatgaaaatcttggcattggcatttcttcccagactgcaatgctctcagaagctaacagttctttggaactgaaacattcagtttctagcccagggaagaattcttttcgtgatcatgctgaagagtctaattatgattctattggtgtatctgggagaccatctttacaagcagatcatcaacaattatctcgtagacatgaaaagagaagtccacgaaaattttctgagacttctctgtcaaatggattccatgggcgtgagcatagacattccaataaccatccacctctgccaccaatgccacctccaatttcatccgtgtccatgcaaaatactgattcagttaataggcagtcatcttcgttcagtgctcgagatcgaccaacacctaatccttctggttatcctacacaatcttttgactctagtatgcctagtgctttcacaggccttcagggtcaaactcaatacatgcttgcaggcgctggcagttcatcagcgaatgagttacccaatgtggaggccaagcttctatggaacacatttccagcaaataggatccctctggagaccttcagctcaggtttacctgctcggccgatgccaccccttacaccttattcagctgttgctactcagcacgctacgatgaactctggctctcctgcaaacctgtatagccagggcagtgttgtccagccttctccaactgcttctattattagtgattcaaatttggccatgaactccgcatctggcagcatgcttgcatcgaatctgctgccatcatttgcatcacaatttctgatgagcaggccttcaatgcctactccgttttttggcacgcctcttcaacaagttcaattctcatccggtcttccacaaaatatttctaaccctcagccacctgtctcaatacaaccacggccacccccacccccaccacccccgcagcagccacatccttctcagacactccaacaacttggtgctatccaattaccacaccaagatcagcagcactcatatccccatagtgctatcttgccacaagttacgttgcagtttcctaaccagctacccattcctcaagtacaattgtatcatcaaagccagcaggaatctgggcaaacactgaggcaagttggtgaacaatcacaacttcagaaccagggtatgcaagcagatagtttctctcaacagcagcaagactcagggatcaacttaaaccagttcttttcatctccagaagccattcagagtctacttagtgatcgtgagaagctctgccaacttttagagcagaatccaaaacttatgcaaatgctccaggatcgcattggccagttgtagtcgcactggaggtgctattgtgaaagtgaaatctgatgctggtcgatcgctaggttcctagagtatggtgttgttttgttttcggctatggctgtagctagatgaaagcaactgccagcttgctagtcgccgaaatgtattcctatgtacattatatgtaactttgttctgtaatgtgaaaatttgtaatgttagtgcgtatctaatttatagttttaagtttaccttagtggttagatcgtgtgacatgcgcagcgacgggaaaacgacgccgccttttgtctgcaaaggcatttgacgctaactacctgtagagttctgaatatcctgttgcactcttgtgtgtatctggttgctttaatgctcgaaaatgaatatcctaaggttttgcattcg

SEQ ID NO: 214644 - DNA, 6527 bp, Zea Mays
agagcagataatcctatcctcacttgaggatgctatgtggagcatgcacaaatcaatccacagatattcatttaaggctattgtgacgaaccacttagttctgcgtggaacttatcgcagtctcacccttgtaatttatggcaataccgccgaagaccttggtcaattcaacatagaactaggtctggaccattctcttgctaatgttgttagctctccatcagagggaaagcttgaagaccttccaccagcgctacattcatccaagttgtcatttgaagaatcattatcatcattgaaaccatcgagttttcatgccactgatgtcgacttatcaattgaagcgaagaaagtcttgcatttggctctgaaaatgtaccaaatatctgatgtggagaatcttattcccaacctaagaagtgcagttctctcagctatttcaaaatatgtgactgctagtacaaatcatattctacacactttgagtcaagattcagcaaatgcgtttatcaacagtgattttgattctcaggaaattaacaaaattcttgctgaagctggtaaggagctctctgaaatttggaagaatgtccatgctgttactgagagtaatcttttcaatgataatggttttaccattggagtagatgaagacttgcccacgaccaagattctaattgagttgtttaaccattgtttcccatattacaagaaattatctttacttgatctacaatgtccttctcagagcaaatggttggttctgtctttgagtttggttctcctgctatgctcctcaaaggagagttgcttttattttgttgatactggtgggatggagcaaattattaatctgctttgctggaggacaccaaaatctgcagctaccacattgcttctcctaggtattgtggagcatgctactcggaatggttttggatgtgaagcttttctgggatggtggccacgagctgagcacaccagcatacctgttggcagcagcgatggttattgctctttactgaagcttctactggaaaaggaaaggcatgatattgcctctctagctacatatgttctacagcgcttgcggttttatgagatactatctaaatacgagtctgcggtagtcaaagtgatttccaatattcaggcagataaactttctactgatggagttccatttcttatttctgctagtgttgaacttggtgaaatgctgaaattgataattttctgtggccctattgaagatccatcaccagtggctactgctagtagaatatttaagtctgaacatttagaaggcttgctttcgtacaaagcaacaattgatcttataacttcgtccaaatacagttttttgcagtatgatacggatccatacttattgtctcttatccaggaaagaagtttttttcctctgtcagcggccttattgtcatcacctatattgcatttaccaaatggccctgccgccgaaattttgatggggatagcatcatcaattgaatctattatcctctccctcctcttttgtcgttcagggttatcgttcttgctcagtcagcctgaagcaactgagcttatacttctttctcttcaagatgcagaaaaaatgaataaatcagaatgcataactcttcgacaggcttttgttcttttatcaaaagggttcttttgccgcccaaaagaagtgggattgataacagaattacatcttaaagtgggaagtgctgccactaggatcctctcagttcctccgaattctgatgaacttttgtgggttctctgggaactttgtgccatttcaaggtctgattctggccgacaagcattattagctcttgggtactttcctgaggcaatatcagttctactgagatctctctcttcatataaggatcttgattcagtcatggctgagaatggagggtcgcctttgggtcttgcaattttccattcagctgcagaaattcttgaagttttggttgtggattcaactgcttcatcgcttgaatcatggattgggtttgctgttgatctgcacaaggctctgcattcatcttctcctggttcaaacaggaaagatgcaccaacaaggttgcttgaatggattgatgctggtgttgtttatcagagaaatggtgctcgtgggcttcttcgttattctgctattcttgcatctggtggagatgctcatctttcttcaggaaatgtgcttgtgtcagattcaatggatgtagaaaatgtagttgcagattcaaacagtagagatggtcaggtcatcgataatcttcttggtaaacttgttgcggataagtattttgacggagttgctctatgcagcacttctgtggtccaattaacaacagctttccgtatcttggcatttatttcggatgataagcctgtggcgtcatccctttttgaagaaggcgccataactgttatatatgttgtcctgatgaactgcaagtctatgcttgagcgtttatcaaatagttatgattaccttgttgatgaaggggctgaactgagttctaccacagaattacttctagatcgaactcatgagaaagctattgttgacctcatgattccctcacttgtcttgttgataaatctccttcatatattacgtgaaacgaaagaacaataccgcaacaaaaaacttcttagttctcttctgcagttgcaccgagaagttagcccgaggctagcagcttgtgctgcagatttgtccttcatgtttcctacttttgctataggttttggtgttgtttgtcatcttatcacgtcagcacttgcttgctggccgttgtataattgggcacctggtctgtttcattgccttcttgaaaataccgaggctactaatgcgtccgtaccattgggcccgaaggctgcttttagtctgctttgtctcctgggtgatctgttcccagatgaaggcatatggctatggaaagttgaacttccttctctcagtgccattagatctttgagtactggagcagtgctagggcctcaagtggagaaaggggtgaactggtacctgcatcctgaacatgtgaccatattacttgtgaggctgatgccacaacttgataggcttgctcgtatcattgataactttgctacttcggtcttgatggtgatacaggacatgcttcgtgttttcattgttcgtgttgccttagaaaagattgagtgtgcagttgttcttctacgccctatatttatgtggttagatgataaagttgacaaaacttccctgtcagagagagacacctttaaggtccatcagttgcttcagtttactgtaaaattgtctgagcatcctactggcaaggcattgctttggaggatggggttcacaaggattcttagcaagttactacagaattgtagccgagcatctttcccgtatgataatcagacttttggaagggcgcactctaagaatgaccttatgctcaaatggaggatccctttgtttaaatctattgcatatatctttagtatcgacccatgtaataatgagaaggctgatgttgaagagtccctgaatgagaagtctgttcatgaatgctcttctgtcatgcatgacctcatgatgttctgccagtcttgagggtctgttaatactgaggtatctatttgggctcccttctgatcctagtggttccttggaatcatctggtgagagtccaagtgagattgagttattcatgaagacatatgaagagaagatatgccagggcattgaaaattcagcgactgctgttggaaagactcttttacgcaagctactgaattcgatcaaattactacgctcaattcttgagaattctggtcaatccgcagatacagttcagatggttcttgaagaaggcactgactcactgtctgaaattgctcgctctgttgttatgacagctcatcttatgccatccctagccaatgtgtcagtaaatgatgaatctccttttctcttctctaatatgtggaaggttattgttgattcagaagagcctcttgactgccaagagggtgaatttgcaaagaggctagtttgggagttgcctgattcttctcttgatagacaactagcacctggccaatctgccaggaggaaattagcactgggagagagtgcaagtaggcgtgtaagggataatcaactgcctgaacccactgggcagttctcacgaggtttaaatacatccaatgcttcttcgggacatacacgcagagacactttccgtcagcggaaacctaacacaagtagaccaccttcaatgcatgtagatgactatgttgcaagagagagaaacatagatggtgcaagtagtgcgtcaaatattgtgaactctaccccacgaggaacacttagtggaaggcctccatccattcatgttgatgaatttatggcaaggcagagagaacgtcaaaatcatgcgccagccccaactggagatgcacctcaagctaaaagtcagacaacaagtttagatgacagtcttcgtactaagccagagaacttgcgtcaacccaagactgatctcgatgatgatcaagaaattgaaattgtctttgatgaggaatcaggttcggatgataaacttcctttccctcaaccagatgatagtctccaatctccacctgtcattattggggaaaattctcctggtcctgttattgacgagacagaaaatcaggagaatgaaagagttccctttttccagagggccacatctatcccgaaggacgatgaaaatcttggcattggcatttcttcccagactgcaatgctctcagaagctaacagttctttggaactgaaacattcagtttctagcccagggaagaattcttttcgtgatcatgctgaagagtctaattatgattctattggtgtatctgggagaccatctttacaagcagatcatcaacaattatctcgtagacatgaaaagagaagtccacgaaaattttctgagacttctctgtcaaatggattccatgggcgtgagcatagacattccaataaccatccacctctgccaccaatgccacctccaatttcatccgtgtccatgcaaaatactgattcagttaataggcagtcatcttcgttcagtgctcgagatcgaccaacacctaatccttctggttatcctacacaatcttttgactctagtatgcctagtgctttcacaggccttcagggtcaaactcaatacatgcttgcaggcgctggcagttcatcagcgaatgagttacccaatgtggaggccaagcttctatggaacacatttccagcaaataggatccctctggagaccttcagctcaggtttacctgctcggccgatgccaccccttacaccttattcagctgttgctactcagcacgctacgatgaactctggctctcctgcaaacctgtatagccagggcagtgttgtccagccttctccaactgcttctattattagtgattcaaatttggccatgaactccgcatctggcagcatgcttgcatcgaatctgctgccatcatttgcatcacaatttctgatgagcaggccttcaatgcctactccgttttttggcacgcctcttcaacaagttcaattctcatccggtcttccacaaaatatttctaaccctcagccacctgtctcaatacaaccacggccacccccacccccaccacccccgcagcagccacatccttctcagacactccaacaacttggtgctatccaattaccacaccaagatcagcagcactcatatccccatagtgctatcttgccacaagttacgttgcagtttcctaaccagctacccattcctcaagtacaattgtatcatcaaagccagcaggaatctgggcaaacactgaggcaagttggtgaacaatcacaacttcagaaccagggtatgcaagcagatagtttctctcaacagcagcaagactcagggatcaacttaaaccagttcttttcatctccagaagccattcagagtctacttagtgatcgtgagaagctctgccaacttttagagcagaatccaaaacttatgcaaatgctccaggatcgcattggccagttgtagtcgcactggaggtgctattgtgaaagtgaaatctgatgctggtcgatcgctaggttcctagagtatggtgttgttttgttttcggctatggctgtagctagatgaaagcaactgccagcttgctagtcgccgaaatgtattcctatgtacattatatgtaactttgttctgtaatgtgaaaatttgtaatgttagtgcgtatctaatttatagttttaagtttaccttagtggttagatcgtgtgacatgcgcagcgacgggaaaacgacgccgccttttgtctgcaaaggcatttgacgctaactacctgtagagttctgaatatcctgttgcactcttgtgtgtatctggttgctttaatgctcgaaaatgaatatcctaaggttttgcattcg

SEQ ID NO: 214645 - DNA, 6308 bp, Zea Mays
agagcagataatcctatcctcacttgaggatgctatgtggagcatgcacaaatcaatccacagatattcatttaaggctattgtgacgaaccacttagttctgcgtggaacttatcgcagtctcacccttgtaatttatggcaataccgccgaagaccttggtcaattcaacatagaactaggtctggaccattctcttgctaatgttgttagctctccatcagagggaaagcttgaagaccttccaccagcgctacattcatccaagttgtcatttgaagaatcattatcatcattgaaaccatcgagttttcatgccactgatgtcgacttatcaattgaagcgaagaaagtcttgcatttggctctgaaaatgtaccaaatatctgatgtggagaatcttattcccaacctaagaagtgcagttctctcagctatttcaaaatatgtgactgctagtacaaatcatattctacacactttgagtcaagattcagcaaatgcgtttatcaacagtgattttgattctcaggaaattaacaaaattcttgctgaagctggtaaggagctctctgaaatttggaagaatgtccatgctgttactgagagtaatcttttcaatgataatggttttaccattggagtagatgaagacttgcccacgaccaagattctaattgagttgtttaaccattgtttcccatattacaagaaattatctttacttgatctacaatgtccttctcagagcaaatggttggttctgtctttgagtttggttctcctgctatgctcctcaaaggagagttgcttttattttgttgatactggtgggatggagcaaattattaatctgctttgctggaggacaccaaaatctgcagctaccacattgcttctcctaggtattgtggagcatgctactcggaatggttttggatgtgaagcttttctgggatggtggccacgagctgagcacaccagcatacctgttggcagcagcgatggttattgctctttactgaagcttctactggaaaaggaaaggcatgatattgcctctctagctacatatgttctacagcgcttgcggttttatgagatactatctaaatacgagtctgcggtagtcaaagtgatttccaatattcaggcagataaactttctactgatggagttccatttcttatttctgctagtgttgaacttggtgaaatgctgaaattgataattttctgtggccctattgaagatccatcaccagtggctactgctagtagaatatttaagtctgaacatttagaaggcttgctttcgtacaaagcaacaattgatcttataacttcgtccaaatacagttttttgcagtatgatacggatccatacttattgtctcttatccaggaaagaagtttttttcctctgtcagcggccttattgtcatcacctatattgcatttaccaaatggccctgccgccgaaattttgatggggatagcatcatcaattgaatctattatcctctccctcctcttttgtcgttcagggttatcgttcttgctcagtcagcctgaagcaactgagcttatacttctttctcttcaagatgcagaaaaaatgaataaatcagaatgcataactcttcgacaggcttttgttcttttatcaaaagggttcttttgccgcccaaaagaagtgggattgataacagaattacatcttaaagtgggaagtgctgccactaggatcctctcagttcctccgaattctgatgaacttttgtgggttctctgggaactttgtgccatttcaaggtctgattctggccgacaagcattattagctcttgggtactttcctgaggcaatatcagttctactgagatctctctcttcatataaggatcttgattcagtcatggctgagaatggagggtcgcctttgggtcttgcaattttccattcagctgcagaaattcttgaagttttggttgtggattcaactgcttcatcgcttgaatcatggattgggtttgctgttgatctgcacaaggctctgcattcatcttctcctggttcaaacaggaaagatgcaccaacaaggttgcttgaatggattgatgctggtgttgtttatcagagaaatggtgctcgtgggcttcttcgttattctgctattcttgcatctggtggagatgctcatctttcttcaggaaatgtgcttgtgtcagattcaatggatgtagaaaatgtagttgcagattcaaacagtagagatggtcaggtcatcgataatcttcttggtaaacttgttgcggataagtattttgacggagttgctctatgcagcacttctgtggtccaattaacaacagctttccgtatcttggcatttatttcggatgataagcctgtggcgtcatccctttttgaagaaggcgccataactgttatatatgttgtcctgatgaactgcaagtctatgcttgagcgtttatcaaatagttatgattaccttgttgatgaaggggctgaactgagttctaccacagaattacttctagatcgaactcatgagaaagctattgttgacctcatgattccctcacttgtcttgttgataaatctccttcatatattacgtgaaacgaaagaacaataccgcaacaaaaaacttcttagttctcttctgcagttgcaccgagaagttagcccgaggctagcagcttgtgctgcagatttgtccttcatgtttcctacttttgctataggttttggtgttgtttgtcatcttatcacgtcagcacttgcttgctggccgttgtataattgggcacctggtctgtttcattgccttcttgaaaataccgaggctactaatgcgtccgtaccattgggcccgaaggctgcttttagtctgctttgtctcctgggtgatctgttcccagatgaaggcatatggctatggaaagttgaacttccttctctcagtgccattagatctttgagtactggagcagtgctagggcctcaagtggagaaaggggtgaactggtacctgcatcctgaacatgtgaccatattacttgtgaggctgatgccacaacttgataggcttgctcgtatcattgataactttgctacttcggtcttgatggtgatacaggacatgcttcgtgttttcattgttcgtgttgccttagaaaagattgagtgtgcagttgttcttctacgccctatatttatgtggttagatgataaagttgacaaaacttccctgtcagagagagacacctttaaggtccatcagttgcttcagtttactgtaaaattgtctgagcatcctactggcaaggcattgctttggaggatggggttcacaaggattcttagcaagttactacagaattgtagccgagcatctttcccgtatgataatcagacttttggaagggcgcactctaagaatgaccttatgctcaaatggaggatccctttgtttaaatctattgcatatatctttagtatcgacccatgtaataatgagaaggctgatgttgaagagtccctgaatgagaagtctgttcatgaatgctcttctgtcatgcatgacctcatgatgttctgccaggttttgcctgttggccgggaaatgttagcatgttcgttggcgttcaaggaattggtttattcttatacctgtagaagtgcagtaactttgatactttcacaaatacatacttccaacaaagatgttcttgaaaaagatgagagtgaccctaaccataactcaccatctctggatggttggaattgcttttcctcattgttcaagtgctggaagaagcttgtaaagtatgttggttctaatgaacgaacagattatttagtagaaactatttattccttgacactaggtgctatcaccctcagccagtatggtgaaaatcttgagggtctgttaatactgaggtatctatttgggctcccttctgatcctagtggttccttggaatcatctggtgagagtccaagtgagattgagttattcatgaagacatatgaagagaagatatgccagggcattgaaaattcagcgactgctgttggaaagactcttttacgcaagctactgaattcgatcaaattactacgctcaattcttgagaattctggtcaatccgcagatacagttcagatggttcttgaagaaggcactgactcactgtctgaaattgctcgctctgttgttatgacagctcatcttatgccatccctagccaatgtgtcagtaaatgatgaatctccttttctcttctctaatatgtggaaggttattgttgattcagaagagcctcttgactgccaagagggtgaatttgcaaagaggctagtttgggagttgcctgattcttctcttgatagacaactagcacctggccaatctgccaggaggaaattagcactgggagagagtgcaagtaggcgtgtaagggataatcaactgcctgaacccactgggcagttctcacgaggtttaaatacatccaatgcttcttcgggacatacacgcagagacactttccgtcagcggaaacctaacacaagtagaccaccttcaatgcatgtagatgactatgttgcaagagagagaaacatagatggtgcaagtagtgcgtcaaatattgtgaactctaccccacgaggaacacttagtggaaggcctccatccattcatgttgatgaatttatggcaaggcagagagaacgtcaaaatcatgcgccagccccaactggagatgcacctcaagctaaaagtcagacaacaagtttagatgacagtcttcgtactaagccagagaacttgcgtcaacccaagactgatctcgatgatgatcaagaaattgaaattgtctttgatgaggaatcaggttcggatgataaacttcctttccctcaaccagatgatagtctccaatctccacctgtcattattggggaaaattctcctggtcctgttattgacgagacagaaaatcaggagaatgaaagagttccctttttccagagggccacatctatcccgaaggacgatgaaaatcttggcattggcatttcttcccagactgcaatgctctcagaagctaacagttctttggaactgaaacattcagtttctagcccagggaagaattcttttcgtgatcatgctgaagagtctaattatgattctattggtgtatctgggagaccatctttacaagcagatcatcaacaattatctcgtagacatgaaaagagaagtccacgaaaattttctgagacttctctgtcaaatggattccatgggcgtgagcatagacattccaataaccatccacctctgccaccaatgccacctccaatttcatccgtgtccatgcaaaatactgattcagttaataggcagtcatcttcgttcagtgctcgagatcgaccaacacctaatccttctggttatcctacacaatcttttgactctagtatgcctagtgctttcacaggccttcagggtcaaactcaatacatgcttgcaggcgctggcagttcatcagcgaatgagttacccaatgtggaggccaagcttctatggaacacatttccagcaaataggatccctctggagaccttcagctcaggaatctgggcaaacactgaggcaagttggtgaacaatcacaacttcagaaccagggtatgcaagcagatagtttctctcaacagcagcaagactcagggatcaacttaaaccagttcttttcatctccagaagccattcagagtctacttagtgatcgtgagaagctctgccaacttttagagcagaatccaaaacttatgcaaatgctccaggatcgcattggccagttgtagtcgcactggaggtgctattgtgaaagtgaaatctgatgctggtcgatcgctaggttcctagagtatggtgttgttttgttttcggctatggctgtagctagatgaaagcaactgccagcttgctagtcgccgaaatgtattcctatgtacattatatgtaactttgttctgtaatgtgaaaatttgtaatgttagtgcgtatctaatttatagttttaagtttaccttagtggttagatcgtgtgacatgcgcagcgacgggaaaacgacgccgccttttgtctgcaaaggcatttgacgctaactacctgtagagttctgaatatcctgttgcactcttgtgtgtatctggttgctttaatgctcgaaaatgaatatcctaaggttttgcattcg

SEQ ID NO: 214646 - DNA, 2144 bp, Zea Mays
cgagagcgtcacggcgccagcctgcctgtgccaatcatcatctgctgctgctggtggtggtgtggtggcgtcgtctcaacaaaagcgagccgagcagagtgctgaggcacaaacaagtacaacaccatcccctctctaccttcttatctcttctcctcgtgcaccagcaacaaaggtggcaggcacagagagagctagctttggccaggcgtccacagcagccagcacaaggtaagcaacctccatctctctccctccctccctcctcctctctctctctctcatgcagtcatggcctcatggcaactcatctcctgccatgcatatctgcacgtatagctttgcccgggatcttttgagcaagcgactcagctagacggccacctttgctttgtttttttgcttttttttcgcatttctccataacccgtgttgcataaattgaacagaggggagaattttgtgacacctccgttctcaccatctcttcagcttgttattagttctgcttcaaacctctgccgcctaagctacgaatttgttcccaagatactagtaaagtaacttgatgctgcctcccccgctactcgattaccacgcgtgaagtagacaacaagcaacgcggttgattccttctccttttttctttctgcgaaacggaccaaccggcgcaccactgtacaatacaccattccattcaggttcagggatatctagttagcttgcgaagcactctgcctacctcgaccagttagctagcatgttaccactataatctctagctactgctctcctctgcttcccattgggggggagaacattcttcaatctcgagcttcttttttatgtacatctgactgtgtgtatggaactgaagaaccagagtagtttgcgttcttcagatgtcgacggtggtcatgggggtggatcttgagtgccacaagtgctacaagaagatcaggaaggtcctctgcaaggtccaagacaaggtgagcatcaggaccatctcctacgacgagaagaacaacacggtgacggtgtccgggcccttcgacgccgaggaggtcgccgacaggctcaccgccgacgccggcaaggtcatcaccgacatacacgtcgtcgggggcttcggcttcggcttgggcgggggcggaggcggaggcggagggaaacaacagaagcacggcgccgtcgctcccggcaaggcgcccaagccagggaaggccagcggcaacgggcacggccagggcgggcacggaggcggaggccatggcggcggcggcaagccgggtaagaataagcacgtcaagttcgacgacatggacatggacgacgacttcgacgacctggacatggacgagccggccggccgccacgcgcacgcgcacgcgcacgggcacgggcacggcgacggcaagccgaagatcgtcaggacgacaaacacccccatcgcggcgcggctggaggcgccccgcacgggcccggcgatgtcgatggccgcggcggcgcccgtgaggatgccgatgccggcgatggcgccaatgccgcagcagcagggcatggggggcgcgccgtccatctggccgcccgcccccgagtggggctacagcgcgcagccatacggcagctacagcggcccgcctactggcgggtactacggcggcgggggcggccccgccgggcactggccctatggtggcggctacggccggaacccgtacggccagcagtactacgaggacgaagagcccagcgctgcgtgcagcgtcatgtgatgtcaccggctcgtctccgctacgcgacatctcgtgtcacgcgctctccgtgtccacgaccacgaccactgctgtaaaattattcctagtgctcgtgtatgtatgtatattaagctgtatttttattttcgccagccctattttcactgtttttttatggcgtttggtttgcttcatgtgttgtcagagtatcttgtttgtttgtgttgtgtgtgtgtgttttggagtggataaagttcgtcatagattgacggtacggtagtaggacctaggacgaacgaagctccatctccagactccagtgtgtatatgtatgctacactcttttatgttcttcttaaactgtgttaatgcacggacaactgcact

SEQ ID NO: 214647 - DNA, 8645 bp, Zea Mays
cgagaagcaaaagatcatttaaaccccaccactctgatcacctatgcggctttccactgagcatcagtcgcactgccttcacttcacttgcagcaactcctcgagttcgacgcccctccatcccttccctgctactgtgaatatatgcggcctgctcgtccttgcgcgagcgggtgaacagtcttcgagcgcgatgagggaggagatggatttgggtgacatcgtgctctcctggtcggtgcaggagatcacgaacgacgacctctacaagacgaaggtggagaggatccctttcagctttggttctcttgatgactacttgcgatcatatatgacacctctgatcgaagaaacaagatcatgcctaaactcgtgccttgagctcattgcagaagcaccgtcttcgaaaatactttcctttaaagttgcagggaaatcaggattgcattctatggatgttgacttttgggacaatggtgctggtttttctaccgagacctacaccgctaggaacggtgacatatttgttttgtctaacatgaagcctgaagctgcagatgacttcaaccgctatggtttaacatattgcttggcaatggttactgaagtttctatgaatgatgaatatcagaagggcttcaaagtgaaagtttcaaatagtactggtttagaaggagactttagtaaacttgtgcatgcaacatttcttgataatataatggctaacatgcgtatatggaaagcactttgctttgactcaagcatgaataataattttacaataatcaagtcacttttagcccccagaaatatgggtgaagatgtctgttctgtctgtgctaaaaaggatgactgtttaatgtcttctgcagagctaccaccagttaatctaaatcagtcacaattggatgccattgaatctatcatctctgctgtaagatgtagacatttgaacctcacaaaacttatatggggcccaccaggtactggaaagaccaagactgttagtgctctattgtgggctttggcttgtttgaaatgccgaactcttacatgcactcccacaaatgttgctgttgttggtgtctgtactcgattccttcaaaatttgaaggaattcagcaagcagattgacatatgtggtctacctctttctcttggagatgttttgttattagggaacagggacaatatggacatttctgaggagatccaggaagttttcttggattatcgtgtggatgagcttacagagtgcttttcattattgtcaggatggaggcacataattgtttcaatgatatcattttttgaggaatgtggttctcgatacgatatgcttcttgaatgtgatggcggcagtgattctgtatgctttttggatttcctgaaaaagcagtttgatgttgcagcaaaagctgtaaagaaatgcatgatgactttgtgggttcaccttccaaagaagtgcttttcacatgaaaatgtcagcaatatatctatggtgttacgtttactagaaaaaattaatgccttcttatgtgatggagatttaactgatgagagtgcgaaaaggggatttgattttcgatcaactgagaactctatttatgagccaatatcttacattgagaaggaattaggtgatgcaaggtctctatgccttaaattgctgaaagatcttcagagttcacttaatttacctgttgcctctagttcttatcggttgcataatgcagagattgctccgcttgatatgttgattgttgatgaagctgctcaagtgaaagaatgtgaattggtgattccactacgtttgtgttggttgaaacatgttgttttggtgggggatgactgccagttgaggccactggttagaagccaagtatgcaaggaagctggatttggaatcagtctttttgagagattagtcatactgaattttgaaaagcatttgctgaatatacagtatcgcatgagcccttgtatcagcttatttccaaatgctaaattttatgacaaaaagattttagatggtcccaatgtccattcttcctacaacaaggattgcactggccttctttttggtagctatgctttcataaatatcactgacgggagggaacaaaaggaaggtgcaggaaacagttggcagaacttggttgaagttgctgttgttatgcacttgatccgaaccatctttaaatcttggagaaagagagaccaagggattagcattggtgtagtttcaccttacagttctcaagttgccgctatcaaagatagacttgggaaaaagtatgatacatctgacaactttcatgtcagggtcaagtcaattgatggtttccaaggagaagaggatgacattatcatactatcaacagttagatccaacgagaggggcaatgttggatttcttgctgacatccaacgaacaaatgttgctcttacaagagcaaggcattgtctctggattcttgggaatgctaatacactgtataaaagtgggacagtctggacagaccttgtttctgatgcgcagagacgtaaatgtatttccaatgccactactgaccctgaattgtgtaagttgattttgcatgtaaagaatgaacttgatgaactcgatgatctactttgttccagctcagcagttttcagcaataccagatggaaggttgttctgagcgacaactttagaaggtctttcatgaaactaaaatctccactcctaaagaaggaggtactccaaaagcttgttaaacttggtggtggttggcggataccaataaagaatcttgatgtgactgatgctttccagcttgcaaaagcatacaggatcagagatctgtatcttgtttggagtattgatctagaaaaaaacgaaagatacttccagatgataagagtatgggaccttttgtcacagcagcatgtcgctagaactgttcaacatctggaaaatctcttctccatgtatacagatgaataccttgaccactgcagaagtgtgcagacagaagggaagctggagtttcctatagtttgggatgctgaacatgatattgttcggtataagaaggactgcaaagttgatgatcaagtagatcatgatcacttggacttctcatgtgccttggagaacacaaaagttagtgaaagcttcttgctgatgaaattttactctttatcatctggtgtagcacatcatttgctgacagctactgatgggactgaaattgagatcccctttgaactaactgatgaagaggaggcgataattcgatttccactcactagtttcattcttgggaggtcaggcactgggaaaaccactgttttgacaatgaaactgtatcaaattgagcaacactcctttattgcatctcaagggatagagttggaagttgatttatctgtggttgatccaaaagataggttggcaatggatacaagaaaaggagaaagttttgtaaaacaagtccttatcaccgtaagccctaagctttgttcagctataaaaaatcacatttgcagacttaaaaggttttgctctggtgatgtttctgaccagcccaaccctcttcatatgtatgatgtaattgacgaccccgaagagtttacagatgtacctgataattttagtgatctacagcatgagcactatcctcttacaataacataccgtaaattcttgatgatgcttgatggaacaatgaagagttcattttttgatatgttctatggagatttcaatcctagcattgagagaggtcattccaaaactcgagctatgcaagcttttattgaatcaaaagaagttacatttgagaagtttgctgctttctattggccccatttcaatggagaactaacgaagaaacttgatgcatccactgtcttcactgaaataatttctcacataaagggtggatacagagctaacatgccgtgcagtggcaagcttgaaaggcttgattatgtgatgctctctgataaaagattttcatctctaaacagtaaaatgagagagaaaatttatgatgttttccttgattatgagagtatgaagcgcactgctagggaatttgatttgtcggattttgtcaacagtcttcacagaagtctagtttctgagggctacaatggggctttagtggatttcatttacatagacgaggtgcaggatcttaccatgtcacaaatagcacttctcaagtatgtctgcagaaactttaaggagggctttgtttttgctggtgacacggcacaaactatagcaaggggtgttgatttcaggtttgaagatgttcgctcactgttttatacctcatttatatcagaaagtgaagcatgcaaccaagtgattaaacatggaaatcatgctcatctcacggatatgttccaactaagtcagaattttcgcacacattgtggtgttcttcgtatggctcagagtataatgagccttctgtactactttttcccatcatgtgttgacaagcttaatccagaaactgggcttgtatacggtgaagcgcctgttctcttggagtctggtaacgatgagaatgcaattatgactatttttggagaaagtagaggtgaacatgctgaccagcatggttttggtgctgagcaagtcatattggttcgtgatgttgcaacgaagaaacaaattgttaacctcgttggtaaacaagctcttgtcttgactattgtcgaatgcaagggccttgaattccaggacgtgctactctacaacttttttagttcatcgccattacggaataaatggagggtagtatatgactacatgaaaacaagagatgttacgtcatcatctgaagttatatctcatcctggtttcgatagaaacaagcattatctactatgttcagaactgaagcagctgtatgtcgctatcacacgaactaggcaaagactctggatatgtgaaaatgctgatgactactgtcaaccaatgtttgactattggaagaaattgtgcattgtagaggttaggctacttgattcctcactgattcaagcaatgcagacagggagcagtactgatgattggaggttaagaggtaccaagttgtttaatgaggggcaatttgagatggcaacaatgtgctttgaaaaggctggtgatgcatatagagagaactgggcaagagcagctggactacttgcaactgctgaccgtgtcatctccacaaatttagaaaggggccaagctaacttgcagaaagcatcagagatttatgagtctattggcatgcatgagaaagctgccacttgctacatcaaactaggtgactacaaaagagcaggaatgatatatatggaaaaatttggaactaaaaggcttgaagatgctggagactgttttgctattactgaatgctggtcactggcagcagaagtttacttcagagctaggtgttatacaaagtgtttctcctgctgctcaaaaggtaaagcattgagtctgggccttcaattcctgcgacagttagaaaaggaacagtgtgagaattttagttcggactttgttgctgttagaaagacatatctcgaaagctgtgctctgcattattttaaatgtggagacataaagcacatgatgccatatgtcaaggctttcaacaatgtggatcacattcgtgcattcttgagttctaggaatcttttggatgaattgttgagtatagagatggaaatgggtaattttcttgaagctgcaggtatagcacagcgtaaaggtgatgtcttattggaggtaaacatactagagaaagcagagtcatttgtaaatgctacacaccttctcctcctctatgtcacagcgaattccttgtggtctccacacagtagaggatggcctccagaaagttttgaaaagaaggaacaattgcttacaaaagttaaagaaatggcgaagaaagtatctgaagactttttctgccttgcttgctttgaagcagacttgttgtcagattcccatagatctcttgccagcttgacctgtagcttgcttgagggtagaaaatgtggaaacatgttagttgaacttatttctgctcgttacattattgatgttcatcttcagtctcaaacctctagatataaccttgagttagagccagtatctgatcagctgtgctataatatgatggcttgtgatcagatgtcgttggaaacactgtcctgtatttggaaccagtggaaattgattttagtcaaagtgcttgctcatcttaatccttctgaggatattaaatctaatgattctgcagctgtgtgtgaagacctttgtgctaaattattcgggttgagaaaagacagtgacaaccgatatgtggtacttaatgtggactctggttggcttactaacacaggcagaagttctttggaacaagatggcaacagatgttggctgcatactgtgcattgtcagtcatgtgctcggacttttatggtaaatgagctttcttctgttggccttagtgtccttcgtaagttggaatctattattgaaacttctagggagatagcatcatctccatatgcccagtggagaagtattgttatcttatatgaaattgcaatgtttctaaaagagttctgtttggcaaattctttaagaaaaacggtcaatttctgtgaacagaaattttttgaattactttttcgggcctggggggatgaaacagcagagtgcttttccgacatacttgactcatctcctgcatatggtttgattgtggattctgttggctcatatactatggcagggaatcagaatttgactcatggtcatcttggaagaatagccatgtttcttctttacacagcaaaatatggtgatatgctgaatttaacacttgaacaatacctgaatcgtgacgctgagtgggcacaattttttcaatctttgaagagttttcttgacactggtgttggaagatgctcattggtccagacctttaaagtggctcttgaatttactaccaatgtaaaatggtggattgagaaggattatatgtctccaatatgctatatgaatttaatggaatgtcttggtttttttgcaatgtcctgttttatggttaatggctgtgcgctttgcacaaaatctctgttggttaagatgctaaagtgccgtacaagcaaggctttcttaggtaattgcctggtttctggtctgggtgaccaggatatggatctggactgtatgacattctcaccaggggtattcatatgccagtcaattaggtctattttgacaaacaagcatgctattcaagagtggattcgggaaatagctccagcaattagatacgttccagtccttctgagactagtaatcatgctttatctgctgactttaactcttcagttgggggactgctatgaggtcacagattttcttgctaagcacagaatttttgaggatttacctcctgatttctccaagaagattgtacctactctgaaatttagaaatggtacagtagcacacttcacaagagtatttggtgatgcacttgctgcaattggagacaccatggtcattcttggtttgcccaaaggcccgctaattagctcaggcttaaaagcttatagatttagctatactgatttgagtgatattagcaaagtaatggcattactttgtccagaagagcagaaattttccatgcaaaaagatacaaaagcttggaatgatacttgtggaaatttgtctattgctagaatacaagataatgagatggtcagtagaattgaaacgcatttgagtgatgagagtattaccttttgggagaagtttgagtcgtttcaagtctttatgcatgaccagaaggactcaagggttattattctattccttgaaagtcttctttcttggcttgagcgtcgagaccttccagaaaatatggatgttcaattattcgtagagatcaggcacatatgcagtcaatttcaagagaagtatcttagggataagaaagtttatctaactgtcgaagacctttactcgacgtgggatgatggggagaacaagctgcagaagatcatcagtttcctgcggtatgagaaaacttcgggaaaagaatctgtcaaaaggaaggacaaagcacctgctgcccagttccccacgcacatggctgatgaatggagtggatgctctgataatgatgaacctgacacagcagggatggacgcggtggaaccagccaaggaagaagatgtaacgtcttgttcgactgcgactgcaactgcaacaaagagaacgcagaacaagaagggcaagaagaaatcaaggaagcggggcggcaagaagtgagcttgcttttagcccgtagccctgctcagctctagaagcatttgatatgagactttttttaatgtactgaagaactactttggcttgaactattactgcttgttctagtctgttttgtactactttggcttgaacagcggtttttagtttcaagtaaccgtgccaggtattcgttgcctcagctactagattttgtaggataaatggttaaccaacatatcttttagtgagcagtttctaaacctttttaatattgtgcgtaataagtcggcttgttgcacaagttttt

SEQ ID NO: 214648 - DNA, 1552 bp, Zea Mays
gtgcaaggcattcccgttggtggccacgtgccctactgctctccatcctccagcgctgtccacacgaggtcgtccttgtgcagcaggcacagctcggcgggctccatcggggaggccataccgcagcggagcgcaaggccggccgcgtcgttggggagcgatggatgcacgcagctggtgatgaatcgaaacctatcgcgtaggacagttcggctaggccggagacctgccggcttgacggagagttgatgcagatctgatcccgcagcaacgtcgaggtagagcgtgttgataacgtgttgagaactacgttaccacggatcaccagatccgctcccttccctcccgtcagcatattaggcgtgagaagatgtggaagacccgtatcccttcccagaagcacgacagtgaaacacacgaaacacatgatgacatttggcatgccacgaacgactgtcgcccctcctcggtcccaacgcgacgagcagattagcttattacctccatgggtaaaagaaagcggtcgttgtgtcaacaagataaccataatgattctctagccagcaaaataatgagaactagaatcccagatcttcctgaggacatttggtctcatgtacattccctaatgccaatgcgtgatgctggccgtgctgcttgcctatctcgtgcctttttacgttcctggagacgtcatcctaatcttatctttaataaggatacgattggcatgaaaaaaaattcatatggagagaatttccaccacaaaattagccgcattctcaggaatcactctggcattagtttgaaaacattcaagcttgactacagtggcatgtgtgggttcgatggaactatatcttgacagttggcttcaggctgctcttaatccagggattgaagaactcaccctctggttgttccatacaaggagaatatatgaattcccatgctcacttttatctgatggggttcgaaattcacttcggtaccttaaacttcgttgttgtgctctccgtcccacagttgaacttgcccccatgagaagcctaacaagtttacatttgtcctttgtgagcattaaatgggatgggttaaagcgcctcctttccaactcccttgctctggaggaattagagctagtatgttgtgacaagatcgtttgcctcaagataccttctgccctgcagcgtctcaacagccttaatatttttggatgctcggccctcaaagtgctagagagcaaagctccaaatctctctagtctttctcttttacattttggaggcaggctagtcttctcacgtgtgaaaacattgcaaatgaagaaactaatcactgaaagtaccgtctatgatgctcgtaccaggctgccatccactatgcccaatcttgaaactcttgtcataaactcatttgattgggtatgtatgtatgtgtgtgtgtgtgtgtgtgtgtgtatatatatatatatatatatatatatatatatatatatatatatatatatatatatatatatatatatatatactatttaaagatagatgtt

SEQ ID NO: 214649 - DNA, 1694 bp, Zea Mays
gcaaggcattcccgttggtggccacgtgccctactgctctccatcctccagcgctgtccacacgaggtcgtccttgtgcagcaggcacagctcggcgggctccatcggggaggccataccgcagcggagcgcaaggccggccgcgtcgttggggagcgatggatgcacgcagctggtgatgaatcgaaacctatcgcgtaggacagttcggctaggccggagacctgccggcttgacggagagttgatgcagatctgatcccgcagcaacgtcgaggtagagcgtgttgataacgtgttgagaactacgttaccacggatcaccagatccgctcccttccctcccgtcagcatattaggcgtgagaagatgtggaagacccgtatcccttcccagaagcacgacagtgaaacacacgaaacacatgatgacatttggcatgccacgaacgactgtcgcccctcctcggtcccaacgcgacgagcaggcagctgcaacgcgtgaaatacgggcacaacagtaccacgcgacgtcaaatacgggcacaactcgtgaacgacggcggcgcctagcggcgacatcgtccccctcgactcctcctccatccccgatgcggcgcgccagcctgcagattagcttattacctccatgggtaaaagaaagcggtcgttgtgtcaacaagataaccataatgattctctagccagcaaaataatgagaactagaatcccagatcttcctgaggacatttggtctcatgtacattccctaatgccaatgcgtgatgctggccgtgctgcttgcctatctcgtgcctttttacgttcctggagacgtcatcctaatcttatctttaataaggatacgattggcatgaaaaaaaattcatatggagagaatttccaccacaaaattagccgcattctcaggaatcactctggcattagtttgaaaacattcaagcttgactacagtggcatgtgtgggttcgatggaactatatcttgacagttggcttcaggctgctcttaatccagggattgaagaactcaccctctggttgttccatacaaggagaatatatgaattcccatgctcacttttatctgatggggttcgaaattcacttcggtaccttaaacttcgttgttgtgctctccgtcccacagttgaacttgcccccatgagaagcctaacaagtttacatttgtcctttgtgagcattaaatgggatgggttaaagcgcctcctttccaactcccttgctctggaggaattagagctagtatgttgtgacaagatcgtttgcctcaagataccttctgccctgcagcgtctcaacagccttaatatttttggatgctcggccctcaaagtgctagagagcaaagctccaaatctctctagtctttctcttttacattttggaggcaggctagtcttctcacgtgtgaaaacattgcaaatgaagaaactaatcactgaaagtaccgtctatgatgctcgtaccaggctgccatccactatgcccaatcttgaaactcttgtcataaactcatttgattgggtatgtatgtatgtgtgtgtgtgtgtgtgtgtgtgtatatatatatatatatatatatatatatatatatatatatatatatatatatatatatatatatatatatatactatttaaagatagatgtt

SEQ ID NO: 214650 - DNA, 1698 bp, Zea Mays
ggagtatatatgcaccgtattcttcggtacgacgcttgacctggacgacgcctctagctagctagctagctagcaaaccgaccccatggcagacgagtggtggagctgcacgcgtgctgccgacgacgacgacgacgccggtggctcgccctgctccacagccccggcaacaacggaccagctcgacgctgccgacgagccggcggcgacgagcactgcctcgatcgatttccggcggccaacctcattattgcacgtcgtccgccacgctgccgtcccgccatcatcccccttaatcctcgccgatccaccccatcatatcgacgactggacgcaagcctacttgtgcgggagagcgccgctcgcggcggcggcggcggcagaggcgagcacaagcctcagcgcgctgctccagctccacggcggcgacgctgctggccgccacttcctgctcgcccagcacctccacggtgacgctgctgacagcgcggcggcgcacgtggcagcagcgtcgcagagctcggccctgtacgccgccgccggcaaccagccgtactcctccagctacggcggcggcgcgccggcggcaggagcgctgatggcccagcagccgccgttccctcatcaggacgaattcgaattctcatccgccagcctctttgttggctcctcgtcgtcgacgcgggattccgccggcgtgccggcggcagcggcgcggcggcccgccgtgacgacgacgaagccgcttctcttgcaggccttggagcaaaaggctttcgcgttccactcccatcataaggaacgtacacgacaacacgacgcttcctcggcgacgacagcaagtgctcccggctcgcctgcgccggcgaagaagccccgggtcgtcgcgacgccgtctcctttgccgaccttcaaggtgtgtgcacatggactgctcgcaccgcacagaccgggcagctagctctagctgtgacgcatgcaacctaaagatagtattatcatcatcatcttgcaccttggattattcggacacatcttttggtttccagctcaacatgcaatccaaacaagtagttattcgatcttgttagctatgataatgatcggtgatcagctgtactactacgattgccttcgatttgatccttgtccgagcgcaggtgaggaaagagaagctcggggacagaatcactgcgctccagcagctagtctcgccttttggaaagacggatactgcatcggttcttcacgaggccatcgaatacatcaggttcctgcatgaccaagtagcttccctgagctctccctacctcgggtgtgggcggcccgtagtgcagcagatacagcaacgacgacaggcgaaggacgacggcggcgccgcggcgaaggaggacctgcgaagccgagggctgtgccttgtcccggtggcgagcactacgacttatgcagtggccgctggtggcgagacggcgccggagttctggctccctaactttgggggcacactacggtagggacagagacagagacatgaatatagtagcgtggacatggagatcttggtagctagctaggtctcgtaggcatgtatttgtagctaataaggccgtattctcatgtctgatgcaaaagcaaatgaataaacctgaccagtcgatcacactagtctctaagggtgtttagtttgctggaatgaac

SEQ ID NO: 214651 - DNA, 1738 bp, Zea Mays
ggaagctcccctatgccctatggcctatggccgctccattgaccgtggaggtggtgtggaatattgcgttgcttgcgcgagctcttacgcatcttcttctcttcgagccttccacagttctacctcccgcccgctggtccctagccgtcaagagattccacgctactggctttcttgccccacgccgtatggttatcgtccagcacgagcggagaaactgaaacacgatcccaaccaattcagaacccgatttggtgatcacctccattctcggtagcacttaattccagggacagcaataagaattgctcctctccaagttcttttggagcgtaatcttatccgtttgggtcggattgatatttgataacttgattgccatttggggagttgcgggagagagagagagatgggccagagcaaggcggagttcttgaagcagttcggtggggactacggttacccggacgcgcctaggggcatcgacgagctgcgggccgccgagttcaagcgcctggaagggatggtttacctggaccatgctggtgcgacactgtactcagaggcacagatgacggatgttgctagagaccttatgtctaatgtctatgggaatcctcaacgattcaagcatggctacaatcgatgctgttacttctgtgcggcatcaggtcctaaaatacttcaatgcatctccaagggactacaaatgtatatttacatcaggggcaacagcagccctaaaacttgttggtgaatgttttccatggagtagagacagttgctatatgtacacaatggaaaatcataatagtgttcttgggataagagaatatgctctgagcaaaggagctactgtatcagcagttgatgttgaagaggttgttgatccatcaaagaatcatgagagtgatagtttatttaaggtttcaaaacgctcaaaccaaagaagaggtgacaatgtgcttttgcacaattatcagaatggaagcctgtcagctatttcaggaaacaatttaaatctatttgcattcccttcagagtgcaatttctcagggcataagttcaacctcagcttggtcaagctcatcaaggaaggaaaatttatggatttctcatcacaacagcagggccagtggatggttctgatagatgctgcaaaaggatgtgcaactgaaccaccaaacttgaccctgtatcccgctgattttgttgtctgttcattttacaagatatttggctatccaactggtcttggtgccttaattgtaaaaaatgaggctgctagtttactgaacaagacatacttcagtggaggaacggtagctgcttcaattgctgacatcgactttgttcagaaaagaaaaggcattgagcaaactcttgaggatggaacaatctcattcttgagcatatcttctcttcgatatggctttaagataattgatatcctaactatctcagctattgcacggcatactgcatctcttgctacttatgtgagaaacaaaatgctggaattgaagcatagcaatgagaaaaatgtttgcataatctatggacaagattttaaggtaatcaacggccttgaggaagaacaagtgttgacactggtgtcgctggacgtgtggctcatcgcagttataggaaagcccttgccgtggcgctcgaccatctcggtcggggtgggctaaggggtgcaggcagtgttggggtaggcgctgccagcgcgcgtggg

SEQ ID NO: 214652 - DNA, 1325 bp, Zea Mays
ctcccctatgccctatggcctatggccgctccattgaccgtggaggtggtgtggaatattgcgttgcttgcgcgagctcttacgcatcttcttctcttcgagccttccacagttctacctcccgcccgctggtccctagccgtcaagagattccacgctactggctttcttgccccacgccgtatggttatcgtccagcacgagcggagaaactgaaacacgatcccaaccaattcagaacccgatttggtgatcacctccattctcggtagcacttaattccagggacagcaataagaattgctcctctccaagttcttttggagcgtaatcttatccgtttgggtcggattgatatttgataacttgattgccatttggggagttgcgggagagagagagagatgggccagagcaaggcggagttcttgaagcagttcggtggggactacggttacccggacgcgcctaggggcatcgacgagctgcgggccgccgagttcaagcgcctggaagggatggtttacctggaccatgctggtgcgacactgtactcagaggcacagatgacggatgttgctagagaccttatgtctaatgtctatgggaatcctcatagccagaacgattcaagcatggctacaatcgatgctgttacttctgtgcggcatcaggtcctaaaatacttcaatgcatctccaagggactacaaatgtatatttacatcaggggcaacagcagccctaaaacttgttggtgaatgttttccatggagtagagacagttgctatatgtacacaatggaaaatcataatagtgttcttgggataagagaatatgctctgagcaaaggagctactgtatcagcagttgatgttgaagaggttgttgatccatcaaagaatcatgagagtgatagtttatttaaggtttcaaaacgctcaaaccaaagaagaggtgacaatgtgcttttgcacaattatcagaatggaagcctgtcagctatttcaggaaacaatttaaatctatttgcattcccttcagagtgcaatttctcagggcataagttcaacctcagcttggtcaagctcatcaaggaaggaaaatttatggatttctcatcacaacagcagggccagtggatggttctgatagatgctgcaaaaggatgtgcaactgaaccaccaaacttgaccctgtatcccgctgattttgttgtctgttcattttacaagatatttggctatccaactggtcttggtgccttaattgtaaaaaatgctacaacaaattactacatagatgctggtgatcggcttcccaag

SEQ ID NO: 214653 - DNA, 1617 bp, Zea Mays
ggaatattgcgttgcttgcgcgagctcttacgcatcttcttctcttcgagccttccacagttctacctcccgcccgctggtccctagccgtcaagagattccacgctactggctttcttgccccacgccgtatggttatcgtccagcacgagcggagaaactgaaacacgatcccaaccaattcagaacccgatttggtgatcacctccattctcggtagcacttaattccagggacagcaataagaattgctcctctccaagttcttttggagcgtaatcttatccgtttgggtcggattgatatttgataacttgattgccatttggggagttgcgggagagagagagagatgggccagagcaaggcggagttcttgaagcagttcggtggggactacggttacccggacgcgcctaggggcatcgacgagctgcgggccgccgagttcaagcgcctggaagggatggtttacctggaccatgctggtgcgacactgtactcagaggcacagatgacggatgttgctagagaccttatgtctaatgtctatgggaatcctcatagccagaacgattcaagcatggctacaatcgatgctgttacttctgtgcggcatcaggtcctaaaatacttcaatgcatctccaagggactacaaatgtatatttacatcaggggcaacagcagccctaaaacttgttggtgaatgttttccatggagtagagacagttgctatatgtacacaatggaaaatcataatagtgttcttgggataagagaatatgctctgagcaaaggagctactgtatcagcagttgatgttgaagaggttgttgatccatcaaagaatcatgagagtgatagtttatttaaggtttcaaaacgctcaaaccaaagaagaggtgacaatgtgcttttgcacaattatcagaatggaagcctgtcagctatttcaggaaacaatttaaatctatttgcattcccttcagagtgcaatttctcagggcataagttcaacctcagcttggtcaagctcatcaaggaaggaaaatttatggatttctcatcacaacagcagggccagtggatggttctgatagatgctgcaaaaggatgtgcaactgaaccaccaaacttgaccctgtatcccgctgattttgttgtctgttcattttacaagatatttggctatccaactggtcttggtgccttaattgtaaaaaatgaggctgctagtttactgaacaagacatacttcagtggaggaacggtagctgcttcaattgctgacatcgactttgttcagaaaagaaaaggcattgagcaaactcttgaggatggaacaatctcattcttgagcatatcttctcttcgatatggctttaagataattgatatcctaactatctcagctattgcacggcatactgcatctcttgctacttatgtgagaaacaaaatgctggaattgaagcatagcaatgagaaaaatgtttgcataatctatggacaagattttaagaggccatgccacatgtggctagtgagattcggtcgcgatcgctggcgatggaggtaggaaagctgtgaagacggatgacaccctcgaagaag

SEQ ID NO: 214654 - DNA, 3663 bp, Zea Mays
aagaaaacttacaagggcgcggcaacagagcgagaggcgcgcgcgcagtcccctctacttcccgccgctggccgtttcccttccccccaatccaaaccctagagagagagagagagagtgtgtagtgtgtgtgtgtgagagagagggggattggaggcgaaggcagcgggctagcgctagcggaggaggagagatccgctgaggtggaacgcccgatcggcggagccccatccaccaccactccacaagatgcggggcgggacgctgcagatcaactggcacgaccagcagccggtgctcagcctcgacttccaccccgtctcccgccgcctcgccacagccggagcggaccacgacgtcaagatctgggaggtagcgtcggacggcaagctccccaccgccaccttcaagaccggcctggtccccaacaccaccgcccacagctccgcggtcaacgtcctccggttctccccttcaggggagtatctcgcctccggtgctgatggtggcggcatcaccctctggaaactgcatcccgctgacgacggcgaggcatggaaaattcacaagacgttactattccatcacaaggatgttcttgaccttcagtggtcgcatgacagcacatttcttgtttctgcatcagtcgacaacacttgcataatttgggaagctagtaaaggcacagtgcaacaaaagctagagggacatctgcattatgttcagggtgtggcatgggatcctttgggccagtatattgcttcactgagttctgacagaacctgtaaaatatatgcaaaaaagcctcagggcaaatccaagaacgcggagaggttgaactttgtttgccagcatacactagtgaaggtagaataccagaatcatgatgaatctaagccaccaaccaaatctcatttgtttcatgatgagacactaccatctttcttccgaaggttggcatggtcacctgatggatcttttctagtattgccagcaggcctttctaaacactcctccgaggtgattaatacagcttatgtaatgtccaggcgtgacctctcaaggccttcgatacaactccctggggcaagtaaagctatagtggcagtacgcttctgccctgtactattcaaaccacgtggttctaactcagatggtttcttcaagcttccttatagagttgtctttgctgtggctactttgaactctctgtatgtctatgatacagaaagtgttcctccaattctagtccatgctggtctacactatgctgccattaccgatattgcatggtcttctgatgctaagtacctggcagtgtcatcacgagatggctactgtactataatagagtttgagaatgaggaactgggacagcctcacatactccccggatcaaaggaagttgctaatgggaatctgacacctgagaccaagaagcctgtatgtgctgatagcatgaaggttgataatagtgccaacaagcttaagatggaagccagtcctgttgctgtaggagttagagcaccactgctgccaactgagaacatcaagagaacaggagagcttgccgaaggaaatgtaacctgtgaaaacaaggagccggtaacaatagacagtatggaagtagatgccgatgataccaaaggcaaggaggcaaccatacccgtggcagctgaagtgacaccgccaccagcggtaccggcagcgaagaacagcgcatctagtaagcctgctaagaggcgaattactcctatcgcaatcgactaggtagtagacgcagcagttagggttttgatgtgttatgtagtgatggcaagtactggatactatgtttaggctaccctgtaaagtcgtttgtgctgcggtgctcatcttctgctctagtcctcctgctcttgacacaattggggagaatgtgaaaatggaagaacgtatgaagctagacttgttgcaatttatagacatgggctgggaactggaacagtcatcttgttcgcgtcgagcgggaagcattcgcgcgtgctggtgttcatcagtgaggacctcttctttatttacctgctgccgccgatcatattcaatgcaggtgaaagacttggttgtggacaacctctacgtttcacttatccagcgtacatgtcctcaccttgccacagtgagttgttcctgttagagaaggaagatcccatgaagaaagagctaatgcaattggttgtaaccacacgacttgaccctgaactagaagtgcccttgttactcaccggtccattaaaattagtccatgcatttctggtttccccagctgaagtagatttggctgcagcttgtgtgatgcatgttggacgtcccttttggctgcattgccctggattcttccagaaaatatgggatacattttatctcatcctaatatacagtgcggtttctcgaggttctatttcattgcttgacatccctttctctgatttatctgatgtggttgctgcagatgattacttctatattgaaggtgcttctgcgagtattccacggtcgattgctaaggtgacattaaatgaaagcaaaaccaaagtagtcaatttctcaatagcctggtcgtcctcaccagacctcgtacaatatagacctttcttcagcacaccagaacttgttgagttccctacatccaagcctggccagaaagcttatgcctatttctacccaccatcaaatcccaattttcaaggtttgccttatgaaaagcctcctttgcttgtcaaaacacatggaggaccaactgctgaaacacgtgcaattctggacctcagtgtccagtattggacaagtagagggtgggcgtatgtcgatgtcaactatggaggaagcactgtcgtcgagtcggaccgcagagatgatgatgggctttctgaggcacttatgcttggcgtaggctgcaacattgacataattctccaagggaagaagcggtttgacatgaatcctcccgtcgatcccttcgaaactaaaagtgagctgcaggacacatggttcgcaccaaattctccatccatagataacaaggattttaatgttggagatcacatagacgtcaagcttattgaagttggtgcagatggtggctccatagatgaacttaccgcgtttaaagaaaaaccttctgaaaatgttctgtcaagagtttcttggcagaaagaagaggttgtcaaagagccatctgttggttccttcagaaacttgttactttaccaccaagcatgtgtatcagttgatgaagatggggatcacatttttatctctgacagtaaccatcataggatcatcattagcaacagcaatgggatgattttagattataagtcagccaaatttttgcgcccagcttcatcattttatcacgctgctgaagactgtcaatttattgtagattcagagaatcatgctgtcagaaaagcagatttgggaaggactttacaaacagtttatccagtcttcaataaaagcaatggcatctggagctggattaccgataagcttggtatgagaaaagaagctactccaactattcaagattttcatgcagactccatgccacttccatggcatttgattagaattttcattagattttcgtgggagggagattgttttgttaacaattga

SEQ ID NO: 214655 - DNA, 3748 bp, Zea Mays
gagccgaatagtagggcggcagcagcggcacgcacgcacagggatgcgcacaggcgcagcggccgcaccgcactgcagcatcgacgacgccccggcgggcccgtccctatcaacccaccccgcgccatagaagcaggcgaaagcgagccccgggaactcactcccttccctttcagagctcacagttcggagtgggaggaggagaggagacccacacactgtacccggccacagaagcagctactacagcaggagagggagaggaggccggcccccaagatctccgtccgagaagaagcgagcggcgacggcgagacgaggcagagagtttggtgactgcagaaggattcggtgaggaatctcgtcatgcagacttcaaaaccaaggagtgggtcttcagatgccccgcagaggacttctccaaggacaccgcgggcatctcgtgtggccaaaaccggagggaatgaaaccgattctacaggagttaccccgacaagaacgcctacggagaggagccctaaggttactgagaggcggtctccacggagcccaattactgagaagaagcgcccaagcaggctatcggaactggagtccaaggtcagccagctgcaagatgaactgaagaaggccaaggagcaacttagctcgtcagaggcacggaggcgccatgcgcagcaggaagccgaggaagcaaagacgcaagagcaggctgcagccgcctcgaagctggaggagttgcagcgccagcttgacgagttctcagctgcggaggaatcccgtctccaggaactgcgcaagatctcgcaggaacgtgaccgtgcctgggagtcggaactcgaggcagtgcagaggcagaaatcagcggacgcagccgcgctcggctcggccatgtccgagatccagcggctgaagcagcagctggaagcttcagcagagtctgacgcggcccgcgcgaagcagtgcgagtacgtggaagctgagatcgagggcttgaagcaggagatggagatccgcctagcgaccattgagggcctgaaggtgaatgtcagcgagagtgacagggctgcggctgaggcaaatgccacggtaaatgagaccaagcagcagctggagacagcgaaggccaccattgactcacttgtagctgagggcgtccgcatgcaggaatgcctgaggtcgaaggacatggagctcaatgagtccaaggctctcgtggcatcgctccaggaagatatgaagaagtcacatgacacggacaatgccaaggccaaggccaatactgatgtccgctctgagactgaggctctgcagaaggtgctggtgaccacaagtgccgccgacgccaatgggagctgtggaagctatgacccagagatcgaacagttgcggactgctcttgaggtcgctgagatcaggtaccaggagcagcaaactcggatgactatcgagactggaggcttgtacgagacattggagagtgtgagggccgagtgcgcccgcgaactgtgcgagctcaggctggagctgaagaacaagaacgatgcactcatggaggcaatggcaggagccgccgcagatcctcacaggccagacgcgatgcagcagccggagctggaggcgaagctgatgaggtccatcaccgacgcggcggagctgaaggcatgcctgatggacaaggagaacgcgctgcagagcctggcggaggagaacgaggcgctgaaggcgggggcgggcagggcggaggcggagctgcggcgcaagtacgaggcggcggtggcggagctggagctggccaaggccgcggagcaggacgtgcggatgcggctggggctggtgacggacgaggcggacaggagcagccggcgcgctgcgcgggcgtcggagcagctggacgcggcccaggcggccggcgcggagatggaggcggagctgcggcgcctgcgcgtgcagtccgaccagtggcgcaaggccgcggaggcggctgcagccgcgctcggtgggggtggggggaaggacggcaacggcggcacggtggagaggaccgggtcgctggggcccgagtacggcagctccatcggcgggaagctgatgagctcgccattctcggacgacgtggacgaggagtcacccaagcggcgcaacggcggcggcggcggcggcggcggcgtgctgcgcaggatgagcgggctctggaagaagagccccaagtgagtgagactgagatggggtggacggggtccgggatagccgtaggtgcgaggtgatgcaatagcagcagtatgagtaggagggatactggtgaatgctgcagggaagacgacgacgctctttctggacaagacacggagacacagctctagtctaggtggtaggaagcatgatcgtctctgtctgataacatttggctggtacttgagtgaacctcgtgtcgaggagcagctgcttttggctgcctgttctgtaccttactatgcttcattcagtcaaaaaaattcccacatgtgacatgttcttggttcttttttctttttgaagcgtttttatttcattttcccttcagaagctatgctgtacatctaatacgttacttgcctggctgatgatttggatgtatgtatctgggcagtatcactgcgcgttctctcagcgcgatttcactggaatccaggtacccgtttagttgagagagagagagagagagagagagagagaggaagccgtcggggatgccgttgcggaagagctaccaacgaacgtcgcagtgcatgcacctctgcttccataagaattcagcacggctagcacgaaggaagatctcagaaaacatgtctggattcagaatcagtagcagagtagaaactctggactctagtacacacttgcatacaagctacggttccttcttcccatccatgtccatgggcacagcaaaacggaccggtagacgagctgagagaagctaagctgcaagcagctagctaaagctaactaaagcaagacacaaacatacagcatgggctaaacgtacgtatgcctgcatcactgcatgcatggaatggatggatcagaagcactgggtctgggtctcatatattccagctcccggcgggcgggcggacggtcaccatcgtcgtcatacctaccacaccatgttgtgctttcacgcgacgaggacgtagacggcgtagatgatgcccgggatgtatcccaggatggtgagcagcaggcagatccagaactcaacctgcagggcaggcacacagtagatcgcgagcaagcagttactttacttacacacatctgatgagaacgacgatgcatcaattaatcagatgctaagctgagtgttaattaccccgatgccgtagcggaggaagacgccgaccggcggcagcaggatggccagcaggatctccacgaacgtctccgaccccattgccgacgccgccgccttccaagtaggagcagctcaatctcagcgcaaagtttcgctccctgctctgctctcagctcagggccccagctgggaaggagagacgccggtggcagcagatgaggaggcgtggtagcaagcaagcagacgctggaactggaacccaggggaaggatcaaagcaagctgcccgcagagagaagacgtggcggcgccgagcttcggtggcgcgacacctggcctcgcttctaggacgcgtgccctgcctaccattgcggcagagaagagaggttttctgtcaacaacagtgaag

SEQ ID NO: 214656 - DNA, 3579 bp, Zea Mays
aacccaccccgcgccatagaagcaggcgaaagcgagccccgggaactcactcccttccctttcagagctcacagttcggagtgggaggaggagaggagacccacacactgtacccggccacagaagcagctactacagcaggagagggagaggaggccggcccccaagatctccgtccgagaagaagcgagcggcgacggcgagacgaggcagagaggagtgggtcttcagatgccccgcagaggacttctccaaggacaccgcgggcatctcgtgtggccaaaaccggagggaatgaaaccgattctacaggagttaccccgacaagaacgcctacggagaggagccctaaggttactgagaggcggtctccacggagcccaattactgagaagaagcgcccaagcaggctatcggaactggagtccaaggtcagccagctgcaagatgaactgaagaaggccaaggagcaacttagctcgtcagaggcacggaggcgccatgcgcagcaggaagccgaggaagcaaagacgcaagagcaggctgcagccgcctcgaagctggaggagttgcagcgccagcttgacgagttctcagctgcggaggaatcccgtctccaggaactgcgcaagatctcgcaggaacgtgaccgtgcctgggagtcggaactcgaggcagtgcagaggcagaaatcagcggacgcagccgcgctcggctcggccatgtccgagatccagcggctgaagcagcagctggaagcttcagcagagtctgacgcggcccgcgcgaagcagtgcgagtacgtggaagctgagatcgagggcttgaagcaggagatggagatccgcctagcgaccattgagggcctgaaggtgaatgtcagcgagagtgacagggctgcggctgaggcaaatgccacggtaaatgagaccaagcagcagctggagacagcgaaggccaccattgactcacttgtagctgagggcgtccgcatgcaggaatgcctgaggtcgaaggacatggagctcaatgagtccaaggctctcgtggcatcgctccaggaagatatgaagaagtcacatgacacggacaatgccaaggccaaggccaatactgatgtccgctctgagactgaggctctgcagaaggtgctggtgaccacaagtgccgccgacgccaatgggagctgtggaagctatgacccagagatcgaacagttgcggactgctcttgaggtcgctgagatcaggtaccaggagcagcaaactcggatgactatcgagactggaggcttgtacgagacattggagagtgtgagggccgagtgcgcccgcgaactgtgcgagctcaggctggagctgaagaacaagaacgatgcactcatggaggcaatggcaggagccgccgcagatcctcacaggccagacgcgatgcagcagccggagctggaggcgaagctgatgaggtccatcaccgacgcggcggagctgaaggcatgcctgatggacaaggagaacgcgctgcagagcctggcggaggagaacgaggcgctgaaggcgggggcgggcagggcggaggcggagctgcggcgcaagtacgaggcggcggtggcggagctggagctggccaaggccgcggagcaggacgtgcggatgcggctggggctggtgacggacgaggcggacaggagcagccggcgcgctgcgcgggcgtcggagcagctggacgcggcccaggcggccggcgcggagatggaggcggagctgcggcgcctgcgcgtgcagtccgaccagtggcgcaaggccgcggaggcggctgcagccgcgctcggtgggggtggggggaaggacggcaacggcggcacggtggagaggaccgggtcgctggggcccgagtacggcagctccatcggcgggaagctgatgagctcgccattctcggacgacgtggacgaggagtcacccaagcggcgcaacggcggcggcggcggcggcggcggcgtgctgcgcaggatgagcgggctctggaagaagagccccaagtgagtgagactgagatggggtggacggggtccgggatagccgtaggtgcgaggtgatgcaatagcagcagtatgagtaggagggatactggtgaatgctgcagggaagacgacgacgctctttctggacaagacacggagacacagctctagtctaggtggtaggaagcatgatcgtctctgtctgataacatttggctggtacttgagtgaacctcgtgtcgaggagcagctgcttttggctgcctgttctgtaccttactatgcttcattcagtcaaaaaaattcccacatgtgacatgttcttggttcttttttctttttgaagcgtttttatttcattttcccttcagaagctatgctgtacatctaatacgttacttgcctggctgatgatttggatgtatgtatctgggcagtatcactgcgcgttctctcagcgcgatttcactggaatccaggtacccgtttagttgagagagagagagagagagagagagagagaggaagccgtcggggatgccgttgcggaagagctaccaacgaacgtcgcagtgcatgcacctctgcttccataagaattcagcacggctagcacgaaggaagatctcagaaaacatgtctggattcagaatcagtagcagagtagaaactctggactctagtacacacttgcatacaagctacggttccttcttcccatccatgtccatgggcacagcaaaacggaccggtagacgagctgagagaagctaagctgcaagcagctagctaaagctaactaaagcaagacacaaacatacagcatgggctaaacgtacgtatgcctgcatcactgcatgcatggaatggatggatcagaagcactgggtctgggtctcatatattccagctcccggcgggcgggcggacggtcaccatcgtcgtcatacctaccacaccatgttgtgctttcacgcgacgaggacgtagacggcgtagatgatgcccgggatgtatcccaggatggtgagcagcaggcagatccagaactcaacctgcagggcaggcacacagtagatcgcgagcaagcagttactttacttacacacatctgatgagaacgacgatgcatcaattaatcagatgctaagctgagtgttaattaccccgatgccgtagcggaggaagacgccgaccggcggcagcaggatggccagcaggatctccacgaacgtctccgaccccattgccgacgccgccgccttccaagtaggagcagctcaatctcagcgcaaagtttcgctccctgctctgctctcagctcagggccccagctgggaaggagagacgccggtggcagcagatgaggaggcgtggtagcaagcaagcagacgctggaactggaacccaggggaaggatcaaagcaagctgcccgcagagagaagacgtggcggcgccgagcttcggtggcgcgacacctggcctcgcttctaggacgcgtgccctgcctaccattgcggcagagaagagaggttttctgtcaacaacagtgaag

SEQ ID NO: 214657 - DNA, 3607 bp, Zea Mays
tagaagcaggcgaaagcgagccccgggaactcactcccttccctttcagagctcacagttcggagtgggaggaggagaggagacccacacactgtacccggccacagaagcagctactacagcaggagagggagaggaggccggcccccaagatctccgtccgagaagaagcgagcggcgacggcgagacgaggcagagagaaggattcggtgaggaatctcgtcatgcagacttcaaaaccaaggagtgggtcttcagatgccccgcagaggacttctccaaggacaccgcgggcatctcgtgtggccaaaaccggagggaatgaaaccgattctacaggagttaccccgacaagaacgcctacggagaggagccctaaggttactgagaggcggtctccacggagcccaattactgagaagaagcgcccaagcaggctatcggaactggagtccaaggtcagccagctgcaagatgaactgaagaaggccaaggagcaacttagctcgtcagaggcacggaggcgccatgcgcagcaggaagccgaggaagcaaagacgcaagagcaggctgcagccgcctcgaagctggaggagttgcagcgccagcttgacgagttctcagctgcggaggaatcccgtctccaggaactgcgcaagatctcgcaggaacgtgaccgtgcctgggagtcggaactcgaggcagtgcagaggcagaaatcagcggacgcagccgcgctcggctcggccatgtccgagatccagcggctgaagcagcagctggaagcttcagcagagtctgacgcggcccgcgcgaagcagtgcgagtacgtggaagctgagatcgagggcttgaagcaggagatggagatccgcctagcgaccattgagggcctgaaggtgaatgtcagcgagagtgacagggctgcggctgaggcaaatgccacggtaaatgagaccaagcagcagctggagacagcgaaggccaccattgactcacttgtagctgagggcgtccgcatgcaggaatgcctgaggtcgaaggacatggagctcaatgagtccaaggctctcgtggcatcgctccaggaagatatgaagaagtcacatgacacggacaatgccaaggccaaggccaatactgatgtccgctctgagactgaggctctgcagaaggtgctggtgaccacaagtgccgccgacgccaatgggagctgtggaagctatgacccagagatcgaacagttgcggactgctcttgaggtcgctgagatcaggtaccaggagcagcaaactcggatgactatcgagactggaggcttgtacgagacattggagagtgtgagggccgagtgcgcccgcgaactgtgcgagctcaggctggagctgaagaacaagaacgatgcactcatggaggcaatggcaggagccgccgcagatcctcacaggccagacgcgatgcagcagccggagctggaggcgaagctgatgaggtccatcaccgacgcggcggagctgaaggcatgcctgatggacaaggagaacgcgctgcagagcctggcggaggagaacgaggcgctgaaggcgggggcgggcagggcggaggcggagctgcggcgcaagtacgaggcggcggtggcggagctggagctggccaaggccgcggagcaggacgtgcggatgcggctggggctggtgacggacgaggcggacaggagcagccggcgcgctgcgcgggcgtcggagcagctggacgcggcccaggcggccggcgcggagatggaggcggagctgcggcgcctgcgcgtgcagtccgaccagtggcgcaaggccgcggaggcggctgcagccgcgctcggtgggggtggggggaaggacggcaacggcggcacggtggagaggaccgggtcgctggggcccgagtacggcagctccatcggcgggaagctgatgagctcgccattctcggacgacgtggacgaggagtcacccaagcggcgcaacggcggcggcggcggcggcggcggcgtgctgcgcaggatgagcgggctctggaagaagagccccaagtgagtgagactgagatggggtggacggggtccgggatagccgtaggtgcgaggtgatgcaatagcagcagtatgagtaggagggatactggtgaatgctgcagggaagacgacgacgctctttctggacaagacacggagacacagctctagtctaggtggtaggaagcatgatcgtctctgtctgataacatttggctggtacttgagtgaacctcgtgtcgaggagcagctgcttttggctgcctgttctgtaccttactatgcttcattcagtcaaaaaaattcccacatgtgacatgttcttggttcttttttctttttgaagcgtttttatttcattttcccttcagaagctatgctgtacatctaatacgttacttgcctggctgatgatttggatgtatgtatctgggcagtatcactgcgcgttctctcagcgcgatttcactggaatccaggtacccgtttagttgagagagagagagagagagagagagagagaggaagccgtcggggatgccgttgcggaagagctaccaacgaacgtcgcagtgcatgcacctctgcttccataagaattcagcacggctagcacgaaggaagatctcagaaaacatgtctggattcagaatcagtagcagagtagaaactctggactctagtacacacttgcatacaagctacggttccttcttcccatccatgtccatgggcacagcaaaacggaccggtagacgagctgagagaagctaagctgcaagcagctagctaaagctaactaaagcaagacacaaacatacagcatgggctaaacgtacgtatgcctgcatcactgcatgcatggaatggatggatcagaagcactgggtctgggtctcatatattccagctcccggcgggcgggcggacggtcaccatcgtcgtcatacctaccacaccatgttgtgctttcacgcgacgaggacgtagacggcgtagatgatgcccgggatgtatcccaggatggtgagcagcaggcagatccagaactcaacctgcagggcaggcacacagtagatcgcgagcaagcagttactttacttacacacatctgatgagaacgacgatgcatcaattaatcagatgctaagctgagtgttaattaccccgatgccgtagcggaggaagacgccgaccggcggcagcaggatggccagcaggatctccacgaacgtctccgaccccattgccgacgccgccgccttccaagtaggagcagctcaatctcagcgcaaagtttcgctccctgctctgctctcagctcagggccccagctgggaaggagagacgccggtggcagcagatgaggaggcgtggtagcaagcaagcagacgctggaactggaacccaggggaaggatcaaagcaagctgcccgcagagagaagacgtggcggcgccgagcttcggtggcgcgacacctggcctcgcttctaggacgcgtgccctgcctaccattgcggcagagaagagaggttttctgtcaacaacagtgaag

SEQ ID NO: 214658 - DNA, 2864 bp, Zea Mays
gctatttgcaattttgccgtgggggtaacccatggagatcacggaggagcagcggcgtcgcgccgaggccaaccgcctcgccgccctcgagaagcgcaagcgctacgcagaggccgcggctgccaccgcctttcccacctccggtgcctccacattccctgcctacgacactgccgccgccgccgagtggaggctcgccaaatgcccaagaatcgccccgcccgcgcgccagttaccgtttgtaccgctgccccctcgtccttccccaccgccgctgccgccgactccgcctcagccgccggtggggttccaggttgtgctggaggtatgcggccccgacgagttctgggtggcggtggtgccggtagaaggcagggcctaccctggggaggccgagtgcctcggcgccgtccaggactgcctcgctgcggcttcggttgtacaatactctgcaacacagtcgctaagtcaaagcacacatcttcgtcctgtatttaagcttgtggactatggtgtggtgttgaaatgccttaagaaattacctggagcttctgtgcaagaaataccttctagcacaaagagaattattcagaatatacctaggtatcacgtccaaaagtgggcttctgatgaagaagtacatgagcttctcaagaaactgccacagcaaataaaagatgcgcttttacccttccaacttgaaggagtgatgtttgggcttcgaaggcgtggacgttgcctaattgcagatgagatggggctcggcaagactctccaggcgattgcaatagcatgctgtttcaaggacgagggctctatattaatagtatgtccagctgtattgcgttattcttgggcagaggaattggaacgctgggatccttcatttatgccaaaagatattcatattgtatttggtcgtcaagacagtcttgaacatctaaatgctactccaagggcagtgattatatcttaccagatgctaagtcgccttagagaaagtatggtgaatagaacatgggcactgatgattgttgatgaatcacataacatacgctgcacgaagaaactagaagaaaaatatgagacaaaagctgtgctacatctagcttcaaaaactgaacgcatcatattgctctcggggacaccctctttctcaagaccttttgatatctaccaccagataaatatgctatggccccacatgcttggtactgataaatttgattatgcgaaaaaatattgcttgctgcatgttgcacgaagttatcaggggaaaatgtttaaggacttctctaagggcacacggttgacagagttaaatgttttgctcagtcaaactgtcatgattaggcgactgaaggagcatttgttgaatgaactgccccccaagcggcgacaaattattaggttgaagctaaaggcaccagatatcagggcagccacatcttcatgcggcaaaagggtgaaccctaacagttgtaatggaactcttacaattgaattgcccagtaaaagcaatgatgatgaaaatacaaaagaggaagaagaagatgattgcaagaaatctccaaggagtctcaccccacaagagattggtatcgcaaagttatctggatttagtgaatggttctcaaatcatttcatcatgaatggatttgatgctaaccataacctggatccccagtctagctgtcagaaaacaataatatttgcacatcacttaaaggttctagatggaatacaggtgtttatctctgagaatgagatcagatttgttcgcattgatggaagcacacttcaaagggaaaggaaagaagctgttgattctttccgtttggatccagaggtgaaggttgcaataattggaattactgctggtggtgttggcttagacttctcatctgctcagaatgttatttttgtggagctcccaaaatcagcttcagaattgcttcaggctgaggatagagctcatagacgtggccaaagaaatgcggtcaacatatatatattctgtggaaagaacacattggatgaatcacactggctccagttaaaccagagtctgttccgtgtctcgtctttgatgaatggaaaaaaggatgctgtaagggagattgaggttgatcaagtgtgccaacttgaagaaatcaaggacaccgaggaaacacaacgcaaactgcatcctttggagaatcataatgcagatttgacccacgtaccaaaaaaacttctggaaagtgatgatttgtccattgatggttttcttggcatcgaagatttggaatttgacttggatttcaccattaggacaattcctcttgaatttgaggatgaaaaccccggcacatccttgaaaaataatccaactccaacagtacttgaagacagatcttgtattgatgtttctctttcaccagctgcagtcttttgctctgtactatctagttgtaaatcaataaagaggctttctggaaattctgggtccttgagtcaagctgcatctgttccagattttccaattcaagtggagtctctgcgttttgaggttagccggcacacaggacgaatccacttgtacagttgtgttcctggacatgattcaagacccaaaccactttgtgaaaattttctgccagaagaattgaattcacctttatgttctcccagtgatgttaaaacaagaactcttctcttgaaaaagattccttcattttgcaatgtgttcaatgcattcatcaaagagtggttggcactaagaccaattgatcaaaataaattgcttggaaagccattacaacttccgttgaaccttgagttgtgttttctgaaagatagcatcaatcatagcacagaaggat

SEQ ID NO: 214659 - DNA, 4295 bp, Zea Mays
gctatttgcaattttgccgtgggggtaacccatggagatcacggaggagcagcggcgtcgcgccgaggccaaccgcctcgccgccctcgagaagcgcaagcgctacgcagaggccgcggctgccaccgcctttcccacctccggtgcctccacattccctgcctacgacactgccgccgccgccgagtggaggctcgccaaatgcccaagaatcgccccgcccgcgcgccagttaccgtttgtaccgctgccccctcgtccttccccaccgccgctgccgccgactccgcctcagccgccggtggggttccaggttgtgctggaggtatgcggccccgacgagttctgggtggcggtggtgccggtagaaggcagggcctaccctggggaggccgagtgcctcggcgccgtccaggactgcctcgctgcggcttcggttgtacaatactctgcaacacagtcgctaagtcaaagcacacatcttcgtcctgtatttaagcttgtggactatggtgtggtgttgaaatgccttaagaaattacctggagcttctgtgcaagaaataccttctagcacaaagagaattattcagaatatacctaggtatcacgtccaaaagtgggcttctgatgaagaagtacatgagcttctcaagaaactgccacagcaaataaaagatgcgcttttacccttccaacttgaaggagtgatgtttgggcttcgaaggcgtggacgttgcctaattgcagatgagatggggctcggcaagactctccaggcgattgcaatagcatgctgtttcaaggacgagggctctatattaatagtatgtccagctgtattgcgttattcttgggcagaggaattggaacgctgggatccttcatttatgccaaaagatattcatattgtatttggtcgtcaagacagtcttgaacatctaaatgctactccaagggcagtgattatatcttaccagatgctaagtcgccttagagaaagtatggtgaatagaacatgggcactgatgattgttgatgaatcacataacatacgctgcacgaagaaactagaagaaaaatatgagacaaaagctgtgctacatctagcttcaaaaactgaacgcatcatattgctctcggggacaccctctttctcaagaccttttgatatctaccaccagataaatatgctatggccccacatgcttggtactgataaatttgattatgcgaaaaaatattgcttgctgcatgttgcacgaagttatcaggggaaaatgtttaaggacttctctaagggcacacggttgacagagttaaatgttttgctcagtcaaactgtcatgattaggcgactgaaggagcatttgttgaatgaactgccccccaagcggcgacaaattattaggttgaagctaaaggcaccagatatcagggcagccacatcttcatgcggcaaaagggtgaaccctaacagttgtaatggaactcttacaattgaattgcccagtaaaagcaatgatgatgaaaatacaaaagaggaagaagaagatgattgcaagaaatctccaaggagtctcaccccacaagagattggtatcgcaaagttatctggatttagtgaatggttctcaaatcatttcatcatgaatggatttgatgctaaccataacctggatccccagtctagctgtcagaaaacaataatatttgcacatcacttaaaggttctagatggaatacaggtgtttatctctgagaatgagatcagatttgttcgcattgatggaagcacacttcaaagggaaaggaaagaagctgttgattctttccgtttggatccagaggtgaaggttgcaataattggaattactgctggtggtgttggcttagacttctcatctgctcagaatgttatttttgtggagctcccaaaatcagcttcagaattgcttcaggctgaggatagagctcatagacgtggccaaagaaatgcggtcaacatatatatattctgtggaaagaacacattggatgaatcacactggctccagttaaaccagagtctgttccgtgtctcgtctttgatgaatggaaaaaaggatgctgtaagggagattgaggttgatcaagtgtgccaacttgaagaaatcaaggacaccgaggaaacacaacgcaaactgcatcctttggagaatcataatgcagatttgacccacgtaccaaaaaaacttctggaaagtgatgatttgtccattgatggttttcttggcatcgaagatttggaatttgacttggatttcaccattaggacaattcctcttgaatttgaggatgaaaaccccggcacatccttgaaaaataatccaactccaacagtacttgaagacagatcttgtattgatgtttctctttcaccagctgcagtcttttgctctgtactatctagttgtaaatcaataaagtctcgtaagaggctttctggaaattctgggtccttgagtcaagctgcatctgttccagattttccaattcaagtggagtctctgcgttttgaggttagccggcacacaggacgaatccacttgtacagttgtgttcctggacatgattcaagacccaaaccactttgtgaaaattttctgccagaagaattgaattcacctttatgttctcccagtgatgttaaaacaagaactcttctcttgaaaaagattccttcattttgcaatgtgttcaatgcattcatcaaagagtggttggcactaagaccaattgatcaaaataaattgcttggaaagccattacaacttccgttgaaccttgagttgtgttttctgaaagatagcatcaatcatagcacagaagggatacttaaagggggaagtaagaggcgtgctgcatcattgaatgatgtcagtaatcctttgccagaaaatgctgaatggagacaggtggtgttgcgtaatggcacctgtaaagagagacagtacactcagggctggaccattgatgatgaacctctctgcaaactttgtcaaggactttgcaatggaaggcttgcaaagtcaccagaatattttgaagatctattctgtagtttagcttgtttccaggaatacagattaagaaccagtggcagggccctccggcaggcactgtttcaaatagaacgtggcaagtgctcccaatgcaagctcgattgttgcaagcttgtcaaacacattaaactcttacctttgggaaagcgagaagaatacatcagaaaggttgctccaaacattgcaagtagaaagaaactcctagataaacttgtccgtgaaccaattgatggaaatgcttggcatgcagatcacataatacctgtttataaaggaggaggggaatgtaaactcgagaacatgagaacactgtgtgtggcttgtcattatgaggtcaccagaactcagcacaaggaactaaaagaaataagaaagaaggctaaagagcacttgaaaaacgccttgaataaacaaaaggataaagttagtagtctctcctctagacttcaattatctttgaaccatttttgcaaataaaaaatagcaaatgttctttgagcaacgagcttctctgtgaaaactaatagaatgagtagaatggtttctccattactatatggtttacttatacaacagtgagtgtacatgtaaggaaaaaaagaattaaattgctctaatagtctaatgtcatctattgtaatcaatacatattgcacatgcatatatgatctgctattaggaccaaaaattgttgagatatgagaactagtaatggttaggatattgcctttcttacattctgggcaaccatatgcaaattatgtatcgttgtccccttttgtgtatttgtttctcctatacattagttttttgttgttgctattattccttcttctctttcctttcgttgtagccaagtgaagcaacagaagaactagatgacgaatcgttgctgatagctgtcccgggtagtgcctactccttaggatttcctggcaacggatctgatgaaaaggctgctgaatagggcatgtttcatttaccttgattattgttcaaaaagggcgctggtattttttagctcgcgtcctttttttgtacatgttaaatgctaccaagcgtttgtaagctgttcggctgctcttataagcagcactgataagcaacactattgcagctgcagagctagaattatctcacatttttgggcttgttcgttttgatgctaaaccatgtggattgagttggattg

SEQ ID NO: 214660 - DNA, 3875 bp, Zea Mays
gctatttgcaattttgccgtgggggtaacccatggagatcacggaggagcagcggcgtcgcgccgaggccaaccgcctcgccgccctcgagaagcgcaagcgctacgcagaggccgcggctgccaccgcctttcccacctccggtgcctccacattccctgcctacgacactgccgccgccgccgagtggaggctcgccaaatgcccaagaatcgccccgcccgcgcgccagttaccgtttgtaccgctgccccctcgtccttccccaccgccgctgccgccgactccgcctcagccgccggtggggttccaggttgtgctggaggtatgcggccccgacgagttctgggtggcggtggtgccggtagaaggcagggcctaccctggggaggccgagtgcctcggcgccgtccaggactgcctcgctgcggcttcggttgtacaatactctgcaacacagtcgctaagtcaaagcacacatcttcgtcctgtatttaagcttgtggactatggtgtggtgttgaaatgccttaagaaattacctggagcttctgtgcaagaaataccttctagcacaaagagaattattcagaatatacctaggtatcacgtccaaaagtgggcttctgatgaagaagtacatgagcttctcaagaaactgccacagcaaataaaagatgcgcttttacccttccaacttgaaggagtgatgtttgggcttcgaaggcgtggacgttgcctaattgcagatgagatggggctcggcaagactctccaggcgattgcaatagcatgctgtttcaaggacgagggctctatattaatagtatgtccagctgtattgcgttattcttgggcagaggaattggaacgctgggatccttcatttatgccaaaagatattcatattgtatttggtcgtcaagacagtcttgaacatctaaatgctactccaagggcagtgattatatcttaccagatgctaagtcgccttagagaaagtatggtgaatagaacatgggcactgatgattgttgatgaatcacataacatacgctgcacgaagaaactagaagaaaaatatgagacaaaagctgtgctacatctagcttcaaaaactgaacgcatcatattgctctcggggacaccctctttctcaaggcgataatagaccttttgatatctaccaccagataaatatgctatggccccacatgcttggtactgataaatttgattatgcgaaaaaatattgcttgctgcatgttgcacgaagttatcaggggaaaatgtttaaggacttctctaagggcacacggttgacagagttaaatgttttgctcagtcaaactgtcatgattaggcgactgaaggagcatttgttgaatgaactgccccccaagcggcgacaaattattaggttgaagctaaaggcaccagatatcagggcagccacatcttcatgcggcaaaagggtgaaccctaacagttgtaatggaactcttacaattgaattgcccagtaaaagcaatgatgatgaaaatacaaaagaggaagaagaagatgattgcaagaaatctccaaggagtctcaccccacaagagattggtatcgcaaagttatctggatttagtgaatggttctcaaatcatttcatcatgaatggatttgatgctaaccataacctggatccccagtctagctgtcagaaaacaataatatttgcacatcacttaaaggttctagatggaatacaggtgtttatctctgagaatgagatcagatttgttcgcattgatggaagcacacttcaaagggaaaggaaagaagctgttgattctttccgtttggatccagaggtgaaggttgcaataattggaattactgctggtggtgttggcttagacttctcatctgctcagaatgttatttttgtggagctcccaaaatcagcttcagaattgcttcaggctgaggatagagctcatagacgtggccaaagaaatgcggtcaacatatatatattctgtggaaagaacacattggatgaatcacactggctccagttaaaccagagtctgttccgtgtctcgtctttgatgaatggaaaaaaggatgctgtaagggagattgaggttgatcaagtgtgccaacttgaagaaatcaaggacaccgaggaaacacaacgcaaactgcatcctttggagaatcataatgcagatttgacccacgtaccaaaaaaacttctggaaagtgatgatttgtccattgatggttttcttggcatcgaagatttggaatttgacttggatttcaccattaggacaattcctcttgaatttgaggatgaaaaccccggcacatccttgaaaaataatccaactccaacagtacttgaagacagatcttgtattgatgtttctctttcaccagctgcagtcttttgctctgtactatctagttgtaaatcaataaagtctcgtaagaggctttctggaaattctgggtccttgagtcaagctgcatctgttccagattttccaattcaagtggagtctctgcgttttgaggttagccggcacacaggacgaatccacttgtacagttgtgttcctggacatgattcaagacccaaaccactttgtgaaaattttctgccagaagaattgaattcacctttatgttctcccagtgatgttaaaacaagaactcttctcttgaaaaagattccttcattttgcaatgtgttcaatgcattcatcaaagagtggttggcactaagaccaattgatcaaaataaattgcttggaaagccattacaacttccgttgaaccttgagttgtgttttctgaaagatagcatcaatcatagcacagaagggatacttaaagggggaagtaagaggcgtgctgcatcattgaatgatgtcagtaatcctttgccagaaaatgctgaatggagacaggtggtgttgcgtaatggcacctgtaaagagagacagtacactcagggctggaccattgatgatgaacctctctgcaaactttgtcaaggactttgcaatggaaggcttgcaaagtcaccagaatattttgaagatctattctgtagtttagcttgtttccaggaatacagattaagaaccagtggcagggccctccggcaggcactgtttcaaatagaacgtggcaagtgctcccaatgcaagctcgattgttgcaagcttgtcaaacacattaaactcttacctttgggaaagcgagaagaatacatcagaaaggttgctccaaacattgcaagtagaaagaaactcctagataaacttgtccgtgaaccaattgatggaaatgcttggcatgcagatcacataatacctgtttataaaggaggaggggaatgtaaactcgagaacatgagaacactgtgtgtggcttgtcattatgaggtcaccagaactcagcacaaggaactaaaagaaataagaaagaaggctaaagagcacttgaaaaacgccttgaataaacaaaaggataaaccaagtgaagcaacagaagaactagatgacgaatcgttgctgatagctgtcccgggtagtgcctactccttaggatttcctggcaacggatctgatgaaaaggctgctgaatagggcatgtttcatttaccttgattattgttcaaaaagggcgctggtattttttagctcgcgtcctttttttgtacatgttaaatgctaccaagcgtttgtaagctgttcggctgctcttataagcagcactgataagcaacactattgcagctgcagagctagaattatctcacatttttgggcttgttcgttttgatgctaaaccatgtggattgagttggattg

SEQ ID NO: 214661 - DNA, 3865 bp, Zea Mays
gctatttgcaattttgccgtgggggtaacccatggagatcacggaggagcagcggcgtcgcgccgaggccaaccgcctcgccgccctcgagaagcgcaagcgctacgcagaggccgcggctgccaccgcctttcccacctccggtgcctccacattccctgcctacgacactgccgccgccgccgagtggaggctcgccaaatgcccaagaatcgccccgcccgcgcgccagttaccgtttgtaccgctgccccctcgtccttccccaccgccgctgccgccgactccgcctcagccgccggtggggttccaggttgtgctggaggtatgcggccccgacgagttctgggtggcggtggtgccggtagaaggcagggcctaccctggggaggccgagtgcctcggcgccgtccaggactgcctcgctgcggcttcggttgtacaatactctgcaacacagtcgctaagtcaaagcacacatcttcgtcctgtatttaagcttgtggactatggtgtggtgttgaaatgccttaagaaattacctggagcttctgtgcaagaaataccttctagcacaaagagaattattcagaatatacctaggtatcacgtccaaaagtgggcttctgatgaagaagtacatgagcttctcaagaaactgccacagcaaataaaagatgcgcttttacccttccaacttgaaggagtgatgtttgggcttcgaaggcgtggacgttgcctaattgcagatgagatggggctcggcaagactctccaggcgattgcaatagcatgctgtttcaaggacgagggctctatattaatagtatgtccagctgtattgcgttattcttgggcagaggaattggaacgctgggatccttcatttatgccaaaagatattcatattgtatttggtcgtcaagacagtcttgaacatctaaatgctactccaagggcagtgattatatcttaccagatgctaagtcgccttagagaaagtatggtgaatagaacatgggcactgatgattgttgatgaatcacataacatacgctgcacgaagaaactagaagaaaaatatgagacaaaagctgtgctacatctagcttcaaaaactgaacgcatcatattgctctcggggacaccctctttctcaagaccttttgatatctaccaccagataaatatgctatggccccacatgcttggtactgataaatttgattatgcgaaaaaatattgcttgctgcatgttgcacgaagttatcaggggaaaatgtttaaggacttctctaagggcacacggttgacagagttaaatgttttgctcagtcaaactgtcatgattaggcgactgaaggagcatttgttgaatgaactgccccccaagcggcgacaaattattaggttgaagctaaaggcaccagatatcagggcagccacatcttcatgcggcaaaagggtgaaccctaacagttgtaatggaactcttacaattgaattgcccagtaaaagcaatgatgatgaaaatacaaaagaggaagaagaagatgattgcaagaaatctccaaggagtctcaccccacaagagattggtatcgcaaagttatctggatttagtgaatggttctcaaatcatttcatcatgaatggatttgatgctaaccataacctggatccccagtctagctgtcagaaaacaataatatttgcacatcacttaaaggttctagatggaatacaggtgtttatctctgagaatgagatcagatttgttcgcattgatggaagcacacttcaaagggaaaggaaagaagctgttgattctttccgtttggatccagaggtgaaggttgcaataattggaattactgctggtggtgttggcttagacttctcatctgctcagaatgttatttttgtggagctcccaaaatcagcttcagaattgcttcaggctgaggatagagctcatagacgtggccaaagaaatgcggtcaacatatatatattctgtggaaagaacacattggatgaatcacactggctccagttaaaccagagtctgttccgtgtctcgtctttgatgaatggaaaaaaggatgctgtaagggagattgaggttgatcaagtgtgccaacttgaagaaatcaaggacaccgaggaaacacaacgcaaactgcatcctttggagaatcataatgcagatttgacccacgtaccaaaaaaacttctggaaagtgatgatttgtccattgatggttttcttggcatcgaagatttggaatttgacttggatttcaccattaggacaattcctcttgaatttgaggatgaaaaccccggcacatccttgaaaaataatccaactccaacagtacttgaagacagatcttgtattgatgtttctctttcaccagctgcagtcttttgctctgtactatctagttgtaaatcaataaagtctcgtaagaggctttctggaaattctgggtccttgagtcaagctgcatctgttccagattttccaattcaagtggagtctctgcgttttgaggttagccggcacacaggacgaatccacttgtacagttgtgttcctggacatgattcaagacccaaaccactttgtgaaaattttctgccagaagaattgaattcacctttatgttctcccagtgatgttaaaacaagaactcttctcttgaaaaagattccttcattttgcaatgtgttcaatgcattcatcaaagagtggttggcactaagaccaattgatcaaaataaattgcttggaaagccattacaacttccgttgaaccttgagttgtgttttctgaaagatagcatcaatcatagcacagaagggatacttaaagggggaagtaagaggcgtgctgcatcattgaatgatgtcagtaatcctttgccagaaaatgctgaatggagacaggtggtgttgcgtaatggcacctgtaaagagagacagtacactcagggctggaccattgatgatgaacctctctgcaaactttgtcaaggactttgcaatggaaggcttgcaaagtcaccagaatattttgaagatctattctgtagtttagcttgtttccaggaatacagattaagaaccagtggcagggccctccggcaggcactgtttcaaatagaacgtggcaagtgctcccaatgcaagctcgattgttgcaagcttgtcaaacacattaaactcttacctttgggaaagcgagaagaatacatcagaaaggttgctccaaacattgcaagtagaaagaaactcctagataaacttgtccgtgaaccaattgatggaaatgcttggcatgcagatcacataatacctgtttataaaggaggaggggaatgtaaactcgagaacatgagaacactgtgtgtggcttgtcattatgaggtcaccagaactcagcacaaggaactaaaagaaataagaaagaaggctaaagagcacttgaaaaacgccttgaataaacaaaaggataaaccaagtgaagcaacagaagaactagatgacgaatcgttgctgatagctgtcccgggtagtgcctactccttaggatttcctggcaacggatctgatgaaaaggctgctgaatagggcatgtttcatttaccttgattattgttcaaaaagggcgctggtattttttagctcgcgtcctttttttgtacatgttaaatgctaccaagcgtttgtaagctgttcggctgctcttataagcagcactgataagcaacactattgcagctgcagagctagaattatctcacatttttgggcttgttcgttttgatgctaaaccatgtggattgagttggattg

SEQ ID NO: 214662 - DNA, 3859 bp, Zea Mays
gctatttgcaattttgccgtgggggtaacccatggagatcacggaggagcagcggcgtcgcgccgaggccaaccgcctcgccgccctcgagaagcgcaagcgctacgcagaggccgcggctgccaccgcctttcccacctccggtgcctccacattccctgcctacgacactgccgccgccgccgagtggaggctcgccaaatgcccaagaatcgccccgcccgcgcgccagttaccgtttgtaccgctgccccctcgtccttccccaccgccgctgccgccgactccgcctcagccgccggtggggttccaggttgtgctggaggtatgcggccccgacgagttctgggtggcggtggtgccggtagaaggcagggcctaccctggggaggccgagtgcctcggcgccgtccaggactgcctcgctgcggcttcggttgtacaatactctgcaacacagtcgctaagtcaaagcacacatcttcgtcctgtatttaagcttgtggactatggtgtggtgttgaaatgccttaagaaattacctggagcttctgtgcaagaaataccttctagcacaaagagaattattcagaatatacctaggtatcacgtccaaaagtgggcttctgatgaagaagtacatgagcttctcaagaaactgccacagcaaataaaagatgcgcttttacccttccaacttgaaggagtgatgtttgggcttcgaaggcgtggacgttgcctaattgcagatgagatggggctcggcaagactctccaggcgattgcaatagcatgctgtttcaaggacgagggctctatattaatagtatgtccagctgtattgcgttattcttgggcagaggaattggaacgctgggatccttcatttatgccaaaagatattcatattgtatttggtcgtcaagacagtcttgaacatctaaatgctactccaagggcagtgattatatcttaccagatgctaagtcgccttagagaaagtatggtgaatagaacatgggcactgatgattgttgatgaatcacataacatacgctgcacgaagaaactagaagaaaaatatgagacaaaagctgtgctacatctagcttcaaaaactgaacgcatcatattgctctcggggacaccctctttctcaagaccttttgatatctaccaccagataaatatgctatggccccacatgcttggtactgataaatttgattatgcgaaaaaatattgcttgctgcatgttgcacgaagttatcaggggaaaatgtttaaggacttctctaagggcacacggttgacagagttaaatgttttgctcagtcaaactgtcatgattaggcgactgaaggagcatttgttgaatgaactgccccccaagcggcgacaaattattaggttgaagctaaaggcaccagatatcagggcagccacatcttcatgcggcaaaagggtgaaccctaacagttgtaatggaactcttacaattgaattgcccagtaaaagcaatgatgatgaaaatacaaaagaggaagaagaagatgattgcaagaaatctccaaggagtctcaccccacaagagattggtatcgcaaagttatctggatttagtgaatggttctcaaatcatttcatcatgaatggatttgatgctaaccataacctggatccccagtctagctgtcagaaaacaataatatttgcacatcacttaaaggttctagatggaatacaggtgtttatctctgagaatgagatcagatttgttcgcattgatggaagcacacttcaaagggaaaggaaagaagctgttgattctttccgtttggatccagaggttgcaataattggaattactgctggtggtgttggcttagacttctcatctgctcagaatgttatttttgtggagctcccaaaatcagcttcagaattgcttcaggctgaggatagagctcatagacgtggccaaagaaatgcggtcaacatatatatattctgtggaaagaacacattggatgaatcacactggctccagttaaaccagagtctgttccgtgtctcgtctttgatgaatggaaaaaaggatgctgtaagggagattgaggttgatcaagtgtgccaacttgaagaaatcaaggacaccgaggaaacacaacgcaaactgcatcctttggagaatcataatgcagatttgacccacgtaccaaaaaaacttctggaaagtgatgatttgtccattgatggttttcttggcatcgaagatttggaatttgacttggatttcaccattaggacaattcctcttgaatttgaggatgaaaaccccggcacatccttgaaaaataatccaactccaacagtacttgaagacagatcttgtattgatgtttctctttcaccagctgcagtcttttgctctgtactatctagttgtaaatcaataaagtctcgtaagaggctttctggaaattctgggtccttgagtcaagctgcatctgttccagattttccaattcaagtggagtctctgcgttttgaggttagccggcacacaggacgaatccacttgtacagttgtgttcctggacatgattcaagacccaaaccactttgtgaaaattttctgccagaagaattgaattcacctttatgttctcccagtgatgttaaaacaagaactcttctcttgaaaaagattccttcattttgcaatgtgttcaatgcattcatcaaagagtggttggcactaagaccaattgatcaaaataaattgcttggaaagccattacaacttccgttgaaccttgagttgtgttttctgaaagatagcatcaatcatagcacagaagggatacttaaagggggaagtaagaggcgtgctgcatcattgaatgatgtcagtaatcctttgccagaaaatgctgaatggagacaggtggtgttgcgtaatggcacctgtaaagagagacagtacactcagggctggaccattgatgatgaacctctctgcaaactttgtcaaggactttgcaatggaaggcttgcaaagtcaccagaatattttgaagatctattctgtagtttagcttgtttccaggaatacagattaagaaccagtggcagggccctccggcaggcactgtttcaaatagaacgtggcaagtgctcccaatgcaagctcgattgttgcaagcttgtcaaacacattaaactcttacctttgggaaagcgagaagaatacatcagaaaggttgctccaaacattgcaagtagaaagaaactcctagataaacttgtccgtgaaccaattgatggaaatgcttggcatgcagatcacataatacctgtttataaaggaggaggggaatgtaaactcgagaacatgagaacactgtgtgtggcttgtcattatgaggtcaccagaactcagcacaaggaactaaaagaaataagaaagaaggctaaagagcacttgaaaaacgccttgaataaacaaaaggataaaccaagtgaagcaacagaagaactagatgacgaatcgttgctgatagctgtcccgggtagtgcctactccttaggatttcctggcaacggatctgatgaaaaggctgctgaatagggcatgtttcatttaccttgattattgttcaaaaagggcgctggtattttttagctcgcgtcctttttttgtacatgttaaatgctaccaagcgtttgtaagctgttcggctgctcttataagcagcactgataagcaacactattgcagctgcagagctagaattatctcacatttttgggcttgttcgttttgatgctaaaccatgtggattgagttggattg

SEQ ID NO: 214663 - DNA, 1284 bp, Zea Mays
ctcaagggcacacttctcttgttgaggttcatcgctcaaccccgtcgcaaccgcaacgtccatctccccgtcctcgctgcccggaggcctggcacacctcccagtagcagcggcctcccgaagcattgtttcaagtggttattaggcttcatggatatgtctcaagagcaagaacaggattttggcgtactgctgaagcaaggtgcagaagggagggtatttgcttcgacatttgtgggacgaaagtgtgtaatcaaagagcgtttttcaaaaaagtaccgacacccattgttggactcgaagttgactctaaagcgcttaaatgctgaagctcggtgcatgacaaaagcaagaaggcttggtgttcctaccccagtactttatgctgtggatccagttctgcatactttgacctttgagcatgtggatggcttgtctgtcaaggatatacttcttaggtttggttcagatggggtcaatgaggaacgcctgaatgatattgccacacaaataggaaatgccattggcaaactacatgatggaggccttgttcatggtgattttgaccacgtcaaacatgataattaagaacagtaacaatcaattggttcttattgattttgggctgagtttcacttcgacaattcccgaggacaaagcggtggacctatatgtgctagagagagctttgatttccatgcattcgtcctgtggggatgtgatggagaaaatcctggctgcgtacagaaaggcttcgaagcaatggtgctccacccagaacaagctggctcaagtgaggcaacggggcaggaagcgcaccatggtcggatgaatggagaagaagaaaaatatgtggcatggaatggatgtatgttattagaaagaccgtcgtctaaaacgagagtgatgtaccaccattgctgtatttttttagcggtgagtggctttggctgctgtaacgtttgtgaaatctggaaatatgttgcctggctgcaccatttggtcagaactcagaagcagagtgtcgtttcatccggaagtgggagaagttttattcgtttctcatgcatgataactggaagacatggttggggtatggcttgcttgtttgtgccctccattgacatgatcatcatggcaaatgtgttgccagtgttgtgggtgagggtggacccctaccgcacggtggagtgggtggagtggcgataggtcaaagaaacgacaggctgcttctgagatgagtatcttgcatccctagggtttattttaagttgtattgcctct

SEQ ID NO: 214664 - DNA, 498 bp, Zea Mays
tgggcgccttcctatgattcttgattttgggatccatgggagcatttgttggggatgggtctcggtgcagtgtttgtgaaccagctggtaaagtttgatgagaagctcaaggaggacctcgacaagatgcttgagcgcgccaggctagccaacgagcagcgctacattgacgatgatgaatagatgcccagatttatttgccagcgacctgtattttttttgcaacatgttgtcagtacacatggccaggactgatgatcccccatcgtcttagttctctcagctttccgcatttcaactgtgatcttgtaataagatgtcggatctcatggattaccaatgtaatacaccaattatgggttcttgatctgatggttggctttctctgataaaattactcaattaaaatgattgtgtttttgcaatgtcaacttttctcgtacactctacctgacatttctttcattgctctttttctcatcggacgtaataattcgc

SEQ ID NO: 214665 - DNA, 525 bp, Zea Mays
gttgtcctggcgcccgattccgtctggtctgcggtacacctgcccccgcggtgtttcgatccatgggagcatttgttggggatgggtctcggtgcagtgtttgtgaaccagctggtaaagtttgatgagaagctcaaggaggacctcgacaagatgcttgagcgcgccaggctagccaacgagcagcgctacattgacgatgatgaatagatgcccagatttatttgccagcgacctgtattttttttgcaacatgttgtcagtacacatggccaggactgatgatcccccatcgtcttagttctctcagctttccgcatttcaactgtgatcttgtaataagatgtcggatctcatggattaccaatgtaatacaccaattatgggttcttgatctgatggttggctttctctgataaaattactcaattaaaatgattgtgtttttgcaatgtcaacttttctcgtacactctacctgacatttctttcattgctctttttctcatcggacgtaataattcgc

SEQ ID NO: 214666 - DNA, 5780 bp, Zea Mays
atggaggacgcggtgtcagggctgcgatcttccaactccgccacctccttcgtcgccgcgccggtgtacgacgacgacgtgttcagctcttcggcgacctcgcagcacaacgccagcatcctaggacggcgccagcatctcagtcgcagcgcgcggctgcagcgccgaccgctacagcacctgaccgtcgaccccgtcagcgccgtccatggcagcgacgactctgagttgtcccacagtgaggtcgacagggtccttgcgaccgtcgtgctctccaacccgcgcgagaaggtccatgacgggctcgtcggcgtgacggagttcgcgcatcgtcctctcgccgtctacgacagctacgtcgagcacgacctctacagcttcatcccgctgctcttctacaccgagcaagccaaagaggagcaggtacccgtcgacacgcccaccaggtgttcgatgagagtcctcaactgcagaacctttcctcgacaagggcttcaaggacatccgtccagcctggtgtgtccactcgtgcgtcgccacgatggcaggttccacctctggttcgaaccctccgtgctggtcgcaccgcacaccaggggccgcgctgagcagatgacgctttcctacgacgctgatgccgaagctgacgactactacaatgcgcccgatgtcgagatcatggtgtccaacttcggctccacctccaccctcagctacctcgagcctgatctcatgctacccacgcggtacaggaacattctagcgggcatgctggagaaggccgtctacgaggaaggccatgacctgttcggtgtgctgtatgaatcccgatcgcttgttggaaccattggtagtatcgacttcagttttgaggagaatgatgaattagttgatcgaaaagaaactgtcgtcacctctcagttgcaggaagagatgggcagcaaggaacataccacgggtcagtttcagacactggacaagcccattgcagataacagcagtgcagcggtcgaattcagcaacaggaattgctgggtctcattgattcaaggttcttcggtgtacacgccatatcctagcaatcgagtggagcagggactggttgcaacactacagtccgatgaagatggatgtgaccaacaaagggatggtgagtccctaccagggagcgacaatttgtttgcaagagctgctatcgtcttttcccactggtggagtagtgcagctgctgatgatttcagaggacaacaactcagccgactggtcaatttggctccacgagtgcagcagtctccaggttgtcttcgttgtctggtcttggggctcatggaagagccgaggaggcctcgattcttcaaggtcctcgttgtcgacttcgcgcgacgaatagagatacctcaaggcttcctctgccattttccagaggggagagacaggaagcccggcaccacagcggtggcgtctgctaaagtcgtcctcaccaatgccgagggtagtagtatctggccggttgcgctagagtcgaccgacggccgcgtgtttctcaccacggggtggccaaagttcgtggaggacaaccgtttggggaagggcgagatccttatcttcaagtaccacgggagaatgcgtttcgtggtctcgatttttggcgtggatgccgtcgagaaggcaggtcgctggtctgcaaggagtggcgcccaggccgcggagaaggtacgcggaaatagttagatcgattcatataaggttctttatttgagtacatgatgcatccttccatctttcagtttctagttcacgttgagtaagcttgttgttagcaattagcatggtcttagataagttagttctgcatgttttgtaagtctaatttaaatttagagtcatatatactccacaaaaggacacaattctcacttttcgtgatttgaactttgaccaaagttatataagaaatcactaacttttataatacaaaataactacgactggatttactatggaatatgtttctgtactaaacatagttacagccgtaaacatcaataccatccactataaacttggtcaaaattactagcacgaattccatagctgcattgttttgtggatggagggagtattacacatgatgatcttcatgaaattgctgttggctagagaagcttattgttccaaagaattatttcacataacttttagactgctaccctagcttcagtttttttttattatcatacctcatgtttgttttcatacagcataatccaaccagtgacaaatatcaagaaagttaacgaggagatgaaagttttgtatttgttctggcataactctgtaggcaatataactgaactagtatggcatgtacctgcatcttttatgattcccatcagatagacaaacatgccttatggaaggaaacgaatggagcacctttttggttcaacagggagcattcatttttaaaatgttgatagtgccttgctctaatcttgtccacttaactgatagttttgtatccaactcctagacaggtaccatgcaacgaaacactaaaggggatgaacacatttcatcccagggcacagctggtttccttgactcacatgaagtagtttgctccaaagattacttggagacgtacttgtcagaggagacaatggaggatgataaggctaaagcagtagcggaagtaatgaagactttgcgtgttgacaaattgacagtagacttattctgtgctatactctgtttgtgtgaatggaaagtcgaggcagctgcagaatattttaatttttgtaggggcaaaccacaaatcccggaaaaatctctgaagcagaaatttgtttttcagtgtaagtttttttattacttcgtggtctttcatttttgcattgtaacacggctatcctgtttgtctccagttgactttgtaaagggacaactacaacgcttcttccctgaagattatgattctgagaaaatcaagaagaacaatattgagtcacctaatttgtctgatcaaccactacaacgtgaccttatagtggcgccggtgaaacgaaggctagttgatgaatttaaatcttgtgacttgtctcaccgacagaagagaaaagttaagttgcagggaaactcactgcaaactcagacaccaagaagatcaccacgattggtaaacgtgaacaatacttgtaataagaacaaaaaagtgtcgaaaggaagagccaaagtgctgaaaacaccaccagatgcaacagatcaggtgaaggatagagcacataaatcatgtttgcttgatgagaaactagataatgccttgaaagctgttcatgaagaagcgacaggttccttatctcaggatctcaggaaactggattccccacggtgtgaggttggcttaagtaaagagcatggacatgatcaaggagatactggaaaaatgttggatgaagtcagtgatgtagaaaacagtaaagaacatgtgggaagcgatgctatggggaattctgaatcatatatgagtacatactgtgtagagccattgccaaccaactctaggttgacagcatattcaagaataaatgagctatcatttacatggaagcactcacaacatgccagttcccttgagaaagttttacttgacattcaaagagataacttcgtgaacaccattgcacgcatccagaaaatcgtccgggatgatccttcagatgtgcttagtgcagatgtaattgaagccactgtacagatagaaattcttaaatggggtttatgccttcaggacaagtgcgcccacaagatagtaaatacaatgttggattatgctaaaaaggtcaaggggagacacaatttcaatactgagatgaggaaggaagagttctctgcaaagctgcaggatctcctgaagtggcagcttaaagaactagaatttaaatacacttccttggaatcagattacaagaaagcaatggctgatgctagcaattttttctcgacatttgaagagcacaggaaaaagttgcatgccattaaggacggtatcaaggacctgcagcaggcctgtatgactaaggacgatgaaatgcaaaaattggcacttcaagtcgctgagcatgcgaccgcatatcagaagtctataatggaaaaggttagggtcaagatggctctgaagagccatgagcagactcttggttacataaaagagcagctagcctctgcggaatctggatcaattgatgtaggggcattggttaagatagagatggataatatgagtagggagattgaactctccaagcaaaatcttctaaatatcaacttcaagaaagagtaaagaaggtgtaagtgtttgcttgaaaaccagattaggaatgctgcttatgtgctataataacctagctatcatatcaattactgcgggagtttgattagatatagggggtgtttgaatgcactagaattaatagttagccgctaaaattagttgagacatccaaacaccctagctaatagttcaactattagctatttttagtaaattagttaatagttacataattatttgttagctagctaatcccactaataatttttagccagctaactattagttttagtggattcaaacaccccataatagtttacatgacatacaaaggttatagaatgccccttgttgttcatgagctgcgggtaagagccacggcccatgggtaaaagccactcccaggaacgcaattgactctacattcttgattgtgtttagtcgatgtgccaccacaattgtggtcctccctgacattattcgatcaagagcctagcaattgctctgactgtgcatcaagcacacttgttgcttcatcaagtagtagtattgagggattccggattattgcccttgcaattgcgattctttgcttctgccccctgagagctgtataccgtgctctccacaatcagtattttttatggagtcattactgtaggtgaactatgtacatgttacatgtacatacggtatatgtttacagttgttgcagccagttctgcacctgttcagctagcaatggcttcaatctatggcagattagtatcatttctctcctaaacatgtctttgcacgcggctattgttggcgggatattttcaaatatctagctgttccggtattttcatatgcaccaagtcatggttatgatgacctctattttccaaggatttgccaattgaagcctcattcatcgcatcgcaaggagtcgatcagaggtgcggggtggcgtgactccaattatctgccaacatcttcgtacgaagctgcaccgcaagaacaagtggacagttttctcctccctttgtcggatgcaattttcacatgtgaacaattcaagatccatgttctttctccttagcagtgacctagtattcagtccagcttccaatagaagccagaagaacactttttgttttggttgacatttcgatgcccacaaccacatgtatgcggggtgtgctagctcttctgcaatcatgtgtttatatgtttttgtgacgaaaatttcagatttccctagatatatgaccatgtgttagtttgaccaatggttggttgtccttgcaaatgggtaatgaggagttggtattgtgggaaagctgtcacggacatgggtgtgtagaacatttgttgagggtgttcaatagcctttgcttgtaatattgttatttccttatgaatggcatacgacaacagttctgaatacatttctgcatgcatt

SEQ ID NO: 214667 - DNA, 1447 bp, Zea Mays
gggatttctacatgtgctctctatcttctagataagagatggttcgtttcggcgtccatgcagggtgtggaatggatccagtttgtcccagttcggaaatcggaatggtgaacacatatgagatgagcttcccggatatgtatgtaatctgagcgtttccttcctgtaatcctgtgtagcgtaggaggcttacctgctctataagcttcattgtattgttctacaaaggctttaatacaatcagggcgacagtgggcatgctgctcgggcgtcgaggacatgcacaggttcccggtgcgctccccgtggatggaccgcggcgacctcatccgcagtcccgccgcgcgacagatcgtgtccaactacttcaggacgtgcgcatcccgtatcagcagaagcgcatgttcggcttcgtcaccttcgtgtacgctgagacggtgaaggtcatcctgagcaagggcaacccgcactttgtgtgcgacgctcgcgtgctcgtcaagccctacaaggagaagggcaaggtccccggtaggtttaggaagctgcagcacacgcaccatggcggagccgagttcgtcggttgcgcgtcgcccactggattgctggattccagggacccctacgccctcctgcttctttcaggtgcccagaacctcttcacggctgggacggacacgacatccagcacggtggagtgggcgctggccgagctgatccggcatccggacgtgctcaggaaggcgcagcaggagctcgacgccgtcgtcggccgcgaccgcctggtgtccgagtcggacctcccgcgcctcacgtacctcacggcggtgatcaaggagacgttccggctgcacccgtccacgccgctgtcgctgccccgcgtcgccgccgaggagtgcgaggtggacgggttccgcatccccgccggcaccacgctgctggtgaacgtgtgggcgatcgcccgcgacccggaggcgtggcccgagccgctccagttccggcccgcgcgcttcctcccgggcggctcgcacgcgggcgtcgacgtcaaaggcagcgacttcgagctcatcccgttcggcgccggccggaggatctgcgcgggcctcagctggggcctgcgcatggtcacgctcatgacggccacgctggtgcacgcgctcgaatgggatctcgccgatggcgtcaccgccgaaaagctggacatggaggaggcctacgggctcaccctgcagcgcgccgtgccgttgatggtccggcccgcgcccagactgctgccgtctgcctacgcagcgcagtagaaaaaggattctcttctcgatggctatccccgtccttctcgcatgcacgcatgggtcgtggaattgtcaactcggcactcttgttgatgtgtgtaaactctaatctctgctattaagggtccaatatggacatccgcaccgtgggccatgcc

SEQ ID NO: 214668 - DNA, 1668 bp, Zea Mays
aggattccatgttcctgagggaaagtattatcttgtcgatggaggatatgctaacacaccatcattcattgcaccgtaccgtggtgttcgataccatttgaaagaatttggccatggtcaccaacgaccaagaaactataaggaattatttaatcaccgacatgctttattgcggaaccacatagagagagcaataggagttttgaagaagcgtttccccattctaaaagttggaacacaccacccaattaggaaccaagtgaaaataccagctgcggcagtgttgttccataatattatacggatgcataatggggatgaagattggttgaatagccaaacaagtaacatatcgccagaaacttttgttgatcttcctggaggagacaattactataacagtgatgtcgtgtcgcttaatagccaagtggataatgggaactctgttagagatatgattgcattgaatatgtggaatgattatagtcaacatcgttcatgatatatcaagaatgtttggaagaggatctcctaggatgaacctgatccaagctgcagctatgcaaagagtatcccctagatctactactaacaagcgcaagaagagaacatcaccaaaagttggtcgtcttagagcaaactggaatagtggactagaaaagggtttaattgaaattcttcaagaccacaacaatgactattataagggccaaaatgggtggtcatcggaagcatggaatagaattgtcaagttattccatgagaaattcccttatgtcacatttacaaaatgtcaaatccaagataaagagaaagagttaaagagagactacaaggctcttaaagaggcaagacaacaaagtggggtatcatgggatgagcggttgtgtagaatagaggcagaagaacccatttggaataacctcaccacttaacgagagacttaagaagtttcggactaaatctttcccactatttgaggctttaggagagctacatgatgagatgaaagaaaaacaagatgaggtggagaaaagggcgacaactaatgcaaatgaggatgatttccctattacaacatgcattgctattgttgatggaatggaagagctttctgatgatgagaaggttgatgcttatgatgtgtttaaggacgcccaaaatagggccattttcatgactgccaaagatgctacacgcataaaatggttgaggaagaagattgctagaacatgatatgtgttgtttgaaacttgagggctcaaagaaaatgcaatgaagaatttggaagaccttgaaattattactagcaattgtttaaaagcaatctagtaggcgaactttccgttggaacctgtcatatcacttgtgaaatcttcattttttaaaagcacctctgaatgtgatccttcgtgtcattaaatcaagactacaaagatggatgtttatttaatttaccataagcacctctgaatgtaatacttcttgttattaaatcaggactagaacgatgaatgttttttctaagcacttttaaatgctatgttaatttgcacattcgatgtgccatggtctttagtatttgtgctatttttcagagttattttaaatttcaatataaatattagtattttttgttttattttaaatttcaaatttgaatattac

SEQ ID NO: 214669 - DNA, 1688 bp, Zea Mays
cttcccccacacctacggccagccgctggtacactttctcacgaagacggccaacgtgcatgacgctaccatcgtaacagagcaccctgttgtcaggattggcgttgtcttcagtgggaggcaatcccccggagggcacaatgttatatggggcctctatgatgttgtaaaggctcacaactccaacagcaaaattattggttttcttggaggaaccgatggattatttgcacagaaaactattgaaatcactgatgaagctcttccatcctataaaaatcaaggtggttatgacatgcttggtcgtacaagggatcagatcagaacaactgagcaggtaaaggcaacaataggtacatgtcaagcattgaagttggacgctcttgttataattggaggtgtcacatccaacacggatgctgctcagcttgctgagacatttgctcagttgaaatgtccaacaaaggtagttggtgttcctgtaactctaaatggagatctcaagaaccaatttgttgaaacaacagttggttttgataccatatgcaaggtgaactcgcagttaataagcaatgcatgcatagatgccctttctgctgaaaagtattactactttattcggatgatgggacggaaagcatctcatgtagcattggaatgtgctcttcagtcacatccaaatatggttatcctaggcgaggaggtttctgtgtcaaaacttacaatatttgatattacaaagcagatatgtgatgctgtgcaggcaagagctgaaaaagacaaatatcatggagttgtacttattcctgagggccttgttgagagtattcctgaactgtatgctttgctccaggaaattcatggactgcataataaaggtgtttctgttgagaacatctcttctcatctttcaccttgggcatctgcactatttgaatttttgcctccatttattagaaagcagctgcttctccatcctggatctgacgattcagctcaactgtcccagattgaaattgagaagcttctagcacaattggttgagaccgaaatggacaaacgcctaaaggaaggcacttataatggaaagaagttcaatgctatctgccacttttttggataccaggccaggggtgccctgccttctaaatttgattgcgattatggctacgttcttggacatgtatgttatcacatcgtagcggctggtttgaacggctacatggccactgtgaccaaccttaagagtccagtaaacaaatggaaatgtggtgctgctcccattacatctatgatgactgtgaagagatggtcacgtggtgctgccaccagtcaaatcggtaagcctgctgtccacatggcgagtgttgacttaaaaggaaaagcatatgagttgttgagacaaaattcttctagcttcatgatggaagacatctaccgaaaccctgggccacttcagttcgaagggtcaggtgctgatacaaagcctatttcattgtgcgttgaagatcaggattacatgggaagaatcaagaagttgcaggagtatttggagaaggtgaaaagcattgtgaagcccgggtgctcgcaggatgtccttaaagcagcggttttttcagaaaagatttgctgagaatctggatctccgtggataatctaactgtcataagaatctaaatattgtgcgg

SEQ ID NO: 214670 - DNA, 1878 bp, Zea Mays
ccaacgtgcatgacgctaccatcgtaacagagcaccctgttgtcaggattggcgttgtcttcagtgggaggcaatcccccggagggcacaatgttatatggggcctctatgatgttgtaaaggctcacaactccaacagcaaaattattggttttcttggaggaaccgatggattatttgcacagaaaactattgaaatcactgatgaagctcttccatcctataaaaatcaaggtggttatgacatgcttggtcgtacaagggatcagatcagaacaactgagcaggtaaaggcaacaataggtacatgtcaagcattgaagttggacgctcttgttataattggaggtgtcacatccaacacggatgctgctcagcttgctgagacatttgctcagttgaaatgtccaacaaaggtagttggtgttcctgtaactctaaatggagatctcaagaaccaatttgttgaaacaacagttggttttgataccatatgcaagttaataagcaatgcatgcatagatgccctttctgctgaaaagtattactactttattcggatgatgggacggaaagcatctcatgtagcattggaatgtgctcttcagtcacatccaaatatggttatcctaggcgaggaggtttctgtgtcaaaacttacaatatttgatattacaaagcagatatgtgatgctgtgcaggcaagagctgaaaaagacaaatatcatggagttgtacttattcctgagggccttgttgagagtattcctgaactgtatgctttgctccaggaaattcatggactgcataataaaggtgtttctgttgagaacatctcttctcatctttcaccttgggcatctgcactatttgaatttttgcctccatttattagaaagcagctgcttctccatcctggatctgacgattcagctcaactgtcccagattgaaattgagaagcttctagcacaattggttgagaccgaaatggacaaacgcctaaaggaaggcacttataatggaaagaagttcaatgctatctgccacttttttggataccaggccaggggtgccctgccttctaaatttgattgcgattatggctacgttcttggacatgtatgttatcacatcgtagcggctggtttgaacggctacatggccactgtgaccaaccttaagagtccagtaaacaaatggaaatgtggtgctgctcccattacatctatgatgactgtgaagagatggtcacgtggtgctgccaccagtcaaatcggtaagcctgctgtccacatggcgagtgttgacttaaaaggaaaagcatatgagttgttgagacaaaattcttctagcttcatgatggaagacatctaccgaaaccctgggccacttcagttcgaagggtcaggtgctgatacaaagcctatttcattgtgcgttgaagatcaggattacatgggaagaatcaagaagttgcaggagtatttggagaaggtgaaaagcattgtgaagcccgggtgctcgcaggatgtccttaaagcagcggtaagcgccatggcttctgtgacggagatgttgaccatcatgtcttccctttcatttagtggacaggcgaccatctgaaggccaagctgaagatgtcatatgctgttgcgctctcatgtcccgaacatatttgtgtttttttgggaaagaaacatacaatttttgttctcattctagtatcgtctacctatgtcaaactacaatatgataggacccttgctaaataattgtttcgtttgctggtatttctcatctttgatgctaggcatgttgaaaagttgattgagatgagttaaaataagagcataatttgaactggttacaattacaa

SEQ ID NO: 214671 - DNA, 1120 bp, Zea Mays
caagtctccatccattgctgatggttgtggaatacttggatccaagggagagcttatggtcaaagacggtgaaggagaaccaatattattcatctctaaaaagggaggaattgtccaggcgctaagcacaaggaacaaatggaatggatactccatggattaccaagggaaaaacaagttggtttttagcctaactgatccgaaattatgcacagcacaaggtgctccaattagaattcatattgaacctaagaggcactgcaaaaattgggatttcgaaattggtggatcttttgcagatagagactgtacaatagttgattgcaccagaaaaatagtagcccagatgggcacgaaagagccaataggaggcaaggacttctaccatgtggaagtgcagtcaggatatgaccaagctttcatcattggggtgatggcaattcttgacaacatacatggagaatccactagatgctgataacatgaattagagaatttgctcttgtttataagagtagactaatgttcaatagcacttatcttgcaacatactttcatcttcaagtaagaaacagacacatgctggcaccatcataatgattgtatgactatgacccgcattgaataatatccacaggccagctgataatatgagcctaactttcactgccacttaactatatctctttaataaacatagagatgtgactaattgactaaatgtacagcagcatagagcatccctattccaatgttacaaacctggtgcttcatataattctatacacaagaattgtgattttcatgaattgtgaacaaagtaactaaatgtgtacattgtaccacagccatcagaaatctggaacgatttggccatggatcgtgggtgtctaaaaagtccaacgaagtgatatctcttaagcagagaaaacaaagaaaggatgggaaatgtcttgacttagtaattgaaattatgaagaatgctactgccttaaattggacttcactcgaacaacttaaaattaattttaattctgaggccaacttaaaacctcccaaaaagacaaaaagtgtgatattggaggtccagtagacaaacaaatgtgcaactttcatgaag

SEQ ID NO: 214672 - DNA, 5134 bp, Zea Mays
ctcattcccatgggccggaagaagcgaacctccgcaccaaaccctactccgccaccgctggacgcctcccgccggtcgccggcggcggcggagaagccagccggcatcggcagggaagatgccgccgtgcgcgccgaggtcgacaaagcgcttgcgtgcctgcagcggggcagccacgcgcgtgcgcagcgcctcacgagggacgccatcgcccgccacggggaggcctcaccgctgctcctgcgggcgcacggcaccgtccacgctcgcgccgcctccgtcctcgacgaccacgccagccgcgcgcgccaccagcgtacagcgctccaggcggcccagcgcgccgtccagctcgcgccggactccatcgagctggcccacttccacgccatgctgctcttcgacgctgccaccgactcccgcgcctacgatgaggtcgtcgctgagtgcgagcgcggcctcagcatcgaggccccctccgaccccgcgccccactccctcaggttgcccggccccgacgtcgaccaggtccagtccgagctccgcaacttgatccagaaggccaacctcgcctccatctcctcttgggtcaaaaacatgggcggcgcgggggacgacaagcttcgcctcatccctgtgcgccgtctagcggacgagccaatggaggcccggcttgtccccacggcgccctccccgcgccgcccaaacgagatcaagaaggcgaccaagaccaccgaggagcgccgccaggagatcgaggtacgcctggctgccatgaggctgctgcagcagcagaaggagcagagcaatgatgttgtgtctgctacccctgcctcttcccggtcacatggagatgatgccccctcatcgtctgagtcatcggtgggcggacatcgagctgaccggagaaaaggtgggtctaggaaagcaacaggctcatccgcgtctgagcgcactgaccaggtgcgtgcctactggggctcgataccagtggagcaaaggcttgcattcttaaacactagcatttctgagctcaagtcacactatgcttctgcaatgcacaaggagaaagatgctgccagtgcagcatctgatgtgctcaatgaggtgatacaatttgccaacaagcatgacaagtgggagttcatggtatgtggtaggtgtcgggagcagtttacacatgtggaggcacaccggtggcatgtcatggttgagcatgttgggctactctcatccgagctgcaggaaatggttccgcaggagattgatgctgactgggcagaaatgctcagtggttgcaactggaggccattggatgctactgccgcactgaaactttttgaggaagatcaacacaacaaccttggaccagatagggaggatgaatcgaattcgttagatagttggagtaacaaagccatggacatgtcagaatcctcagcctggtcacacaacgaggagtctagcggttttggagtggtggtgagggaaggtgacaccaagtggccattctcagatgatgacgaaagggccaagattttagaaagaatccattcatcgttcaaaatccttgtgaagaaccataatctttcagtgcacaatctaaacagggtgattcgatttgctgtagaggaactcagggggttgccatctgggtcactactgcttaatcactctttggacgagtcgccactttgcattcgcttcttggaggcatcatcactgcagaaagtagataatttcttgcaggacttaatgcaggcttctggacttaataggaacttacagaaggctgaaggattaggtgacggggatagtttcatccaaaaccacgatgtactagagaaggttacccttaattctgattcatcagaactgatcattgatgggcacaccttcggcggaaagtttgattccgagagtgttgatactgatgcattgctttcatggctgtacgccggatcttcaattggtgagcagctattggcctggaatcgtatgatcgacgaaaggtcaaatcagtgcgtcgaccttattcgagcacttgggagggagttcaacaacctgcaaaactcatgtgaacggaaacttgaacagctgagaaatgaggatgcctttacttctgtggagggcctcttttgtgaagagcaaacacgaagggagcaggtgggacggtatggattccaaactttcgaggagctcctcaggaagcggcaggagtttttggaacacaacactgaggagcagtccgacagtaacagatctgagatagatgcaatctcagctattttgaaggaacttcacacatcacactttggttatgatgaggcccttactggcatggccccacgcttttctgacttcgatgggggcgaagaagatgaatggaggctgcatgattttatacatccaaatgattcaatggtacacatggttgtatcaaagatgaaggaacatgttactatggagattagcaagatagatgctaagattatgcgaactttatctgtgatgcggcaactagagcacaagcttggacctgtttctgctcttgattatcgaatgattcttttaccccttatgaggtcgttcttgcagagccatttggaagagctggtggataaggatgcgagagagagatctgatgctgcaagggaagccttcttggctgaacttgctttggatgctaagaagaatgcaagcaaagggggtgatatgaaacaatcccatgaaaaatcaaaggataagaagaagtttaaggattctcgtagggcaaaggagttcaaggattcaagctggagcgaccagtctctcattcaccaagacagtgctgacgaggaaacaacagagacatttcaaattcttgctgattgtgatgatctggattgcaaattctccacaagtgatgattacttcaatgaacaagaggaagaacttaggcataaggtacaacttgaagcagaggaacgaaagctggaagagactctggaatatcaacggcggatagaggaggaagcaaagcagaaacatcttgcagaacaatgtagaagtacttatgcatcttctgtaattggtacagctcgtctttcaagcactgggaatcaggataaccatgaaagtgcaatcaatcactcttcccgtacttatctcgaaggcataaagtttggtgattttcgctacaccgagaacaatttcagccagaaacttaatggattggattcatctgatgcacatgcattaaccagcagtgatatgaatgctcctagatggaccagcacttgtaaaatcgctccctacgcaaaccacagctatcaaactggaaaacaaaatcggctacatgtgttgccttcagatgatctgcaatttgctcatagagatcacgctgcaggaacagagaagccaaattttgagaaagttggcagtggtgcaataccatcagcggatttgtgcatcaaggatgattttgataaaaggtttcaagaagatcttgatgaagcagtgcgccaaagccttggatacgatgcttatcctgctggtacaataagcacttcaaatgaaacagaagtgtatggcactggccttaaaaatgccgctggtgaatacaattgtttcttgaatgtgattattcagtcattatggcatataaggcggtttcgggacgagttccttaaaacatcatcactgcacaagcatgttgaagatccttgtgctgtctgcgctttatatggtatcttcattgacctgagcaaagcagccaagggacacggagaagctgttgcgcctacttcattgaggatcgctttgagcaaatcctacccgaacagcaaattctttcaggagatgaatgatgcatctgaggtactgggtgtaatctttgagtgtttgcataagtcatacacttcgcgtactgtctgccatggtaaacctcatgagaagaattctattggatcatgggattgtgcaaatatttcttgcatagcacatagtctttttgggatggacgtatatgaacggatgaactgtcacaattgcaagatggagtctcggcggctcaaatatacttcatttttccacaatattaatgctagttcactccgaaccgcgaagatgatgtgtccagattcttcatttgatgaacttttgaaggttgtcataatgaatgatcaactagcttgtgatcaagacgttggcggctgtggaaaaccgaatcacatacaccacatcctttctactcccccacatgtctttacagttggtttgttactatggccagcattatcattgttttgccttcaaggatggacgatgggtcatgtatgatgaccagacagtcaaggttgtaggtagttggggtgatgtgctcgtgatgtgtgaaaagggtcacttgcaaccccaagtgcttttctttgagtctgcaaattaatcattcttcagagtcgtaaagtgttgtgcagtggttaacatgccctcaaatatagggtttttacctgtggccgtgaagattagaaatagagtagcaaattcgttttgagcgggggtatagagtagcaaattcaacagctgcgttggtctctgagctttggtcgagcccctcgtaataagtagtcacctgaggattaaaggagagctgtttacccctctgtttttttaacctttggtatacttgctgaacttcggatccttcatctgccaatgagatttcactgccgatcaagttggtggggacgcattcgacatgaactgccatccaacaattctagccggatctgcctaaagctcttcattatgcaccagttatgtatagaattttgtgcttacaatgaggtgacaggtataggagtgtgactgttttgaggccagaaggtttagagaatggaaggaaatggaattgttggtgcggtgtgtatctgtggagtactgtttgaaaagaggaacgatatctggaatacggtagactttgagaaatctgtagtacacgagtctatgtaaacagggactcgatgagattatgtgagatgagtatagcgatgaataccagactccttatcactactgtttttatagttaaattcttattttttttatttagctaaagattgcgcgcctaagatataaaagaaaccgttgaagtgac

SEQ ID NO: 214673 - DNA, 2095 bp, Zea Mays
cgctcccccagcaacgccggcttccatccacccccgcgcaccgctccccctttccccctttccttgcgcgatgcgagcccacaaatcacgccaatccatggcagcccgcgtgccccgctcccccgcagcgcctggctcccctttccttgcgcgacgcgagatcggcgagattgccctcaacgcgctcgcgtcgcgccgcggatcccccaccctcctcccctctgcacgccgccatcaactcgcaccggccctcgcccgtgatccatcctctcccccgcggcaatgatatggcgtcccccctcaaccgaccattcccgcagcggatccgcaccaacccgttcgcgccggcctctggaagaagaatccaccgaaggcgaaaacgacgacggaggtccggctgactcgtctgggtctttgcaatagcggcaagcgggttggagctccgcttcgggcaggggagaaccacgtggagacctggagtcacgctgcctagactcgccgctgggtggattcgtcgcgatggaggtcggattgtgaacacgccgtccagttaggacgctgtcgtcttcagatccaggggatggggttgctcggcatggcggccaagggcccctcgcccacgcgtcgcctaatgccacagccgcacttggccgtctcctcgctggcggcctccgtggctctgatccactgcttcctcaacacccggagatggttgacgtcgccttcgtcgtctcctcgccagtggcctccaccagccccgcagtccaagacaaagccacgacatgagtcaacccaagtccggtcgcacctacaccgatggccgtacccaacaagttgagctttaagaggaacgtggtgtcattgtcatctgagctcaagggtgtgaggagcaagcttgcttcctaggagcagctgtttgtaagggaatctcaaactagaaagcttgcggagacaaaaacaaggagcatggaagaggaagtaatcaagctgcagaaatgcttacaggacaaggatgggcaactgtgttcatccacaagtagcacggaacagtaccatcatgagttggatgatcttagaacacatctgtcatttactcaagctacaggagaagcaggtgttgcatcagctaagttagctcggatgtagtgcatgtcattgctgaaagagctgaatgagaaggacaactcactcaaagaccatagacttcgagtgaacaatctaggtgagcagcttgatcttctccagaaggatgtacaagcaagggaggtcacacaaatgcaacttaaagatatagttataaggatcgagaccaacatcatggatgaagttgccaaagcttttgaaattgcgatgttgagaggggaaatcagaatattgtctactcactggacgaacaaaaccaagaaccttgaatcacagttaaaaaagcaccagagaactgatcaggagctgaagaagagggttctgaagcttgaattttgtctctggtcctgtcatccactggtgcgttcgccaccgcacctaccgctgttactagctcccttgctcttctcttgctgcgactgggatatagcatcgtggatcttgaacctaggccagaatttaggcaggtctagaaccaccatgatgcctggaacatactcctattttatccatgtatgagccttatgggaactctgcaattactatggatcctcttatacattatgttcgacatggagacaaggtatggtgcataaaaaagtaggaaccacaatgagattgtaatgctgcacatggcacatcaaggtgcgcaagatatgtaccgtagaaattatcgtaaagtgcacacagctgtatgtatagatgtttagaagtggtcgaagttaggcttgctcaaccggggcaatgatttacttagcctgctgaaatgtactataggtagcattcaagtttgtgaccatcatgcaagtacatgtgggtttgttgaaattgagtggtcatcggagaagtagcaaaatgttccctatcgagagctcgtgtactatatttgttttatgaacttaatttttattacaacataacatgtggtcatacatatgttattgctacaata

SEQ ID NO: 214674 - DNA, 1732 bp, Zea Mays
cgctcccccagcaacgccggcttccatccacccccgcgcaccgctccccctttccccctttccttgcgcgatgcgagcccacaaatcacgccaatccatggcagcccgcgtgccccgctcccccgcagcgcctggctcccctttccttgcgcgacgcgagatcggcgagattgccctcaacgcgctcgcgtcgcgccgcggatcccccaccctcctcccctctgcacgccgccatcaactcgcaccggccctcgcccgtgatccatcctctcccccgcggcaatgatatggcgtcccccctcaaccgaccattcccgcagcggatccgcaccaacccgttcgcgccggcctctggaagaagaatccaccgaaggcgaaaacgacgacggaggtccggctgactcgtctgggtctttgcaatagcggcaagcgggttggagctccgcttcgggcaggggagaaccacgtggagacctggagtcacgctgcctagactcgccgctgggtggattcgtcgcgatggaggtcggattgtgaacacgccgtccagttaggacgctgtcgtcttcagatccaggggatggggttgctcggcatggcggccaagggcccctcgcccacgcgtcgcctaatgccacagccgcacttggccgtctcctcgctggcggcctccgtggctctgatccactgcttcctcaacacccggagatggttgacgtcgccttcgtcgtctcctcgccagtggcctccaccagccccgcagtccaagacaaagccacgacatgagtcaacccaagtccggtcgcacctacaccgatggccgtacccaacaagttgagctttaagaggaacgtggtgtcattgtcatctgagctcaagggtgtgaggagcaagcttgcttcctaggagcagctgtttgtaagggaatctcaaactagaaaggttagtatgtaactggtaccttcgaggttgttggtggggtttgtgccgacaaggaaaaaaatttagcagcttgcggagacaaaaacaaggagcatggaagaggaagtaatcaagctgcagaaatgcttacaggacaaggatgggcaactgtgttcatccacaagtagcacggaacagtaccatcatgagttggatgatcttagaacacatctgtcatttactcaagctacaggagaagcaggtgttgcatcagctaagttagctcggatgtagtgcatgtcattgctgaaagagctgaatgagaaggacaactcactcaaagaccatagacttcgagtgaacaatctaggtgagcagcttgatcttctccagaaggatgtacaagcaagggaggtcacacaaatgcaacttaaagatatagttataaggatcgagaccaacatcatggatgaagttgccaaagcttttgaaattgcgatgttgagaggggaaatcagaatattgtctactcactggacgaacaaaaccaagaaccttgaatcacagttaaaaaagcaccagagaactgatcaggagctgaagaagagggttctgaagcttgaattttgtctctggtcctgtcatccactggtatggtgcataaaaaagtaggaaccacaatgagattgtaatgctgcacatggcacatcaagacgagcaagctgctgtggatcctgaggtttagcaggtagaagttgctaagcaggagctcattgaaggcaagttgtgcccttgatcacttactttttcc

SEQ ID NO: 214675 - DNA, 2312 bp, Zea Mays
cccccagcaacgccggcttccatccacccccgcgcaccgctccccctttccccctttccttgcgcgatgcgagcccacaaatcacgccaatccatggcagcccgcgtgccccgctcccccgcagcgcctggctcccctttccttgcgcgacgcgagatcggcgagattgccctcaacgcgctcgcgtcgcgccgcggatcccccaccctcctcccctctgcacgccgccatcaactcgcaccggccctcgcccgtgatccatcctctcccccgcggcaatgatatggcgtcccccctcaaccgaccattcccgcagcggatccgcaccaacccgttcgcgccggcctctggaagaagaatccaccgaaggcgaaaacgacgacggaggtccggctgactcgtctgggtctttgcaatagcggcaagcgggttggagctccgcttcgggcaggggagaaccacgtggagacctggagtcacgctgcctagactcgccgctgggtggattcgtcgcgatggaggtcggattgtgaacacgccgtccagttaggacgctgtcgtcttcagatccaggggatggggttgctcggcatggcggccaagggcccctcgcccacgcgtcgcctaatgccacagccgcacttggccgtctcctcgctggcggcctccgtggctctgatccactgcttcctcaacacccggagatggttgacgtcgccttcgtcgtctcctcgccagtggcctccaccagccccgcagtccaagacaaagccacgacatgagtcaacccaagtccggtcgcacctacaccgatggccgtacccaacaagttgagctttaagaggaacgtggtgtcattgtcatctgagctcaagggtgtgaggagcaagcttgcttcctaggagcagctgtttgtaagggaatctcaaactagaaagcttgcggagacaaaaacaaggagcatggaagaggaagtaatcaagctgcagaaatgcttacaggacaaggatgggcaactgtgttcatccacaagtagcacggaacaggagaagcaggtgttgcatcagctaagttagctcggatgtagtgcatgtcattgctgaaagagctgaatgagaaggacaactcactcaaagaccatagacttcgagtgaacaatctaggtgagcagcttgatcttctccagaaggatgtacaagcaagggaggtcacacaaatgcaacttaaagatatagttataaggatcgagaccaacatcatggatgaagttgccaaagcttttgaaattgcgatgttgagaggggaaatcagaatattgtctactcactggacgaacaaaaccaagaaccttgaatcacagttaaaaaagcaccagagaactgatcaggagctgaagaagagggttctgaagcttgaattttgtctctggtcctgtcatccactggtgcgttcgccaccgcacctaccgctgttactagctcccttgctcttctcttgctgcgactgggatatagcatcgtggatcttgaacctaggccagaatttaggcaggtctagaaccaccatgatgcctggaacatactcctattttatccatgtatgagccttatgggaactctgcaattactatggatcctcttatacattatgttcgacatggagacaaggtagtatattgagttggaccaataatccttcatatttatttatgtgaattatgttgtactggtgtcctgtccttttgtttgtgctttataatttgtaattcttagctattgatatggtatgatggatgggaggtggctgaaatcgttcagataagtgccaatttgttgttttcttttttaatgaatggttttctatttcagctgatgaaccttttatagttcttttattatatgctgccactgattgctaatagggtgcatgtcttctatttctaggtatggtgcataaaaaagtaggaaccacaatgagattgtaatgctgcacatggcacatcaaggtgcgcaagatatgtaccgtagaaattatcgtaaagtgcacacagctgtatgtatagatgtttagaagtggtcgaagttaggcttgctcaaccggggcaatgatttacttagcctgctgaaatgtactataggtagcattcaagtttgtgaccatcatgcaagtacatgtgggtttgttgaaattgagtggtcatcggagaagtagcaaaatgttccctatcgagagctcgtgtactatatttgttttatgaacttaatttttattacaacataacatgtggtcatacatatgttattgctacaata

SEQ ID NO: 214676 - DNA, 2489 bp, Zea Mays
agcaacgccggcttccatccacccccgcgcaccgctccccctttccccctttccttgcgcgatgcgagcccacaaatcacgccaatccatggcagcccgcgtgccccgctcccccgcagcgcctggctcccctttccttgcgcgacgcgagatcggcgagattgccctcaacgcgctcgcgtcgcgccgcggatcccccaccctcctcccctctgcacgccgccatcaactcgcaccggccctcgcccgtgatccatcctctcccccgcggcaatgatatggcgtcccccctcaaccgaccattcccgcagcggatccgcaccaacccgttcgcgccggcctctggaagaagaatccaccgaaggcgaaaacgacgacggaggtccggctgactcgtctgggtctttgcaatagcggcaagcgggttggagctccgcttcgggcaggggagaaccacgtggagacctggagtcacgctgcctagactcgccgctgggtggattcgtcgcgatggaggtcggattgtgaacacgccgtccagttaggacgctgtcgtcttcagatccaggggatggggttgctcggcatggcggccaagggcccctcgcccacgcgtcgcctaatgccacagccgcacttggccgtctcctcgctggcggcctccgtggctctgatccactgcttcctcaacacccggagatggttgacgtcgccttcgtcgtctcctcgccagtggcctccaccagccccgcagtccaagacaaagccacgacatgagtcaacccaagtccggtcgcacctacaccgatggccgtacccaacgtgagtcaagccaagtccattcccctcccttgcttcctcaacttgttgtcttgtggtctgctatttgtctcagagaaggtggtgccatcatcatcagttgtgattatgaattatattctaccgatagaagttgagctttaagaggaacgtggtgtcattgtcatctgagctcaagggtgtgaggagcaagcttgcttcctaggagcagctgtttgtaagggaatctcaaactagaaagcttgcggagacaaaaacaaggagcatggaagaggaagtaatcaagctgcagaaatgcttacaggacaaggatgggcaactgtgttcatccacaagtagcacggaacagtaccatcatgagttggatgatcttagaacacatctgtcatttactcaagctacaggagaagcaggtgttgcatcagctaagttagctcggatgtagtgcatgtcattgctgaaagagctgaatgagaaggacaactcactcaaagaccatagacttcgagtgaacaatctaggtgagcagcttgatcttctccagaaggatgtacaagcaagggaggtcacacaaatgcaacttaaagatatagttataaggatcgagaccaacatcatggatgaagttgccaaagcttttgaaattgcgatgttgagaggggaaatcagaatattgtctactcactggacgaacaaaaccaagaaccttgaatcacagttaaaaaagcaccagagaactgatcaggagctgaagaagagggttctgaagcttgaattttgtctctggtcctgtcatccactggtgcgttcgccaccgcacctaccgctgttactagctcccttgctcttctcttgctgcgactgggatatagcatcgtggatcttgaacctaggccagaatttaggcaggtctagaaccaccatgatgcctggaacatactcctattttatccatgtatgagccttatgggaactctgcaattactatggatcctcttatacattatgttcgacatggagacaaggtagtatattgagttggaccaataatccttcatatttatttatgtgaattatgttgtactggtgtcctgtccttttgtttgtgctttataatttgtaattcttagctattgatatggtatgatggatgggaggtggctgaaatcgttcagataagtgccaatttgttgttttcttttttaatgaatggttttctatttcagctgatgaaccttttatagttcttttattatatgctgccactgattgctaatagggtgcatgtcttctatttctaggtatggtgcataaaaaagtaggaaccacaatgagattgtaatgctgcacatggcacatcaaggtgcgcaagatatgtaccgtagaaattatcgtaaagtgcacacagctgtatgtatagatgtttagaagtggtcgaagttaggcttgctcaaccggggcaatgatttacttagcctgctgaaatgtactataggtagcattcaagtttgtgaccatcatgcaagtacatgtgggtttgttgaaattgagtggtcatcggagaagtagcaaaatgttccctatcgagagctcgtgtactatatttgttttatgaacttaatttttattacaacataacatgtggtcatacatatgttattgctacaata

SEQ ID NO: 214677 - DNA, 1945 bp, Zea Mays
gcaacgccggcttccatccacccccgcgcaccgctccccctttccccctttccttgcgcgatgcgagcccacaaatcacgccaatccatggcagcccgcgtgccccgctcccccgcagcgcctggctcccctttccttgcgcgacgcgagatcggcgagattgccctcaacgcgctcgcgtcgcgccgcggatcccccaccctcctcccctctgcacgccgccatcaactcgcaccggccctcgcccgtgatccatcctctcccccgcggcaatgatatggcgtcccccctcaaccgaccattcccgcagcggatccgcaccaacccgttcgcgccggcctctggaagaagaatccaccgaaggcgaaaacgacgacggaggtccggctgactcgtctgggtctttgcaatagcggcaagcgggttggagctccgcttcgggcaggggagaaccacgtggagacctggagtcacgctgcctagactcgccgctgggtggattcgtcgcgatggaggtcggattgtgaacacgccgtccagttaggacgctgtcgtcttcagatccaggggatggggttgctcggcatggcggccaagggcccctcgcccacgcgtcgcctaatgccacagccgcacttggccgtctcctcgctggcggcctccgtggctctgatccactgcttcctcaacacccggagatggttgacgtcgccttcgtcgtctcctcgccagtggcctccaccagccccgcagtccaagacaaagccacgacatgagtcaacccaagtccggtcgcacctacaccgatggccgtacccaacaagttgagctttaagaggaacgtggtgtcattgtcatctgagctcaagggtgtgaggagcaagcttgcttcctaggagcagctgtttgtaagggaatctcaaactagaaaggttagtatgtaactggtaccttcgaggttgttggtggggtttgtgccgacaaggaaaaaaatttagcagcttgcggagacaaaaacaaggagcatggaagaggaagtaatcaagctgcagaaatgcttacaggacaaggatgggcaactgtgttcatccacaagtagcacggaacagtaccatcatgagttggatgatcttagaacacatctgtcatttactcaagctacaggagaagcaggtgttgcatcagctaagttagctcggatgtagtgcatgtcattgctgaaagagctgaatgagaaggacaactcactcaaagaccatagacttcgagtgaacaatctaggtgagcagcttgatcttctccagaaggatgtacaagcaagggaggtcacacaaatgcaacttaaagatatagttataaggatcgagaccaacatcatggatgaagttgccaaagcttttgaaattgcgatgttgagaggggaaatcagaatattgtctactcactggacgaacaaaaccaagaaccttgaatcacagttaaaaaagcaccagagaactgatcaggagctgaagaagagggttctgaagcttgaattttgtctctggtcctgtcatccactggtgcgttcgccaccgcacctaccgctgttactagctcccttgctcttctcttgctgcgactgggatatagcatcgtggatcttgaacctaggccagaatttaggcaggtctagaaccaccatgatgcctggaacatactcctattttatccatgtatgagccttatgggaactctgcaattactatggatcctcttatacattatgttcgacatggagacaaggtatggtgcataaaaaagtaggaaccacaatgagattgtaatgctgcacatggcacatcaagacgagcaagctgctgtggatcctgaggtttagcaggtagaagttgctaagcaggagctcattgaaggcaagttgtgcccttgatcacttactttttcc

SEQ ID NO: 214678 - DNA, 1786 bp, Zea Mays
ccggcttccatccacccccgcgcaccgctccccctttccccctttccttgcgcgatgcgagcccacaaatcacgccaatccatggcagcccgcgtgccccgctcccccgcagcgcctggctcccctttccttgcgcgacgcgagatcggcgagattgccctcaacgcgctcgcgtcgcgccgcggatcccccaccctcctcccctctgcacgccgccatcaactcgcaccggccctcgcccgtgatccatcctctcccccgcggcaatgatatggcgtcccccctcaaccgaccattcccgcagcggatccgcaccaacccgttcgcgccggcctctggaagaagaatccaccgaaggcgaaaacgacgacggaggtccggctgactcgtctgggtctttgcaatagcggcaagcgggttggagctccgcttcgggcaggggagaaccacgtggagacctggagtcacgctgcctagactcgccgctgggtggattcgtcgcgatggaggtcggattgtgaacacgccgtccagttaggacgctgtcgtcttcagatccaggggatggggttgctcggcatggcggccaagggcccctcgcccacgcgtcgcctaatgccacagccgcacttggccgtctcctcgctggcggcctccgtggctctgatccactgcttcctcaacacccggagatggttgacgtcgccttcgtcgtctcctcgccagtggcctccaccagccccgcagtccaagacaaagccacgacatgagtcaacccaagtccggtcgcacctacaccgatggccgtacccaacaagttgagctttaagaggaacgtggtgtcattgtcatctgagctcaagggtgtgaggagcaagcttgcttcctaggagcagctgtttgtaagggaatctcaaactagaaaggttagtatgtaactggtaccttcgaggttgttggtggggtttgtgccgacaaggaaaaaaatttagcagcttgcggagacaaaaacaaggagcatggaagaggaagtaatcaagctgcagaaatgcttacaggacaaggatgggcaactgtgttcatccacaagtagcacggaacaggagaagcaggtgttgcatcagctaagttagctcggatgtagtgcatgtcattgctgaaagagctgaatgagaaggacaactcactcaaagaccatagacttcgagtgaacaatctaggtgagcagcttgatcttctccagaaggatgtacaagcaagggaggtcacacaaatgcaacttaaagatatagttataaggatcgagaccaacatcatggatgaagttgccaaagcttttgaaattgcgatgttgagaggggaaatcagaatattgtctactcactggacgaacaaaaccaagaaccttgaatcacaggtatggtgcataaaaaagtaggaaccacaatgagattgtaatgctgcacatggcacatcaaggtgcgcaagatatgtaccgtagaaattatcgtaaagtgcacacagctgtatgtatagatgtttagaagtggtcgaagttaggcttgctcaaccggggcaatgatttacttagcctgctgaaatgtactataggtagcattcaagtttgtgaccatcatgcaagtacatgtgggtttgttgaaattgagtggtcatcggagaagtagcaaaatgttccctatcgagagctcgtgtactatatttgttttatgaacttaatttttattacaacataacatgtggtcatacatatgttattgctacaata

SEQ ID NO: 214679 - DNA, 2348 bp, Zea Mays
cttccatccacccccgcgcaccgctccccctttccccctttccttgcgcgatgcgagcccacaaatcacgccaatccatggcagcccgcgtgccccgctcccccgcagcgcctggctcccctttccttgcgcgacgcgagatcggcgagattgccctcaacgcgctcgcgtcgcgccgcggatcccccaccctcctcccctctgcacgccgccatcaactcgcaccggccctcgcccgtgatccatcctctcccccgcggcaatgatatggcgtcccccctcaaccgaccattcccgcagcggatccgcaccaacccgttcgcgccggcctctggaagaagaatccaccgaaggcgaaaacgacgacggaggtccggctgactcgtctgggtctttgcaatagcggcaagcgggttggagctccgcttcgggcaggggagaaccacgtggagacctggagtcacgctgcctagactcgccgctgggtggattcgtcgcgatggaggtcggattgtgaacacgccgtccagttaggacgctgtcgtcttcagatccaggggatggggttgctcggcatggcggccaagggcccctcgcccacgcgtcgcctaatgccacagccgcacttggccgtctcctcgctggcggcctccgtggctctgatccactgcttcctcaacacccggagatggttgacgtcgccttcgtcgtctcctcgccagtggcctccaccagccccgcagtccaagacaaagccacgacatgagtcaacccaagtccggtcgcacctacaccgatggccgtacccaacttgagctttaagaggaacgtggtgtcattgtcatctgagctcaagggtgtgaggagcaagcttgcttcctaggagcagctgtttgtaagggaatctcaaactagaaagcttgcggagacaaaaacaaggagcatggaagaggaagtaatcaagctgcagaaatgcttacaggacaaggatgggcaactgtgttcatccacaagtagcacggaacagtaccatcatgagttggatgatcttagaacacatctgtcatttactcaagctacaggagaagcaggtgttgcatcagctaagttagctcggatgtagtgcatgtcattgctgaaagagctgaatgagaaggacaactcactcaaagaccatagacttcgagtgaacaatctaggtgagcagcttgatcttctccagaaggatgtacaagcaagggaggtcacacaaatgcaacttaaagatatagttataaggatcgagaccaacatcatggatgaagttgccaaagcttttgaaattgcgatgttgagaggggaaatcagaatattgtctactcactggacgaacaaaaccaagaaccttgaatcacagttaaaaaagcaccagagaactgatcaggagctgaagaagagggttctgaagcttgaattttgtctctggtcctgtcatccactggtgcgttcgccaccgcacctaccgctgttactagctcccttgctcttctcttgctgcgactgggatatagcatcgtggatcttgaacctaggccagaatttaggcaggtctagaaccaccatgatgcctggaacatactcctattttatccatgtatgagccttatgggaactctgcaattactatggatcctcttatacattatgttcgacatggagacaaggtagtatattgagttggaccaataatccttcatatttatttatgtgaattatgttgtactggtgtcctgtccttttgtttgtgctttataatttgtaattcttagctattgatatggtatgatggatgggaggtggctgaaatcgttcagataagtgccaatttgttgttttcttttttaatgaatggttttctatttcagctgatgaaccttttatagttcttttattatatgctgccactgattgctaatagggtgcatgtcttctatttctaggtatggtgcataaaaaagtaggaaccacaatgagattgtaatgctgcacatggcacatcaaggtgcgcaagatatgtaccgtagaaattatcgtaaagtgcacacagctgtatgtatagatgtttagaagtggtcgaagttaggcttgctcaaccggggcaatgatttacttagcctgctgaaatgtactataggtagcattcaagtttgtgaccatcatgcaagtacatgtgggtttgttgaaattgagtggtcatcggagaagtagcaaaatgttccctatcgagagctcgtgtactatatttgttttatgaacttaatttttattacaacataacatgtggtcatacatatgttattgctacaata

SEQ ID NO: 214680 - DNA, 1918 bp, Zea Mays
cttccatccacccccgcgcaccgctccccctttccccctttccttgcgcgatgcgagcccacaaatcacgccaatccatggcagcccgcgtgccccgctcccccgcagcgcctggctcccctttccttgcgcgacgcgagatcggcgagattgccctcaacgcgctcgcgtcgcgccgcggatcccccaccctcctcccctctgcacgccgccatcaactcgcaccggccctcgcccgtgatccatcctctcccccgcggcaatgatatggcgtcccccctcaaccgaccattcccgcagcggatccgcaccaacccgttcgcgccggcctctggaagaagaatccaccgaaggcgaaaacgacgacggaggtccggctgactcgtctgggtctttgcaatagcggcaagcgggttggagctccgcttcgggcaggggagaaccacgtggagacctggagtcacgctgcctagactcgccgctgggtggattcgtcgcgatggaggtcggattgtgaacacgccgtccagttaggacgctgtcgtcttcagatccaggggatggggttgctcggcatggcggccaagggcccctcgcccacgcgtcgcctaatgccacagccgcacttggccgtctcctcgctggcggcctccgtggctctgatccactgcttcctcaacacccggagatggttgacgtcgccttcgtcgtctcctcgccagtggcctccaccagccccgcagtccaagacaaagccacgacatgagtcaacccaagtccggtcgcacctacaccgatggccgtacccaacttgagctttaagaggaacgtggtgtcattgtcatctgagctcaagggtgtgaggagcaagcttgcttcctaggagcagctgtttgtaagggaatctcaaactagaaaggttagtatgtaactggtaccttcgaggttgttggtggggtttgtgccgacaaggaaaaaaatttagcagcttgcggagacaaaaacaaggagcatggaagaggaagtaatcaagctgcagaaatgcttacaggacaaggatgggcaactgtgttcatccacaagtagcacggaacagtaccatcatgagttggatgatcttagaacacatctgtcatttactcaagctacaggagaagcaggtgttgcatcagctaagttagctcggatgtagtgcatgtcattgctgaaagagctgaatgagaaggacaactcactcaaagaccatagacttcgagtgaacaatctaggtgagcagcttgatcttctccagaaggatgtacaagcaagggaggtcacacaaatgcaacttaaagatatagttataaggatcgagaccaacatcatggatgaagttgccaaagcttttgaaattgcgatgttgagaggggaaatcagaatattgtctactcactggacgaacaaaaccaagaaccttgaatcacagttaaaaaagcaccagagaactgatcaggagctgaagaagagggttctgaagcttgaattttgtctctggtcctgtcatccactggtatggtgcataaaaaagtaggaaccacaatgagattgtaatgctgcacatggcacatcaaggtgcgcaagatatgtaccgtagaaattatcgtaaagtgcacacagctgtatgtatagatgtttagaagtggtcgaagttaggcttgctcaaccggggcaatgatttacttagcctgctgaaatgtactataggtagcattcaagtttgtgaccatcatgcaagtacatgtgggtttgttgaaattgagtggtcatcggagaagtagcaaaatgttccctatcgagagctcgtgtactatatttgttttatgaacttaatttttattacaacataacatgtggtcatacatatgttattgctacaata

SEQ ID NO: 214681 - DNA, 2408 bp, Zea Mays
gcgcaccgctccccctttccccctttccttgcgcgatgcgagcccacaaatcacgccaatccatggcagcccgcgtgccccgctcccccgcagcgcctggctcccctttccttgcgcgacgcgagatcggcgagattgccctcaacgcgctcgcgtcgcgccgcggatcccccaccctcctcccctctgcacgccgccatcaactcgcaccggccctcgcccgtgatccatcctctcccccgcggcaatgatatggcgtcccccctcaaccgaccattcccgcagcggatccgcaccaacccgttcgcgccggcctctggaagaagaatccaccgaaggcgaaaacgacgacggaggtccggctgactcgtctgggtctttgcaatagcggcaagcgggttggagctccgcttcgggcaggggagaaccacgtggagacctggagtcacgctgcctagactcgccgctgggtggattcgtcgcgatggaggtcggattgtgaacacgccgtccagttaggacgctgtcgtcttcagatccaggggatggggttgctcggcatggcggccaagggcccctcgcccacgcgtcgcctaatgccacagccgcacttggccgtctcctcgctggcggcctccgtggctctgatccactgcttcctcaacacccggagatggttgacgtcgccttcgtcgtctcctcgccagtggcctccaccagccccgcagtccaagacaaagccacgacatgagtcaacccaagtccggtcgcacctacaccgatggccgtacccaacgtgagtcaagccaagtccattcccctcccttgcttcctcaacttgttgtcttgtggtctgctatttgtctcagagaaggtggtgccatcatcatcagttgtgattatgaattatattctaccgatagaagttgagctttaagaggaacgtggtgtcattgtcatctgagctcaagggtgtgaggagcaagcttgcttcctaggagcagctgtttgtaagggaatctcaaactagaaagcttgcggagacaaaaacaaggagcatggaagaggaagtaatcaagctgcagaaatgcttacaggacaaggatgggcaactgtgttcatccacaagtagcacggaacaggagaagcaggtgttgcatcagctaagttagctcggatgtagtgcatgtcattgctgaaagagctgaatgagaaggacaactcactcaaagaccatagacttcgagtgaacaatctaggtgagcagcttgatcttctccagaaggatgtacaagcaagggaggtcacacaaatgcaacttaaagatatagttataaggatcgagaccaacatcatggatgaagttgccaaagcttttgaaattgcgatgttgagaggggaaatcagaatattgtctactcactggacgaacaaaaccaagaaccttgaatcacagttaaaaaagcaccagagaactgatcaggagctgaagaagagggttctgaagcttgaattttgtctctggtcctgtcatccactggtgcgttcgccaccgcacctaccgctgttactagctcccttgctcttctcttgctgcgactgggatatagcatcgtggatcttgaacctaggccagaatttaggcaggtctagaaccaccatgatgcctggaacatactcctattttatccatgtatgagccttatgggaactctgcaattactatggatcctcttatacattatgttcgacatggagacaaggtagtatattgagttggaccaataatccttcatatttatttatgtgaattatgttgtactggtgtcctgtccttttgtttgtgctttataatttgtaattcttagctattgatatggtatgatggatgggaggtggctgaaatcgttcagataagtgccaatttgttgttttcttttttaatgaatggttttctatttcagctgatgaaccttttatagttcttttattatatgctgccactgattgctaatagggtgcatgtcttctatttctaggtatggtgcataaaaaagtaggaaccacaatgagattgtaatgctgcacatggcacatcaaggtgcgcaagatatgtaccgtagaaattatcgtaaagtgcacacagctgtatgtatagatgtttagaagtggtcgaagttaggcttgctcaaccggggcaatgatttacttagcctgctgaaatgtactataggtagcattcaagtttgtgaccatcatgcaagtacatgtgggtttgttgaaattgagtggtcatcggagaagtagcaaaatgttccctatcgagagctcgtgtactatatttgttttatgaacttaatttttattacaacataacatgtggtcatacatatgttattgctacaata

SEQ ID NO: 214682 - DNA, 1962 bp, Zea Mays
ccacaaatcacgccaatccatggcagcccgcgtgccccgctcccccgcagcgcctggctcccctttccttgcgcgacgcgagatcggcgagattgccctcaacgcgctcgcgtcgcgccgcggatcccccaccctcctcccctctgcacgccgccatcaactcgcaccggccctcgcccgtgatccatcctctcccccgcggcaatgatatggcgtcccccctcaaccgaccattcccgcagcggatccgcaccaacccgttcgcgccggcctctggaagaagaatccaccgaaggcgaaaacgacgacggaggtccggctgactcgtctgggtctttgcaatagcggcaagcgggttggagctccgcttcgggcaggggagaaccacgtggagacctggagtcacgctgcctagactcgccgctgggtggattcgtcgcgatggaggtcggattgtgaacacgccgtccagttaggacgctgtcgtcttcagatccaggggatggggttgctcggcatggcggccaagggcccctcgcccacgcgtcgcctaatgccacagccgcacttggccgtctcctcgctggcggcctccgtggctctgatccactgcttcctcaacacccggagatggttgacgtcgccttcgtcgtctcctcgccagtggcctccaccagccccgcagtccaagacaaagccacgacatgagtcaacccaagtccggtcgcacctacaccgatggccgtacccaacaagttgagctttaagaggaacgtggtgtcattgtcatctgagctcaagggtgtgaggagcaagcttgcttcctaggagcagctgtttgtaagggaatctcaaactagaaagcttgcggagacaaaaacaaggagcatggaagaggaagtaatcaagctgcagaaatgcttacaggacaaggatgggcaactgtgttcatccacaagtagcacggaacaggagaagcaggtgttgcatcagctaagttagctcggatgtagtgcatgtcattgctgaaagagctgaatgagaaggacaactcactcaaagaccatagacttcgagtgaacaatctaggtgagcagcttgatcttctccagaaggatgtacaagcaagggaggtcacacaaatgcaacttaaagatatagttataaggatcgagaccaacatcatggatgaagttgccaaagcttttgaaattgcgatgttgagaggggaaatcagaatattgtctactcactggacgaacaaaaccaagaaccttgaatcacagttaaaaaagcaccagagaactgatcaggagctgaagaagagggttctgaagcttgaattttgtctctggtcctgtcatccactggtgcgttcgccaccgcacctaccgctgttactagctcccttgctcttctcttgctgcgactgggatatagcatcgtggatcttgaacctaggccagaatttaggcaggtctagaaccaccatgatgcctggaacatactcctattttatccatgtatgagccttatgggaactctgcaattactatggatcctcttatacattatgttcgacatggagacaaggtatggtgcataaaaaagtaggaaccacaatgagattgtaatgctgcacatggcacatcaaggtgcgcaagatatgtaccgtagaaattatcgtaaagtgcacacagctgtatgtatagatgtttagaagtggtcgaagttaggcttgctcaaccggggcaatgatttacttagcctgctgaaatgtactataggtagcattcaagtttgtgaccatcatgcaagtacatgtgggtttgttgaaattgagtggtcatcggagaagtagcaaaatgttccctatcgagagctcgtgtactatatttgttttatgaacttaatttttattacaacataacatgtggtcatacatatgttattgctacaata

SEQ ID NO: 214683 - DNA, 3395 bp, Zea Mays
gtcacgtataccatgcaaataaccgagaattctgctctgccaccgcaaggcgtagcagagccaacttctcgtcgaatcggtcacgtcacccgccgcgtccacgccaatggcgccgccgccgccgtccttactccgagagctcctcacagctgacggcttcaagaaccgtcgcaagccgctcgacagctccgccccgccgacctccagagccgcgagcatgccactacagcaccggcgcccgggcaagccgccctcgcggtcacagtcggacgtgctcacccgcagccgcctgaggcaggcgaacgccgacgcggacgatggcagcagggacgccgccggtgccgagcggcggcgggccgcgaccgcgacgcgagggttgtcggcgtcgctaacgagcgtgaggaaggtccacagcaacaagggagaaggcgacagcggctcgggcgccggtgccaggaggggtgcctcggcgtctgacccttccgcggtgccggcgctcgatgagtcggcgctcaccgcgctcatctccctcgccgcggggcctctgaagcggttcgccttggacgaggcgttccgcgcctcgctgcgcgccggctgcgcgtcttgcctcggcgactccagccaccgcgccgtgctggacctccgcgtgcaatcgcaaaccgtcgagcgggccgcgagagagggcctggacccgcgcgaactgaagcgcgcgtccctcaggctccacgaggtggcgtctctccaaggcaaggacgcggacgcggtgaccgcggcgggcgttccccacacgcgcctcgccgcgtgcgcgcacctatacatgtccgccgtctccaagctgcagaagcgggaccactccgccgcggtgcacgcgctggaggccttctgcctggcgccgcgcgaggcgcggacggtcctgctgcccgcgctctgggacaggctcttccgaccgggcctctcgcacctcaggacgtggcgcgaccgcgagtcggcgtcggcgagcgcggacgaaagggtggaggaggtggagaaggtgttcctgggcgtactggacgacgggacgcgcgcgctcgcgtgctactacagggactggctgctggggcggacagatgccatggctctcccggacgttcccgctcctccgagcacggtccatcccagcacgccgaggtgctcggcgtcgacgtcgtatgacatcagctcggaagtcatgttcggctccgggagttcgagtctggcgaagttcgcgtacgacgacataatgcgggcatccgaggaaatcgaggaggaggaagaagcggtgtaccccgaggccgccgcagaagcggtgaccgtgctccaccaggaccaggagcgcgatggagctggaggtgaggaaaggagctacactcccactccgttggcagaagaaaacgagcccgtgcctaacaatgtagacagagagacgttcgatccacacgtcgagcaagaaccgaacaagcaatcagatgcgcgagcaagtcacccgccgatctctgacaactctgctattgaccttcttacactcgagttctgtgaagcgccactccagagtgacacaaatggcaacgagctctccattttctccacggttcccagcgacttcctgtgtccactgacgcgccagatattcagcaatcccgtgacgatcgagacaggccagacgttcgagcggcacgccatagttcagtggctagacagaggcttcaggacgtgcccggtcacaggccaagatctctcgagctcgacggtgccggacacgaaccgtgtgctcaaacgcttggtcgatagctggaggtctgaacacttcaagcatctgacatccggaggcgctgggctcgatgtgaagctaaccgtatcagcaatagacaaggctcttggttcagctcgggacgtgtctgaaaaatttgacagggcaagacacctgatggcgatcggggggatagacttccttctgtgcaagtttcaggagggagggggagacgagcagccgcgggtggctgagcacttgctgtcttgcatcagggctgaaggcagctgcagggattacgtggctataaagatggatggctcgagtattctgcggctccttcagagtaaagtgctttcgacaaggagaactgcagtggatttgctcatggaactggtctgcttaagaaggagagaaatggttgaattgctcctccatggatcgagagcagagtcgatcgtggaggcaatggatgtgctgctggagtacctccggagcttgcccgcagaagaacaagccccgatcgctgctctactgatgcgtttggatgcattggtggagccgaacagaaacaacacgtacagagaagaggcgatcaaggccatcacacgttctctgagatgctgcctgtcagaggacactgtcgtgcccagcactcggagagctctgctgctgctgggagggcagttcaccttctcaggcgaccttcacgcagaggactggatgctggaacatgctggcttcgtcgacccctcacgggccaccactgccacttctgatgctgttgtacacgacaagaaagcggccgaaaacgatgcgtggctgagacacgtagcagcggcgctcctcggcagccgcagcgggatcaggagaccgttcctggaggcgctgtccaggtgcctgggctcccccaacgccggcctggtgggtgcgtgcctgacgacggcagcgtggctgagccgctcgctggcgtcgctggacgaggacggcgccacggacacgtccctcgccgcgttctcggcgctcgtcccgcggctgaagcagtgcctggcacccggcaggccggtccggcacagggttcttgcggccgtgtcgctgcacaactttagcagaatcccagactgcagggagctgctgatgctgctggctgacggcatgcgcgaccacctcgcggagctagcgcagctgacctggacggccggtcagctatccgccgaactccatagcaacgactgatatttggcttccgcgcgctcgccgggtgccgtcggtcgtcggatgacggatggctgccggcgacggggcctctcgtcatcgcggcgggagattcagcggaagcgtgtgaagagtacccgctgccttttcttgacccgttcgtcagaactaagaagccttcccaacagtttcgccgagagagacaaaggttgtacagtctatctactatacactaaactttatatctttcttttcctttttttctcaaaaagctttgtgatcgctgatcgatgaggctccggctgtgaataccacatgatggttttcagttttgacagagttttttttttcgtgcttgtgagttgtgaccatgaatattcagcgttggaatgatcttatctgcttgggagtttgg

SEQ ID NO: 214684 - DNA, 385 bp, Zea Mays
atggagatgggagggatgagcgatgcggagcggctgttcttcttcgagatggcctgcaagaactccgaggtcgcgtacgagcagaaccccaacgacgccgacaacctgacgcggtggggcggcgcgctgctggagctgtcgcaggtgcgaaccggccccgacagcctcaagcttcttgaaggaacatccatgcaaggcatcggtgcttttgttatgaaggccaaagcaccgggagaacaagccttaataagttaatgagaaccccattagaaccaattgaactcacccaagaggaggggagtccaaatagggtttagggttagactgcacatgcagatacaacatgtgcagatggtacatggaaaccactccaatgacacttcac

SEQ ID NO: 214685 - DNA, 6920 bp, Zea Mays
aaattaataaaaaaaagttagaagcgagaagacgatggaagaatccatttctcaaacaaaaatgctattaatgatcgcactcgacttgacactggagtcaatcttggttcatcaaagtaaaaaaggcagaaaacagacacgatgacatctgtttttgacgccttgattaaacacgtggccagcggcctgctacagcctactgcctacagatgcaaatcagtaccaggcgtgctctccgtgagctctacgcctctacctgtgtcttggcgacgactgggcgaccgacgacgcagccgtaggacaggcgaccgacgacgcagccgtaggataggcgaccaggtcttcctgttggctcttgcccttcgccggcgacgagcacccgccaggccacaacgacattgggaacaagtgtatgacatacaaacagtaaaatgggaaggaaagggtcagaagtatcaccaagcaaaagcggatgacctcggcttgccttcggaggactcaggggatggtgacttcgatccagcaggatgaagtctcggcatctccattatcaaatgtgataaaccgtactgatagaatgaaactcagggcctacagtagacgctctaatgaagaaaaccacaatcatgcatttatggacatggagctagagcaagacatagtgctaccagttccaagcaggcggcaggttgaacggttggattacaaaaaactatacgatgaggcatatgaggaagaatcatctaattcaagtgatgaagaagagtggtctggaaaagaactcttagaaggcagtggaacagattcacttgatgagcgacttcgtcctgtaaaacggtgctctagaagagcaccagcagggcagcagaataatgaacttacaccacagagccggcctcatggttctaacagtgagcagaaaactgaagttcttcgctccaatggcagtagtagcacaggacggaagtatgatcctgaagttacccagaaattgaaggtgcattttgagaaagatccatatcctagccgtgaaacaaaagaaaatctatcagaagaactaggcttgacatttaatcaggtctccaaatggttctctagtactcgtcactattcaagggttgcttctgccaaaaaagaaatgcatcctgacagccatacttgtgagaataatgatgagacaactgtagacagcatgcaagcaaaacaacccaatgctggggtgatggaaaagttgacgggggatagaaatggcattgttcctgagaaaccgatggtgcaggacaatcttaaccaaggagcgatggaaaagttaactagggataaaaatgacattgttcctgagaaaccggtgatgcagagcagtcttaaccaatgtaataatgaagatataccgctttctggaacagaaattgagatggagtcttacgaacaagaatcatctgactcaagtgatgaagagtggtccatacttagcacaccacgaaaaacaagattacaagaccatggaaaatcatcagttactgaatcacttcgttctgcaaaacggtgttccagaagagcaccagctagggagcagaataatgaacgtattcagagtgagcagcttcatggttctgcaagtgagcagcaaactgaatttcttcgctccaatgtcagcagtggcaaggtctcaaaatatcattttggccctatagttagtcagaagcttaaggaacattttgaaaaagatccatatccttgccgtgcaacaaaagagagtctggcacaagagctaggactgacatttaatcagatcagtaagtggttctctggcactcgtcattattcaagagatgctgttgccaagaatcagaaacgcccgggagaaaatactactgtgaataataatagcacaacctttgatgacatacaagtaatagaacccaatgttgggttgatagataaaccagctgcagatgtaaatgacatgatttctgaaaagttgatggtccaaataaatcttaacgaaggcattgaagaagatatcccaccgagccaatatgccaggtgtgaagagaaaataactatgactccagctgccatctcaagggaagctggtcttccaggatatggtcctggtcctggagaaaactttcttcaggtcagttcaaggaatactagctgtgagcagagtgtgatactggctcctaccgctatcgcaagagaagttggtccaccaggatatgcgactggagaaaaccagggcaatggggctccatggaatacaagttatgagcgaagactatttatgaatcctgtgaccagctcaagagcagtcagtcctccaggatatgggcctgaagaaagccgaggcagtggcatttcctggaatacaagcagtgaacaaatattgtttatgagtcctacaaccatctcaagagaacttggtccaccaggatatgggcctagagaagaccagtgcagtggcacttcatggaatgcaagctgcgagttgggagtatttatgagtcctgtgaccacctcaagagaagacagtccgccaggatatgggcctcgagaaaaccaggagaatgacaatatgagatgcgagttgagaatgtttacaagtcctacaaccatctccagagaagttggcccaccaggatatgagcttactggaaaaaacaagggcaacggcgcttcatgtactacgaattaccagcagggagcgtttacgagtcctgaagccttcccaagagaagcctgtcctccaggatttgtgtctggagagaaccagggtaacgacactccatggtatatgagcagcaaacagatggcgtttacgagtcctacgaccaaccctagagtaggtccgccagggtatggacaggaaaaccagggcagtcgtgtttcttggaatacgagttatgagcagggagtgtttatgagttctacaaacatctcaagagaagccggtccgccaggttatgggcctggggaaagtcagggcaatatcacttcatggatttcgacaggcgggcagagaatgtttacaggtccttcaactatcccgaacgaagtcgggcagcaaggatatggcccttcaggaatcccgggaacggatggctcaaggagtatggacttgaaagcctttccaccaggatatggacctgctggagaaaaccagggcggtggtgcttcagggagcgtcataagcccccaagctcggtctgcagagaacgtagagttttcagacgacgctagaaaaaaggctatacagcgggagctgagacggcggcagaagttcaggtgatggccgtgatgcgaatttctgatcttgctcatcgaattttgactacggattactactttttaagactacatatccagtcttgatggctgaatgagtgacgaccctagttgtcgagacgcaaaaccttttgttgtatgtgttccttttacagacttccttggcttgtcatgaatttctaatgtgaacttgtgctgtgaacttgttgcaaaacctcttgaacctgaagcattcaacatgatgtgagcttgtgcagttactcttcttctgcatgagttcatgttatctgggttgcacggcatgcaatttcacattgctagaagggtcagataacactgactcgggaactgctctatttaaggtgcctggatttttttatagaaaatttgaggcgacagtcttacacaagcagcaaatacaacaaccttgagctcttagatcgattttcaagtatatctcagcaaatacaacaaccttgagctcttagatcgatttttcaagtataggagatatgaaacagatttcatgatatagctctgaacctctagattataaatatagttaataaataatatatacaaagagtagagcggtgtagagacagattttttttttcaattaagacatgcctaaaagaacagctcacaagatatagaaaaactgttgtcagttctatccagccgttctgaacttctgaagccgcattattaccaatgggggctagttgggctgtacaactccgtgccagcccagcccatctgatccattaatataacggccatcccgaacccgaacggctcccatcccatctgatccctcgccgcatttcaaattcaaatcccctcttcacccaagtgctgccttcgcatcgcatggcggccagttccctctcgtccccggcggccagccggacgccgaacctgaaatcggccgtggctccgtcaccttctccatccactcgccgggcgccagcagatgcggcgtcggcgtcgatcacggcggagtcgaaggcacggttcgaggcttacaaccggctgcaggcagcggccgtggcgttcggcgagaagcttcccatcccggagatagtagtgattggaggccagtcggatgggaagagctccctcctagaggcgctccttggcttccgcttcaacgtccgcgaggtcgagatgggcacccgccgtcctctcgtcctccagatggtccacgaccccactgccctcgagcccagatgccgattccaggaggaggattccgaggagtatgggagcccgatggtggtggctacggccatcgcggacctcatcaagcagcgcactgaatcacacctccggaagatccaggctgctgtctcatccaagcccatcgtcatgagggctgagtacgcccactgccccaacctcacaatcatcgacaccccaggcttcgtgcttaaggctaagagaggcgagccagagagcacaccggatgagatacggtcgatggtgaagtcactcgcgacccctccccaccgcctcgttctgttcctccagcagagcagcgttgagtggtgctcgtcgatctggctcgacacgcttaaggagatcgatcccactttcaggcgcaccatgatagtcatctccaagtttgacaaccgcctcaaggaattcacggagaggtgggaggttgatgccttcttgagtgcgagtggataccttggggataacatccacccgttcttcgtggctcttccaaaggaccgtggaacaatttccaatgaggagttccgcaggcagatctgtcatgttgatattgatgtactacgtcacttgcgagataatgtaaaaggggggttcaatgaagagaaatatggatcacacattgggttcagctgcctgaggaagtacctcgaatctgaacttcagaagaggtacaaagaagcagctccagctaccctggcattgttagagcagaggtgcactgatgtctcaatggacctaacgagattagattccaaactacaagcaacgtctgatgtctctcagctccggagatcggcaatgcttcatgcagcttctatttgcacacacttgcatgcattacttgatggatctgctgatccagatccagaaatatgggggaagactacggaggaggaacaaatgcatagtgctattggcagctggcctggcattaatacgcctgtaaaacctgccaactccagccttaagctgtatggtggtgcagcttttgagagagtaatgcatgaatttcgctgtgcaacatattcaatggaatgccctcaagtgtcaagggagaaggttgcgaacatactacttgcccatgctggaagaggtggaagcagtaggttgactgaggcagcagctgagatagctcgggcggctgcaagatcatggcttgctcctcttattgatactgcatgtgaccggcttgcatttgtcctacaaagtctgtttgaccttgctatggagcgtaaccgcgataaggattcacaacatcatcagaatgttgaagatatggatagttatgttggctttcttgctgctctccggtgctcatattataagtttgtcaaagaattgtccaagcaatgcaagcagatagtgcgtcatcaccttgattcagttacgagcccttactcccatatttgctatgacaacgactttttgagtgatgttggatccgtagcaaaccccatgagtaggtttagtcactttactggagttacatcctttgatctagcagacagtggatcagcactagaggaagctcaggagaacttgcctccaagagatcagcagcattcgacaccgcctactagtaaagggaatgagtcaaaggaggttctcagagaaagccagctaacagtacctgagacgccttctcctgatctgccatctgatatacatggtggtaggaagaaagaaaatgggatcccaaatgacggtggcccaaggaaaagacatgcaaggatggcagcgtatacaaacagaaatcaccataacagtatgattgttggagatgacatgggctcaaagtcagggtcatcatactccaccatatgcgcaatatctgctcaatattttgccaagatgcgagaagtcctgattgaaagaaatgtcccctctgcattgaactctggattcttaacaccatgccgtgaaaggttatttctggcactcggctttgagctattcgctgtgagtgatgacaagttcatggacatgtttgtcgcgcctggggcagttgatgctattcagaacgagcgcaattctcttctcaaacgtcagaagattttgctgtcctgtctgcatgagtttaagaacatatcccgggctctgtagtgatgatctttctggaattcctcaggcatgtgtattcatgtggttaacgaatcctctcagacggtacactatgccgggggcttattgcaatggcccattctttttttatccccattctcatgtcatgtatctttcttggccttaccctgttttcttgagctctgtatcactctgtcagttccttgttgacaaggtctgtatcactaacgtttgttcagattcaatactttgattatgctcgacgacaccaatacaaaaatgttcatatgaaattggaataaccgaat

SEQ ID NO: 214686 - DNA, 3413 bp, Zea Mays
cccacttcgcgtccacccatcagctctcgtcctctcaccgtcctacgctctgccgcccgccaccaggcgccagatcgacaccggaggtgatgtcgccgccggcgagccaccgccgccgttctcggttccttagctggccgctgctcttcatcgcgatcctcgcgatccactcgctggcagtatacctttttacccgcggcttcctcctcacccgcaccgagctggacctccacagcagccgcgacgacttctcgccgcagggcaacgtctcccccgggtgcgactcctggcccccggccgccgtcgaccgccttgtcattgtcgtcctcgacgcgctaagatttgatttcgtggcgccgagtaccttttttgcagagaagcagccgtggatggacaagctgcacgttttgcagaagcttgctgccgacgaaaagacctcttcaaggatcttcaaagctctcgctgatccaccaacaactagcctccagcgccttaaggctctcaccacgggtggactccctacctttattgatgtcggcaatagttttggtgctcctgcaatagtcgaagataatataatgcatcagttggctaaaaatggaaagagagttgtcatgatgggggatgatacatggatacaactgtaccctgaacacttcaacaagtcattcccatacccttcctttaatgttaaagaccttgacacagtagataatggtgtaattgagcacttgcttccatctcttcacaaaaatgattgggatgttcttattgcacattttcttggagtggaccatgcaggacatatatttggtgttgactcaaccccgatgatccagaagttggagcaatacaatcagatcctggagggtgttattgacacattgagaagtctatccaaacctggtggtacccatgagaatactttgcttttggtaatgggtgatcatggtcaaaccctgaatggtgaccatggaggagggactgctgaagaggtgatcttctttctgtttggctgtgagtacatagcaatcacatttaatctcgtgtgaattgtaggttgaaacatcgctgtttgcatggagtccaaggaccccaccagatgcagtcttatctgttcttgatgatagttcgtgcactgttaatctgcatggggaagaggtttgcgtcagcactatgcagcagcttgattttgcggtgactatatcagcacttcttggcataccttttccctttggaagcattggccgtgtaaacccagagttgtacgccttgagtatcgggacatgggtaaatcaaaggaggggtaccaatgcttgtacctcacaggatgatctagaagcatggatggggagatatgctgaagttctatgtgtaaattgttggcaggtaaagagatacattgatcaatattctgctacttccgttattggatttccatcagaagacctgcaacatatcatggacctatattcaagagctcaggaaaattggtcagcttctctgataactagttcatcagagacatgtagtcaagaaaaagtagagaagggttcagttctgctgcagcaaattgatgcatacaatgacttcttgaagagttttgcaaagcttgctcgctctgcttggacagaatttgatttatggtcaatgggcattggtcttttacttatgatgttgtcagttatcattcaggcatccatgcttgtaaatatgaccataagccaatcttcagatcagaaaagttctggttcaagcataattcatagactttcccttgctttttctttagtcgtgattcgagcagctagtttcttatcgaacagctatatattggcggaaggtagagttgcaaattttcttttggccacaagttgtatcaccagtgtgtggcactcggtgctgaaggggaacatcagcatagaaaactttgtttttcttcttttaaatattttcacacggtttggaattgaggttgggatgtcaaaacaattgcctgccccaacaattacaaaggatcatcctgtgagcgtcatttataaaatccttggtgctaattcttgcaacatcctcttggagctattccccatcatatctctagcctttgtggcttacattatgttgaaatgcctatcccgtgcaatctgtcagaggttcttgaagttctttcttttgtgtggaacaatggtgagttatttatctatagcgtttcattgggcttcagagactactttgtttgctcatgctgggactgttcaagaatttggaagaagtttggctcctcgcattgtttacactattggaggtctatcactagccatttctgcattttctcggatatttggttcaactgttcatttgaagttgaacaaaaggataattattttatcggctgtcatgctttgttcttggagtccaactattttgatcctgttgggaaggcaaggtccatttgtggcattgatttgcatgacaggagcttggtgtatgataaaattgcaacagaaacatcagagagagacagaactctctgttgctgaccctgtttcggtgattcagtggagccttcttgcagtttgtctattttatatgacaggtcactggtgtacatttgatggcctccgatatggtgcagctttcatcggttttgatcattttcatatcattcgacaaggccttctactttccattgacacctttggtatttctcatgtcctgccaattctaagccttccacttattgccatagtgtggtacaacaccatatccaaggacaacgaactgaaggacgtgattctcaacaatattaataaggtgcttttgatgtatggtcttataacaacaatcactgctacgctaacaatcatatgcgttgctattcaaaggcgtcacttaatggtttggggtttgtttgctccaaagtacgtattcgatgcaattggccttctcctcacagacttgttaatttgtttagcatcaatctactacagctgatgttgctttgcttcttgagttgcactgctaaccactaacacaacactgctattatgcttttgtgtgaatcggttgcagctagagatgctattttttcttattcttcttgtgactgcagtaagaccacacactaaacttagttcattcgtatttgtattggccaagtaagcataaaatatacaaccatagttggtctttcccacggatgttcacacttatacaaaaaggatactccctccgtcctaaaatatagttctttcaaaaatatagttcttcctagcctactttttttctgttcacattcatttaaatgataataaatatacatatatgtaaactatattcatatgttacttaatgaatatgttacttaatgaatgtatgagtcggggaccataattaggggtaccctcaagact

SEQ ID NO: 214687 - DNA, 2048 bp, Zea Mays
attagttatgctactgtactagcttctggtttgctgtattttccttaaacatgaactaacactcacacttgttttgtgggaaatggtcttcaatgctgccgtgaggaaggagatagctgatgaaaccgacagagaaacaggccgttcaaagcaaatatcacctgtccctatccatttaagcatattttctccatatgttgtgaatcttactcttattgatcttcctgggcttactaaagtagccgttgagggccaaccggagaatattgttcaggacattgaaaacatggttcgctcatatattgaaaagccaatcaggaccttgctacttctgatgcaatcaagatatcacgggaagttgatcccaaaggtgaaaggacctttggtgttctcacaaaaattgatctgatggacaagggtaccgatgctgttgatatactggaaggaagatcttaccgtctccaaacaccatgggttggtgttgttaatcgatcccaacaagatatcaacaagaatgtggacatgattgctgctaggcgtagagagcgagagtattttgcaactacaccagaatataagcacatggcttctaggatgggatctgaatatttaggaaagatgctttcaaagcatttggaacaagttatcaaatcaaggatcccggggatccaatctcttataacaaagacaattgcagagctggaaactgaacttaatcgacttggaaaacccattgctaatgatgctggggggaagctgtacacgatcatggaaatttgtcgtatgtttgacagtatctacaaagagcatctggacggagtgcgccctggcggagaaaaagtttaccacgtcttcgacaatcaatttcctgtagctattaaacggttgcagtttgataagcaactctctatggaaaatgtaaagaagcttataacagaagctgatggataccagcctcacttaatagctccagaacaaggatatcgacgccttatagaatcttgtcttattagtatcagaggtcctgccgaggcagctgttgatgcggtacatgcaattctgaaggacctcgtccgcaaggctatcaatgaaacacatgagctgaagcagtttcccacccttcgtgtggaagtaggcaatgcagcttttgagtcattggatagaatgagggatgaaagcaagaaaaatacattaaagctagttgacatggaatgcagctacttgacagtagatttcttcaggaagcttccccaggatgttgagaggggtggaaatccaagccactctatttttgatagatataatgactcttatcttagacgaattggacaaactgttctgtcatatgttaatatggtgtgttcgaccttgaggaactccatcccaaaatctattgtttattgccaagtgcgagaggccaagcgctcgctgctcgatcacttcttcactgaactgggagcaagagagatgaagcaactttccaagcttctcgacgaagatccagcagtcatggaacgcagaactaaccttgcaaagaggctggagctgtaccggagtgcccaatcggaaatcgatgcagtcgcatggtccaaatagccctgatggctaagatatctgttcttacatgttctttatccctcgtctggcgattgtctcccctattctggggcatatatagctgatttttgtctgttgtaggtcaggtcattctatagattaccgcagctgtacggtgtcgtttagttgtgcttttgttccttgtacttgagggtctaggggacaccaggctgctgtacgcttgcatcacggacaagttcataaattgtgtttttgttaccatgcattcttttattccatctatgtgcagctatatgaagcatgttcttctgtcagtatgttcaaagtcttgataggccttgatcggttgcaagaggaacgaggggattgagcaattttaattagcaagggatgtaatctctccaatctccttcaatccatccttaactgaacaagcttcaaaggtttcttgcattaaaacactaaaaact

SEQ ID NO: 214688 - DNA, 2179 bp, Zea Mays
gggaagctagtcactagtgtgagcaaagctctggtaaatcctctgtgttggagagcgtggttgggaaggatttcttaccgaggggttcaggcattgtaacccggcggccgctggtactgcagctccacagaattgatggtgacagggaatacgccgagtttatgcaccttccaagaaagagatttacagattttgctgccgtgaggaaggagatagctgatgaaaccgacagagaaacaggccgttcaaagcaaatatcacctgtccctatccatttaagcatattttctccatatgttgtgaatcttactcttattgatcttcctgggcttactaaagtagccgttgagggccaaccggagaatattgttcaggacattgaaaacatggttcgctcatatattgaaaagccaaattgtataattctggctgtttccccagccaatcaggaccttgctacttctgatgcaatcaagatatcacgggaagttgatcccaaaggtgaaaggacctttggtgttctcacaaaaattgatctgatggacaagggtaccgatgctgttgatatactggaaggaagatcttaccgtctccaaacaccatgggttggtgttgttaatcgatcccaacaagatatcaacaagaatgtggacatgattgctgctaggcgtagagagcgagagtattttgcaactacaccagaatataagcacatggcttctaggatgggatctgaatatttaggaaagatgctttcaaagcatttggaacaagttatcaaatcaaggatcccggggatccaatctcttataacaaagacaattgcagagctggaaactgaacttaatcgacttggaaaacccattgctaatgatgctggggggaagctgtacacgatcatggaaatttgtcgtatgtttgacagtatctacaaagagcatctggacggagtgcgccctggcggagaaaaagtttaccacgtcttcgacaatcaatttcctgtagctattaaacggttgcagtttgataagcaactctctatggaaaatgtaaagaagcttataacagaagctgatggataccagcctcacttaatagctccagaacaaggatatcgacgccttatagaatcttgtcttattagtatcagaggtcctgccgaggcagctgttgatgcggtacatgcaattctgaaggacctcgtccgcaaggctatcaatgaaacacatgagctgaagcagtttcccacccttcgtgtggaagtaggcaatgcagcttttgagtcattggatagaatgagggatgaaagcaagaaaaatacattaaagctagttgacatggaatgcagctacttgacagtagatttcttcaggaagcttccccaggatgttgagaggggtggaaatccaagccactctatttttgatagatataatgactcttatcttagacgaattggacaaactgttctgtcatatgttaatatggtgtgttcgaccttgaggaactccatcccaaaatctattgtttattgccaagtgcgagaggccaagcgctcgctgctcgatcacttcttcactgaactgggagcaagagagatgaagcaactttccaagcttctcgacgaagatccagcagtcatggaacgcagaactaaccttgcaaagaggctggagctgtaccggagtgcccaatcggaaatcgatgcagtcgcatggtccaaatagccctgatggctaagatatctgttcttacatgttctttatccctcgtctggcgattgtctcccctattctggggcatatatagctgatttttgtctgttgtaggtcaggtcattctatagattaccgcagctgtacggtgtcgtttagttgtgcttttgttccttgtacttgagggtctaggggacaccaggctgctgtacgcttgcatcacggacaagttcataaattgtgtttttgttaccatgcattcttttattccatctatgtgcagctatatgaagcatgttcttctgtcagtatgttcaaagtcttgataggccttgatcggttgcaagaggaacgaggggattgagcaattttaattagcaagggatgtaatctctccaatctccttcaatccatccttaactgaacaagcttcaaaggtttcttgcattaaaacactaaaaact

SEQ ID NO: 214689 - DNA, 2558 bp, Zea Mays
cgtttctttcttcctccacacgcctgcttgttcacctccatggctgatggctccatctcctcctgtccctaaccccctccggccctcccctcctccaaagccctaaaccccacgtagctcggtgtgtcagtccactcgcccgcccggtcggcgccgcacccatctttcggattctaccctaaaggcatgaccttggtcttccaatctggaaattgagtagcaatcaagtatggctgcaagagcaatcacgaggagaaggaagtatcttttcgaccatgttaaaacacctaacctctcatcttcatcctctactttccaacatggaagaattggttctgaagatgagccaaaaataacactactgtttctggagcaaagctctagggattcaagatctgagaaggagcaatactgtgtgaatttgactaataggaatttggcaggtattgctaatagatttctgcgacgtccagctcatgggatatctctttcatattatggaattggaaagaatgactttgggttgccactgggagctagatctatgctgcagtcagttcgtgcatcatcaactgcaaccgcagggcaacctaagttggatattgatgacgaacagagtggggatcagaagcaaaatagaaagaaaaaagagacatccccagaggaatgtgatcaggctgtggaaggcctaagcactgcaaaagctaaagccaaagctaaacaggtccaagaatctctcaaggctagccaatcggccatgcagaaattctgggcaaggcttttgggtattggtcctgctctgcgagctgtggcttcaatgagcagggctgattgggctgcaaagcttaagcattggaaggctgaatttgttactacactgcagcattactggttagggacaaagctactatgggcagatgttagaatctcatcaagattactggtgaaacttgctggtggaaaaagcctttctagaagagagaggcaacagctgacacgcacaacagctgatatcttcaggctggtaccatttgctgtgttcatcgttgttcctttcatggagttcttactgccagtgttcctgaagttatttccaaacatgcttccatcaactttccaagacaaaatgaaagaagaggaagcattgaagaggaaactaaaagcaaggatggaatatgcaaagtttttgcaagatacagcaaaagaaatggcaaaggaagtccaaacatcacgtagtggggatataaaacaaactgctgaagatctggacgagtttttgaacaagatcacgcttggtaaatatgtgcaaatatatgggtatccggccttttggtacagatcactacttgaggttcatgcttcgcaaaaaactgcaagacattaagaatgatgataagatgattcaagctgagggtgttgaatctctttctgaagaggagcttcggcaagcctgtcgggaacgtggtcacctaggtctactgtcaactgaagagatgagacagcagctccgagactggttggatctctcattaaatcatgcagtgccatcttcacttctcatactttcaagagcttttactgtatctgggaaagtgaaacctgaggaagctgttgtagcaacactatcttcactaccggatgaagttgtggatacagttggaacagtactgccatctgaagattcagtttctgagaggaggagaaaacttgaatttcttgagatgcaagaagaacttatcaaggaggaagagaaaaggaaggagaaagaagaaaaagcaaaacaagaggaagaggaaaaggcaaagctcaaagaaacgaagggttctgctgaagatttagctttgaaagaaatgattgaggctactgctagggaagaggaactgcgaaaggcaaaacaacacgacagggaaaaactctgtaatatcggccgagcattggcagtgctcgcatctgcatcatctgtaagcaaggagcgtcaggagttcttgggacttgtcaacaaggagatagaactatacaactcaatgcttgaaaaggagggtgcagaagaagctaagagagcatacatagctgctagagaggaatcagaccatcatgctgaggctgctgcagaagaaaaaatttcatcagcacttattgagaaggttgatgctatgctccaagaattagaaaaggagattgatgatgtggatgcacaaattggaaatcgttggcaactgcttgataaggaccatgatggcaaagtgacccctgaagaggtggcggcggcggcagcttatctcaaggacaccatagggaaagaaggcgtgcaagagctcatcagcaacctttctaaagacacagaaggaaaaatccttgttgaagatattgtgaagctagcatcccaaacagaaaacaatgaagaggaagaggaagcacggtagatgggagagtatatggaaacatcacactcgttcagcagtcaaaactcatgtattgaaagggatgcagcgcacgagccaactgagtcgagccgaatctcattcttgagctcatgcaatggacgagccaaaccaaac

SEQ ID NO: 214690 - DNA, 2764 bp, Zea Mays
cgtttctttcttcctccacacgcctgcttgttcacctccatggctgatggctccatctcctcctgtccctaaccccctccggccctcccctcctccaaagccctaaaccccacgtagctcggtgtgtcagtccactcgcccgcccggtcggcgccgcacccatctttcggattctaccctaaaggcatgaccttggtcttccaatctggaaattgagtagcaatcaagtatggctgcaagagcaatcacgaggagaaggaagtatcttttcgaccatgttaaaacacctaacctctcatcttcatcctctactttccaacatggaagaattggttctgaagatgagccaaaaataacactactgtttctggagcaaagctctagggattcaagatctgagaaggagcaatactgtgtgaatttgactaataggaatttggcaggtattgctaatagatttctgcgacgtccagctcatgggatatctctttcatattatggaattggaaagaatgactttgggttgccactgggagctagatctatgctgcagtcagttcgtgcatcatcaactgcaaccgcagggcaacctaagttggatattgatgacgaacagagtggggatcagaagcaaaatagaaagaaaaaagagacatccccagaggaatgtgatcaggctgtggaaggcctaagcactgcaaaagctaaagccaaagctaaacaggtccaagaatctctcaaggctagccaatcggccatgcagaaattctgggcaaggcttttgggtattggtcctgctctgcgagctgtggcttcaatgagcagggctgattgggctgcaaagcttaagcattggaaggctgaatttgttactacactgcagcattactggttagggacaaagctactatgggcagatgttagaatctcatcaagattactggtgaaacttgctggtggaaaaagcctttctagaagagagaggcaacagctgacacgcacaacagctgatatcttcaggctggtaccatttgctgtgttcatcgttgttcctttcatggagttcttactgccagtgttcctgaagttatttccaaacatgcttccatcaactttccaagacaaaatgaaagaagaggaagcattgaagaggaaactaaaagcaaggatggaatatgcaaagtttttgcaagatacagcaaaagaaatggcaaaggaagtccaaacatcacgtagtggggatataaaacaaactgctgaagatctggacgagtttttgaacaagatcacgcttggtaaatatgtgcaaatatatgggtatccggccttttggtacagatcactacttgaggttcatgcttcgcaaaaaactgcaagacattaagaatgatgataagatgattcaagctgagggtgttgaatctctttctgaagaggagcttcggcaagcctgtcgggaacgtggtcacctaggtctactgtcaactgaagagatgagacagcagctccgagactggttggatctctcattaaatcatgcagtgccatcttcacttctcatactttcaagagcttttactgtatctgggaaagtgaaacctgaggaagctgttgtagcaacactatcttcactaccggatgaagttgtggatacagttggaacagtactgccatctgaagattcagtttctgagaggaggagaaaacttgaatttcttgagatgcaagaagaacttatcaaggaggaagagaaaaggaaggagaaagaagaaaaagcaaaacaagaggaagaggaaaaggcaaagctcaaagaaacgaagggttctgctgaagatttagctttgaaagaaatgattgaggctactgctagggaagaggaactgcgaaaggcaaaacaacacgacagggaaaaactctgtaatatcggccgagcattggcagtgctcgcatctgcatcatctgtaagcaaggagcgtcaggagttcttgggacttgtcaacaaggagatagaactatacaactcaatgcttgaaaaggagggtgcagaagaagctaagagagcatacatagctgctagagaggaatcagaccatcatgctgaggctgctgcagaagaaaaaatttcatcagcacttattgagaaggttgatgctatgctccaagaattagaaaaggagattgatgatgtggatgcacaaattggaaatcgttggcaactgcttgataaggaccatgatggcaaagtgacccctgaagaggtggcggcggcggcagcttatctcaaggacaccatagggaaagaaggcgtgcaagagctcatcagcaacctttctaaagacacagaaggaaaaatccttgttgaagatattgtgaagctagcatcccaaacagaaaacaatgaagaggaagaggaagcacggtagatgggagagtatatggaaacatcacactcgttcagcagtcaaaactcatgtattgaaaggcaatacgtccatttcttgtgtctcttgactgactttgatagtgacttccaattagcaaggtagattttctgtagaaaggctcatgctgacatgcatttagttagccgccgtgttgtgatttggcaggtaaaattgcaaccaaaatttagaccggttgcatggacgtggataatacagatcaattgtatttgttactactatgcaatcccgaaatattggatctgtttcaaattctcaagtaatcattgatggatgctatttattgaccataaagcttacgg

SEQ ID NO: 214691 - DNA, 6153 bp, Zea Mays
atggacgccgagccccgccgggagggttccgatcgggcgcccgccgccgactcctccgcggcgccggacggtgacgaggcgatggcccgtggcgtcgctgctgcggagaagcctacagcggccagtgaggcgggggctggtggagacgtcgcggcggcggagcgtgggcgtgacggggagacgccggctggagatccgggggtggtggctgacgaaggcggtgctgtgggcgaccagtgtcctgcggcgcctcaagcgagcgaggtggacgagggtggcgccgcgggcaaggagcggtctgatggtggtctggcgaatggggcagttgagggcagcagcattgcgggggaagtgccagatgtggctcctgtggtatctgaagcacggatggacgaggacgggggttgctccacaggcaatgagtactctgaaatgaagatggaggtggatggcggctgcgtagcagaacgagagggcgatggtcaggaacaggaacaagagtgcactgcagctgctgtggaaagcgaggttaagacgggggaaggtgacggcggagtggtgaatcaagggactacggcacatgctgggggtcttcaggttaaagaggaggtgggggaaggcttggtgggccgctacattggacgtagcgctccagggcgcacgaggattcttattgggaaggttgtgtcctatgatagcacagctggggtctacagcctggtgtttgaggacggacacgctgaggagctggggcttcctcagctccaggagcttctcatgtcggatgataatggtgcattaggcatgaaggtgagctgccggaagaggaagctagacttgctggtttcatcagggagcgccttggaggtcaaagagccaccaagtactaggcagagggttgatggatgcgagatgtctgccaggcctgatgagctgcagcatagtgcgtctggctcggatatgtctgaggatgttgagtcttcgagcaattcatcagatttcactagagaagaaacatctgagccatgccctcctgtacaggctgtggagttgcctccgtcgtcaggcgacattcctgtgccagaagagtccataagttctctcctctctgtttataacttcttgcggtcgttcagtgtgcagctgttcctgagtccatttggactggacgattttgttgcggccattaattgcagcgtgcagaataacttgttggatgctgtgcacgtctcgctactgcgggctctgaggcggcatcttgaatctagatctgcagaaggatctcgatcggcttcaaattgcctgaagtacgcactctatcaacacactcttaaccacagggggaagagctttggtagaagccttctagtcgccgaatactataaacttcctgttaccatgaagttgagggtgctgcaaatactctgtgatgatgtcattgaatcagaagaactcaaaactgaactggaaaatcgagtaggctacaatgaggagatggagtatgagatagaatctagtgcatttttggaggctggttcaagatcagtctcaactagagcagcaaaggcctcagcttgcaaaaacacgaatgatttccataatcttctcgaaagtgctccaaatgtaacaaatcccgaaactgctccagcagtcctgtctcaggatggcaatagtgatgattgccgaatatgtgggatggatggaactttggtatgctgtgatggctgcccgtgggcatatcattcaagatgtattggtcaaaacaaagctttccttcctcagggtgactggttctgtccagaatgtatggttaacaagcttggcccaacttcctcaagaattgagcgtggtgcaagaggagctcaaatgtttggcattgatatgtgtgggagactattcttaggaacttgcaactatttgctggtgatcgaaacagcttcagatgcagagtcttatgcaagatattacaatcagtatgatgttgccaaggtcctccaaagccttgctgtctcagatgcatatgtggacatatgcaagcaaataaaggactactggaaacatttacttggtataattcataacgagagatcaacaacaggtaaagaagttggtgcgaaagtagcacttcctcaaacaaacgcgcagcagaaatttgtggctaatcagagcgcaatgtgctcagtcgaatgcctggaggaacaaaaatgcaagtcaagcttaggtgttgtcactgagaaaaatgctgaagttttcaagcaaactgtgtcagctcagaacaacatacataatgcacacagaaatggagcttttggaccatctgtggtatcctcagtttctcatcagaatggatccattgtaacaggtgggtctaacatagcacaggcgcagccagctcagagtattttccatccagacccatccaccgtttctgtgacgtcaggatcattttgtccatcttctctaggtaaacaccaccttcagatgtttccggaaagatctggaaacatgagtggtgtcaaggcagcaaaattgtcttcttttaaaccacaagcttacatgaacctctacaatcatggcaatattgcagcatctgctgctgccaatatagctgttattacatccgatgacagtaaagtttcagcatcccaactgactgcgaaacaccggaagaaaatggctgcagacaatgctctacaattgaaagcattttcttcagcagccacacaatttctttggccgagtaccgaaaagaagcttatggaagtcccaagagatagatgtggttggtgccttgcttgtagaagttcagcaattggaactaaaaaggcttgttttcttaacatggccacttcaaatgctgttaaatgctctgctcgaattcttagtgtaatgcgtgtaataaaaaattctgatagccactttcctagtattgttgcttatttagccaacatggaggaaagtttgcgtggcctcttggttggttcactacaagatatgcagcagaaagaaaggtggcatcagcaactacaagaagcttcgaactgcagaactgtaatacccctcttgcttgagttggaaagcaatatccgtggagtagcattttctgcaagttggttgaagccaatagacgattggcctttggaatctcctggtccatcaacgggcgcatctcgtcctgcacaataccaaaaacgtggggttggtggaaggcgtggcagaagacgttcggttgcatctgaatctggtactgctactgctactgatgaggacaacagctggacttggtggactggaggaaatatttcaaaacgtactttgcagaggggggctcttctacattcaaccagaagaaaagctgctcgccaagtggatagcaggtttatcttaccatgaaggttccaaatttccaaggcgatctcggcagtttgtctggagaggatgtgttggaataagccagacttcatctcaacttgctttacaggttagatatcttgatgcccacatcagatggaaggatttcatccctccagatcatattccctcagatggaaaaagttatgatgctgatttttctgctctcagaaatgctgtagtctgtgataaaaaaataattgataataagataagatacgcacttaagtttcgcaaccaaaagcatcttcctgtgcgtgtgacaaaaaatatcttggaatcagaaggtgatcaggatgaaaatagcaaattgtggttttctgaaaaccatgtgccattgtacatgctgcgagaatttgagctgcacgctggggataactccttgcctactccaggaatttcagactctaactgttttaccaatttgtacccacgacgagtaaaagcatatgctggagatgtcttttcctatctttttcacaagggagaagtctatccctgcacctcatgcaagaaggatgtcatctacagggatattgttaaatgcaacacttgtcaaggtaattgtcataaagagtgtacatcaagttctgttgttagcaaaggaagcagtgctacttccagtttgatatgcaagttatgccttcagaagcggaatcttatgcttactagctacaatacaaatgcaagctatatccagcctcaacaaaagggtaatggccaacaaccagtgaccgctctcagagttaagtttaaggttagttcttcccattctggtgaacctgctcccaaagtcgaagcccagctagtcgcaagcgttaaagcacagccatctgcgaaggtggaagctcagtcgagtatgaatgtgaaagcccggccagttgtaaacgtgaaaacacaaccatttgcaaaggtggaagctcagccaattatgaatgagaaagtccagccaactgcgaagatggaggtgcagccactcgcgaagatggtaactcagaacatcactggtgtccaagctctgccaaagacaaaagctaaaaagtcaaagtcagaaaaagaaaagaaacctaaaaaagttcaagcgatcacatattttggtctcgtatggaagaaaaataagactgacaaggatgatggaagtgagttcagggcaaatgatgtaatccttaaaagcaaggatagtataggttcatcaataagaccaacatgctgtctctgtgacaaagcttattctccggatttcttgtatgtacgctgtgagaggtgccggaattggtttcatggtgatgccttgcaacttgaagaagaaaggattggtgagttggttgcataccggtgctgtaggtgccgaagaagagccataccacattgtcctcattctgatggttatacaaagcctgaaccagaattaagtgaacaaacagttgctgcatcatctcagtcaactatgctatctagtgaggacacttatgctttagcagatcaggacccactgcttgcttcttacgggatagttgaaccgattggtgatgatacaatggatgttggtttgtcaatgaacatgtcaagctttgcccctggaagtaaccagaaactgtctataagaagagcacaagcaaaaagtactgaatacattgaccaaggtggaagacctgtgagtgagtataatatccaaaatcaacctccagggattggaaacatcaatctcagccacacgaatgaaatttctttttcagaggtagacagtgttgatgcttcagagctattggggtgggatttaccccaaggagctgcatatgctacacctcttgatttcactgctaatcaccagtcgaatgacacttgctgtggcagctttggaatggacgagtatgagccccagacttatttctcgttcaccgagttacttgaagctgatgatacacagcttgacaatgcctttgggatgtctgctggtctgcaaggtgattgcaatggcacaggaagctttgttcaacaaggagatggtttgtctttcatggtagaagatggagcttcaaatatgaacttcccaacaaatgatcccacccccgatgaggtagcgtgcagcaagtgcatgcatactcagccaccacctgatctcaaatgtgctgtctgtgacctgcacatacacaggcagtgctcaccgtgggatcaaggtgaagaacctgttgacagcagcaattggagctgtggtggttgccgggagtggcgatgattgacttctgaacttcattgcatctgttaatagtgccagctgccggctgttatcacaaggtgggaggtacatcgcgaagtgcgacgtggatctgtaggaaaaatctccaccaagctgttacgcagtgctaattgttgttcggatgctggggttggttatttgaccaaagtttaaccatcatacagttacaatagcaatgactcctgcgatatttacactgtacatactaaagaatgggtcgacgaagaccttttgtcattctttaggctgcttgtgtgtgtgttggtggggggggggggggggggggcgtagagataagggaggatgttgttatcaccatgtgtgtggttctgaaaaccatattcatgaagctgtgttaccttgaattctcgtgctgtctttcagatagaagtgtcttggtcagaggccatttctacgcatatgcatctttgttcgatatattttctccagctttgaaatcattatctcaatatgtgagaaattct

SEQ ID NO: 214692 - DNA, 1423 bp, Zea Mays
aacggatggatccgccccccgcccctctcgcggccgtaaaaaatcgtgttgcctcccatccttaccctatcccctcttattcttatcttggcggcggagaaaagtgcggcgcaggcgcaggcgagcggccgtccagtcgcgccggcagcagggcgcaggcgagcggccgtccgtccaggcgcaggcgagcggccgtccgtctaggcgtccgtccaagcgaactggtccaatcgtccaggcgagcgaccgtccgtccaggcgttggattccaagaactgatggacaaggcgaccaagcttttgatttatggtgcttcagcacacttgttgttgtccatgatggccatggttattgagtctagaaaaagaaaaagagatagtagaagagtcggtattacttatgggccaatggaggaaagggataggatgagacttgattatcttaacactaaaatatggatgagtgatacaacatgtgtgaacatgcttagacttagtaggtctagtttctttcgcttttgtaagggctttagagaccggggtttacttgaagatacaatacacatgtgtgttgaggaacaagtggccatgtttttgaacacagtgggacacaaccttaggaataggttggtgggaacaaattatggtagatctggtgagactgttagtcgctacttcaacaaagtgcttcgtgctattggagagctacgagctgaacttattaggccaccatcattagagactccatccaaaatagcaggaaatccaagatggggatccctactttaaggattgcattggagctattgatggcacacatataagagctttggtttccatagatatggaaccttcatttcgtggtagaaagtcttatgcctctcaaaatgtaatggcggctgttgattttgatcttcgattcacatatgtcttggctggttgggagggttcagcacatgatgctttagtactaagagatgctttagagcgagagaatggccttcgtgtaccacaagaaaatggagagtgaaggagctggtgagcactttgtagaacaagctgatggtagtagccatgttgtgtggacttctgcaatgtccgcttacatgctcagtaacctagcaagccttgtggctgaagggatcaggacatcaacaggcttcaagaaagttcaccttaacatgtgtgctaaggctctaaatgactatttcaagatgaagctcactggagaacaagtgaagaaccatttgaggacatggaagagaagatatgcgaagataaacagacttaggaagttaagtgctgcttcttggaacgaagataactacatgatcactcttgatcatgaacattatgcaaactatgtgcaggatcacaaatctgatgctgagtttttaaacaagcctttggagaactataaggaa

SEQ ID NO: 214693 - DNA, 2119 bp, Zea Mays
ctaatatcgaaaaaagccatgaatatcgcagggacaaccacacaaggtgatacaacacaagctgacttatcatcaaagggtaaaagctgccgtaaaataggcattcagcaagcactaattgaagaatgcaaatcaaccaaggttgccaatgatactggaagtgataaattttctcactcagtgaataatgttattgatcttaaggacaaactctctcactgcttgtcctcacgtttgcttcggaggtggtgtatgtttgaatggttctatagtgcaattgattatccatggtttgcaaaaagtgaatttgtggagtacttgaatcatgtcaagctgggtcatgttccaaggctgactcgtgttgagtggggtgtcataaggagttctcttgggaagccccgccgattgtctaaacaatttttgcatgaggagagagagaagctttctcaatatcgcgattcagtcaggcaacactatgctgaacttcgatctggtgttagagaaggactacccacggatcttgcacgacctcttgcagttggacagcgtgttatagcctgtcatcctagaacaagggaacttcatgatgggaatattctgacagttgacaataatcgttgtcgggttcagtttgatcggcctgagctgggtgttgagtttgtgatggatattgattgtatgcccctccatcccatggaaaatgagtccctcaggcaaaaaaacatcgtgaataaatacttatccgaggtgaaacttgaggatcagatgaatgacttgggtagtgggggtgcagcaaggttcgcatcaaatgtgaatgtgaattgtggcgatgcagcgttccaaataccttctagccacccggtaaatagtttaacgaagcaagcaaaggttggcacagttgattcaattgtacaggccaaagctacagttaatgaggttgcaattgcagcacaacaagcaatgtacaatcagccatgcagtctctcacagatacaggaaagagaagctgatataagagctcttgctgaactatcacgtgcccttgataaaaaggaagctttattggtagagttgaggcacatgaatgaagaagtgtccagaaagcaaaaggatggtgagactgttagagttgaagcatttcaggacgcaatatgctatggtgcttgtgcagctaagagattctaatgatcaagtagcctcagctttgctttctctgcggcaacgtaacacgtatcatggaaatcaattaccgtcatatcctatttccatggaaaatggtggaaccattactggagcaccagatccatataaccgttttggttatattaatccagaatccggttcccaagtaatggaagttattgagacttcaaggtgcaaagcaaaaatgatggttgatgttgctgttcaggcgatgtgcaaagtgagggaaggagagaacgcctttgctaaaatcggtgaagcactagatgatctcgatagtcgtggcacaggctctggttcaagcatactaggaataagacggatacctcccgattcagggaaggcaaatacatcctttcaagataacggaacgcctgcccctgcagcaatcaactcttcaggtccaagattgcccaacgggtatgattctgaagctcaggttcctactgatttgatttcgtcctgcgtagccacgatacttatgattcagaactgcacggaaaagcagtatcatcctgccgaagttgcacacatccttgattcggccctgtcacgcctacaaccgtgcagctcccagaacatcccgatcttcagggagattgagatgtgcatgggcattataaagaatcaaatgttggcgttgatacccacaccaagcggctagttccttgctttcctgtgagctggccggaagaggggtaaatttcggaaagaaaccggaatactgtatgtggcgtgtattgttttttttttcccattttttactgatttgttgtgttgtacaagctgtatgtttttttactgtcgtacaagctgtatgttattgctttatacatgtataatagtaatcatgaaagttcattgttctggcaagcgcatgtacattcagcttgaaatactgaaccctttttccaaa

SEQ ID NO: 214694 - DNA, 3657 bp, Zea Mays
gggagatggatcaaggagatgagcatggtaggctgttcaattctcaatggcttcgtcgcgaaaagtgaggaatgcaaataaacgctacaccaaaatcaacgaagattggcaggataaagatgagacaaatgtacataaaagtaaagtgcgaaagaaaaagttatctgacatgcttgggtctcaatggagcaaagatgagctcgagcgcttctatggagcctacagaaaatatggaaaagattggagaaagttttttttatgcccttctagacagaaccgagacataaaaatacatttagttgctggtgcaatacgtgataggacatctgaaatggtggaggctctttacaacattaataaggcatatttatctcttccagagggaacagctactgctgcggggttaatagcaatgatgaccgatcactacaatattctggatggaagtaacagtgatcatgaaagcaatgattcaccaaaagcttcaaggaagccacagaagcgtggtcgtgctaggtttcaatctgtttctaagacatctgatgcacgttatgctgatctagggcaatctcagccttcttcatcaagctatggctgcctttcgttgttgacgaaaaaatgtgctggagatctgcttgtagggaacaggcctcgtgctgttggaaaaaggactccaagagtacctggtgcaagtatatactatcgagatgacaggggtgtaacagataggcgtgcaaaaacagttgctaacaatggtgatgatgaaggagctcatgtagctgcgcttgctctggcagaggtatttcaaagaggaggctcacctcaggtttctgaaacatccaaatggtgatcacatgttcctgtctcctgttaaaagtagtgacagaaaaaatgctgattcagagatgggaagctcaaagttgcatgggtttcatttggatgctgattaccccgaaggtagcttaggaagcagggaggccgagactggtgaatattgcaaaggttcatcatttttgacgaaaaatgaaggttctggtaagcctctgaagaagggaaaaaagtctcagaagaggaggaaaaaagctgcacataaaacaggtgatcagttcgaggatgacagagaggcttgtagtggaactgatgaagggcataggtcgataaagattaaagaagactcagagctggagtcattgggatggccgtctagcacgtcaaataaaagaagtcgtcaattgttttttggtgaatcttcagcccaaattaaggatgaaaacaaagatgttgattctgatgacaggcctggcatgcctgcggcagtatcagtgtatgagcagaaagttaactccaaaagcactgcaaggaaagttaaaaggcagcctgaaatttcaaattcagagatggtcactaggaaaaaagctaaagttactaaagatcctcatcacgatgggagcaccacttctgatgtaaagcagcaagcttgtacatgtggtgtcaaaacagagaaaaagaagaggaaatcatccacgacaaaggtttctgctgaagaagggaaggtgtcgtctaatatcgggacaaccacacaaggtgatacaacacaagctgacttatcatcaaagggtaaaagctgccgtaaaataggcattcagcaagcactaattgaagaatgcaaatcaaccaaggttgccaatgatactggaagtgataaattttctcactcagtgaataatgttattgatcttaaggacaaactctctcactgcttgtcctcacgtttgcttcggaggtggtgtatgtttgaatggttctatagtgcaattgattatccatggtttgcaaaaagtgaatttgtggagtacttgaatcatgtcaagctgggtcatgttccaaggctgactcgtgttgagtggggtgtcataaggagttctcttgggaagccccgccgattgtctaaacaatttttgcatgaggagagagagaagctttctcaatatcgcgattcagtcaggcaacactatgctgaacttcgatctggtgttagagaaggactacccacggatcttgcacgacctcttgcagttggacagcgtgttatagcctgtcatcctagaacaagggaacttcatgatgggaatattctgacagttgacaataatcgttgtcgggttcagtttgatcggcctgagctgggtgttgagtttgtgatggatattgattgtatgcccctccatcccatggaaaatgagtccctcaggcaaaaaaacatcgtgaataaatacttatccgaggtgaaacttgaggatcagatgaatgacttgggtagtgggggtgcagcaaggttcgcatcaaatgtgaatgtgaattgtggcgatgcagcgttccaaataccttctagccacccggtaaatagtttaacgaagcaagcaaaggttggcacagttgattcaattgtacaggccaaagctacagttaatgaggttgcaattgcagcacaacaagcaatgtacaatcagccatgcagtctctcacagatacaggaaagagaagctgatataagagctcttgctgaactatcacgtgcccttgataaaaaggaagctttattggtagagttgaggcacatgaatgaagaagtgtccagaaagcaaaaggatggtgagactgttagagttgaagcatttcaggacgcaatatgctatggtgcttgtgcagctaagagattctaatgatcaagtagcctcagctttgctttctctgcggcaacgtaacacgtatcatggaaatcaattaccgtcatatcctatttccatggaaaatggtggaaccattactggagcaccagatccatataaccgttttggttatattaatccagaatccggttcccaagtaatggaagttattgagacttcaaggtgcaaagcaaaaatgatggttgatgttgctgttcaggcgatgtgcaaagtgagggaaggagagaacgcctttgctaaaatcggtgaagcactagatgatctcgatagtcgtggcacaggctctggttcaagcatactaggaataagacggatacctcccgattcagggaaggcaaatacatcctttcaagataacggaacgcctgcccctgcagcaatcaactcttcaggtccaagattgcccaacgggtatgattctgaagctcaggttcctactgatttgatttcgtcctgcgtagccacgatacttatgattcagaactgcacggaaaagcagtatcatcctgccgaagttgcacacatccttgattcggccctgtcacgcctacaaccgtgcagctcccagaacatcccgatcttcagggagattgagatgtgcatgggcattataaagaatcaaatgttggcgttgatacccacaccaagcggctagttccttgctttcctgtgagctggccggaagaggggtaaatttcggaaagaaaccggaatactgtatgtggcgtgtattgttttttttttcccattttttactgatttgttgtgttgtacaagctgtatgtttttttactgtcgtacaagctgtatgttattgctttatacatgtataatagtaatcatgaaagttcattgttctggcaagcgcatgtacattcagcttgaaatactgaaccctttttccaaa

SEQ ID NO: 214695 - DNA, 4690 bp, Zea Mays
ggatgagggggaagccaatgggagatggatcaaggagatgagcatggtaggctgttcaattctcaatggcttcgtcgcgaaaagtgaggaatgcaaataaacgctacaccaaaatcaacgaagattggcaggataaagatgagacaaatgtacataaaagtaaagtgcgaaagaaaaagttatctgacatgcttgggtctcaatggagcaaagatgagctcgagcgcttctatggagcctacagaaaatatggaaaagattggagaaagttttttttatgcccttctagacagaaccgagacataaaaatacatttagttgctggtgcaatacgtgataggacatctgaaatggtggaggctctttacaacattaataaggcatatttatctcttccagagggaacagctactgctgcggggttaatagcaatgatgaccgatcactacaatattctggatggaagtaacagtgatcatgaaagcaatgattcaccaaaagcttcaaggaagccacagaagcgtggtcgtgctaggtttcaatctgtttctaagacatctgatgcacgttatgctgatctagggcaatctcagccttcttcatcaagctatggctgcctttcgttgttgacgaaaaaatgtgctggagatctgcttgtagggaacaggcctcgtgctgttggaaaaaggactccaagagtacctggtgcaagtatatactatcgagatgacaggggtgtaacagataggcgtgcaaaaacagttgctaacaatggtgatgatgaaggagctcatgtagctgcgcttgctctggcagaggtatttcaaagaggaggctcacctcaggtttctgaaacatccaaatggtgatcacatgttcctgtctcctgttaaaagtagtgacagaaaaaatgctgattcagagatgggaagctcaaagttgcatgggtttcatttggatgctgattaccccgaaggtagcttaggaagcagggaggccgagactggtgaatattgcaaaggttcatcatttttgacgaaaaatgaaggttctggtaagcctctgaagaagggaaaaaagtctcagaagaggaggaaaaaagctgcacataaaacaggtgatcagttcgaggatgacagagaggcttgtagtggaactgatgaagggcataggtcgataaagattaaagaagactcagagctggagtcattgggatggccgtctagcacgtcaaataaaagaagtcgtcaattgttttttggtggattgctaacaaaagaacagtagcggaggcccttgagggtatggcgtggattagtgatatcagggggaccatctcttgggcagttattttcgatctcctgatcctgtgcgaagctgtcacagaagttcatctacaggctgggaccaccgacaagcacttttggagattttccacttctggccagtattctgcgaaggcagcttatgagctgttcttccttggctccactgccttcgggcctttgaaaggatttggaaaacttgggctcctgccaaatgcaagttctttttgtggttggtcatgcataacagatgctggacagcagatcgtttggcaaaaagggatctccctcaccctgcggtctgtcctctctgtgatcagcaagcggaaacaatccaacaccttctcatttcttgtgtttttgcaagacaattctggttcacgctgctgcaaaagatgggggctgccgaacctctccccagacttggatgccaccaatctggacagttggtggaatagtgctgctgagaagctgcctggagaccttcaagccggctttaattctatcgtgatccttggcgcttggagtatctggcgtccccgcaatgactgtgtcttcaatggcatgtcacctagtgtgaccacggctatcacccttgctagtgatgagctgaggatgtggagcctcgctggtgctaaaggtctcaacctgctgtcagccctggtttttgtgttcgatccagggtgggggttttttcttgagtttttgggtttttgggtttgtgtgtgagttgtgctgtgttttgtgggttgtgttctggtgaccttgtggtcgctgggctgtttgggtgtgtgtttgtgtgtgtgtgtcgtggtgttttgtactccctttttatctttaatggaaagatacgcagctctcctgcgtgttcgagaaaaaatatgtccttgttttgcatacattggctgatctatctgtgaatatcctaccaccttcatcagtaatggaatctgaatcttcagcccaaattaaggatgaaaacaaagatgttgattctgatgacaggcctggcatgcctgcggcagtatcagtgtatgagcagaaagttaactccaaaagcactgcaaggaaagttaaaaggcagcctgaaatttcaaattcagagatggtcactaggaaaaaagctaaagttactaaagatcctcatcacgatgggagcaccacttctgatgtaaagcagcaagcttgtacatgtggtgtcaaaacagagaaaaagaagaggaaatcatccacgacaaaggtttctgctgaagaagggaaggtgtcgtctaatatcgggacaaccacacaaggtgatacaacacaagctgacttatcatcaaagggtaaaagctgccgtaaaataggcattcagcaagcactaattgaagaatgcaaatcaaccaaggttgccaatgatactggaagtgataaattttctcactcagtgaataatgttattgatcttaaggacaaactctctcactgcttgtcctcacgtttgcttcggaggtggtgtatgtttgaatggttctatagtgcaattgattatccatggtttgcaaaaagtgaatttgtggagtacttgaatcatgtcaagctgggtcatgttccaaggctgactcgtgttgagtggggtgtcataaggagttctcttgggaagccccgccgattgtctaaacaatttttgcatgaggagagagagaagctttctcaatatcgcgattcagtcaggcaacactatgctgaacttcgatctggtgttagagaaggactacccacggatcttgcacgacctcttgcagttggacagcgtgttatagcctgtcatcctagaacaagggaacttcatgatgggaatattctgacagttgacaataatcgttgtcgggttcagtttgatcggcctgagctgggtgttgagtttgtgatggatattgattgtatgcccctccatcccatggaaaatgagtccctcaggcaaaaaaacatcgtgaataaatacttatccgaggtgaaacttgaggatcagatgaatgacttgggtagtgggggtgcagcaaggttcgcatcaaatgtgaatgtgaattgtggcgatgcagcgttccaaataccttctagccacccggtaaatagtttaacgaagcaagcaaaggttggcacagttgattcaattgtacaggccaaagctacagttaatgaggttgcaattgcagcacaacaagcaatgtacaatcagccatgcagtctctcacagatacaggaaagagaagctgatataagagctcttgctgaactatcacgtgcccttgataaaaaggaagctttattggtagagttgaggcacatgaatgaagaagtgtccagaaagcaaaaggatggtgagactgttagagttgaagcatttcaggacgcaatatgctatggtgcttgtgcagctaagagattctaatgatcaagtagcctcagctttgctttctctgcggcaacgtaacacgtatcatggaaatcaattaccgtcatatcctatttccatggaaaatggtggaaccattactggagcaccagatccatataaccgttttggttatattaatccagaatccggttcccaagtaatggaagttattgagacttcaaggtgcaaagcaaaaatgatggttgatgttgctgttcaggcgatgtgcaaagtgagggaaggagagaacgcctttgctaaaatcggtgaagcactagatgatctcgatagtcgtggcacaggctctggttcaagcatactaggaataagacggatacctcccgattcagggaaggcaaatacatcctttcaagataacggaacgcctgcccctgcagcaatcaactcttcaggtccaagattgcccaacgggtatgattctgaagctcaggttcctactgatttgatttcgtcctgcgtagccacgatacttatgattcagaactgcacggaaaagcagtatcatcctgccgaagttgcacacatccttgattcggccctgtcacgcctacaaccgtgcagctcccagaacatcccgatcttcagggagattgagatgtgcatgggcattataaagaatcaaatgttggcgttgatacccacaccaagcggctagttccttgctttcctgtgagctggccggaagaggggtaaatttcggaaagaaaccggaatactgtatgtggcgtgtattgttttttttttcccattttttactgatttgttgtgttgtacaagctgtatgtttttttactgtcgtacaagctgtatgttattgctttatacatgtataatagtaatcatgaaagttcattgttctggcaagcgcatgtacattcagcttgaaatactgaaccctttttccaaa

SEQ ID NO: 214696 - DNA, 653 bp, Zea Mays
atgtcgtcgtcgtcggtgccgctcgtggcggcgctctccaactacaagccggtcgggtggaagtgccgtatggcggcaggcagaagaagagatttttgttctgttgtgcaaatgcgttttggtctgcctactgttaatgtttcaatgttgatcatggcagatggcaatgagaaggactttgatgaagaattctctggttctgcaaatgtcaccactagcaacgtgcaggaagaggtgcaggaaagtaaatgcaaagagcaagttgaaaatgcaagcacgacaccagatgacttgcaactacatgagggaactaatgagtcccaagaatgggctcaatttgcttcatcttctggaaagaagctaacacctaggaggaaaccgattgtccaagttgaacatgatactaagtcaggtgaaagacgaccgtcggatggtgatacctttgaggagttacatgcaagaactgcaagtggtggacaaaattgttaatgattctgaagggatgcatcttgtttacatatttgtgttgtcaatatttggattgtttcatttatttggtgatatttgtaattacagttctttcagtgctgtaaggatgcttttgaaataaattgagttctcattgaagttactgtaaggatgatttgcgaaat

SEQ ID NO: 214697 - DNA, 2215 bp, Zea Mays
ccggagcagggagagcattcgccatttggcagagacgagacggacacctctgcggcgccgcctcgggcctcggcagacgacagcaatcacagcagcggctctacaagaaagaagagaaactgcagaaaccgcgagggcaggcgcggcagcgggcaggcagtccatccccatgtgtttgtgactttgtgctcgtcctcatacccccctccagctcccgtctcctcgtgctctccactgctgcatgcgcctcttgtcctgtccccctccccaccttgttcctcccatcccgcgccgtctctgcacgaagcagagcgccggtccaccgacaaggacagctacaactacgacgcgcaggcagagccatcgctcatctggggctgccctcggttactcctcccctccgccgctgcccctgccttgtccacagctgttgttaattccttcatgagttggcgtcggcgccagcggggcggaggggaaggaggcggggcttcagcttccccggcgccggccgccgcctgaagatcccttcttctcctgtagtcctgtcgtcgggcgggcgaggtatgatgggcgactcttttggttgctcggcgactggggagcgacttgtgtctgctgcaagagatggagacatccaggaggccagggctctcttagaactcaatccccgccttgctcggtactccacgttcgggatccggaattcgcctctccattactcggcagcaaagggccaccatgagattgtctccctcctaatcgagtccggtgttaatattaaccttagaaattgcagagggcagactgctctgatgcaagcttgtctatatggtcactggaaagttgtacagattctagttctttttaaagctaatattcacaggagagattgttttagcggcgcgaccgctattcattttgccgcgctaaaaggtcatactcgctgcattcggcttcttgtggctgattatgtgcctagcttgtcagagttttggaccattatgcgtggaaagtccacagatgaaatgaaaaagggtgcctttgatgccgcgtctctccagagactagttaatggaaagtctgatggtggtgtcacccccgcttcacttggcagcccttcatggacatgctgagagtgtacagttgctgctagaccttggagcctctgtctctgaggtgactgtcaatgatggttcaacaattgacctcattggttcggggagcacacccctccattacgcggcgtgtggtggaagtgctgtttgctgccaacaggagcaaacatgggagctcaaaatgttaacgggttgactcctttattggtggctcgttcgtggcacaagactagcatcgaaggtattctaagcaagcaaccagaaaaccgaatgcgtattcttccttcaccatacctttgcttaccactgatgagcattgtcaaaattgccagggaatgtggatggaggaaaacttccgcctcatccacttgtcaggatccatgtgtcatatgtttggaggtggaatgcactgtagctgcagaaggttgcggccatgagttctgcaccaaatgtgcactctacttgtgctccaccactagcagctcaacatccacccgtggagttcctggctccatatcatgccctctgtgtcgccatgccatcgtctccttcatgaggctcaccagcactaccccgataaaggagcttccatggacaagcgcgtcactagctctatgtgcagcgggctcaaacactggccgccctgaacatggcgggtccttgcatcgaaggcctgacctgcgtcgactgcgctccatctcagttcagctgggatgctcttcttttagatccattggctctgggaagctgtcgtccatgaagctgaactgcacaggagctgaagaggcggtgccttgcctcgtcagctgcctcaggcccgatgtgcagcgttcatcgtcgtacaggggaagaattaggagatattcagagttttgaaaggatggttttgtggcgtccttcctgcgagtttttagggtttgggaatttaaacctgtgtcgtcatgttcctcttcgtttgtttccctgttgtttaatatgcatgcagtcctcgttgtgaagatctatttgtgtacatggcccgtttgtcttcattacttttacttatatgtgaattatataccatctctgttttgcaattaccgacaagttaatactcc

SEQ ID NO: 214698 - DNA, 2252 bp, Zea Mays
ccggagcagggagagcattcgccatttggcagagacgagacggacacctctgcggcgccgcctcgggcctcggcagacgacagcaatcacagcagcggctctacaagaaagaagagaaactgcagaaaccgcgagggcaggcgcggcagcgggcaggcagtccatccccatgtgtttgtgactttgtgctcgtcctcatacccccctccagctcccgtctcctcgtgctctccactgctgcatgcgcctcttgtcctgtccccctccccaccttgttcctcccatcccgcgccgtctctgcacgaagcagagcgccggtccaccgacaaggacagctacaactacgacgcgcaggcagagccatcgctcatctggggctgccctcggttactcctcccctccgccgctgcccctgccttgtccacagctgttgttaattccttcatgagttggcgtcggcgccagcggggcggaggggaaggaggcggggcttcagcttccccggcgccggccgccgcctgaagatcccttcttctcctgtagtcctgtcgtcgggcgggcgaggtccaagcatcatggggctcttaggtatgatgggcgactcttttggttgctcggcgactggggagcgacttgtgtctgctgcaagagatggagacatccaggaggccagggctctcttagaactcaatccccgccttgctcggtactccacgttcgggatccggaattcgcctctccattactcggcagcaaagggccaccatgagattgtctccctcctaatcgagtccggtgttaatattaaccttagaaattgcagagggcagactgctctgatgcaagcttgtctatatggtcactggaaagttgtacagattctagttctttttaaagctaatattcacaggagagattgttttagcggcgcgaccgctattcattttgccgcgctaaaaggtcatactcgctgcattcggcttcttgtggctgattatgtgcctagcttgtcagagttttggaccattatgcgtggaaagtccacagatgaaatgaaaaagggtgcctttgatgccgcgtctctccagagactagttaatggaaagtctgatggtggtgtcacccccgcttcacttggcagcccttcatggacatgctgagagtgtacagttgctgctagaccttggagcctctgtctctgaggtgactgtcaatgatggttcaacaattgacctcattggttcggggagcacacccctccattacgcggcgtgtggtggaagtgctgtttgctgccaacttctcattgcagcaggagcaaacatgggagctcaaaatgttaacgggttgactcctttattggtggctcgttcgtggcacaagactagcatcgaaggtattctaagcaagcaaccagaaaaccgaatgcgtattcttccttcaccatacctttgcttaccactgatgagcattgtcaaaattgccagggaatgtggatggaggaaaacttccgcctcatccacttgtcaggatccatgtgtcatatgtttggaggtggaatgcactgtagctgcagaaggttgcggccatgagttctgcaccaaatgtgcactctacttgtgctccaccactagcagctcaacatccacccgtggagttcctggctccatatcatgccctctgtgtcgccatgccatcgtctccttcatgaggctcaccagcactaccccgataaaggagcttccatggacaagcgcgtcactagctctatgtgcagcgggctcaaacactggccgccctgaacatggcgggtccttgcatcgaaggcctgacctgcgtcgactgcgctccatctcagttcagctgggatgctcttcttttagatccattggctctgggaagctgtcgtccatgaagctgaactgcacaggagctgaagaggcggtgccttgcctcgtcagctgcctcaggcccgatgtgcagcgttcatcgtcgtacaggggaagaattaggagatattcagagttttgaaaggatggttttgtggcgtccttcctgcgagtttttagggtttgggaatttaaacctgtgtcgtcatgttcctcttcgtttgtttccctgttgtttaatatgcatgcagtcctcgttgtgaagatctatttgtgtacatggcccgtttgtcttcattacttttacttatatgtgaattatataccatctctgttttgcaattaccgacaagttaatactcc

SEQ ID NO: 214699 - DNA, 1739 bp, Zea Mays
ggaatgcgcctttcttcccccatcagatgtcaaaagggaatgtttgtactggtccaagcatcatggggctcttaggtatgatgggcgactcttttggttgctcggcgactggggagcgacttgtgtctgctgcaagagatggagacatccaggaggccagggctctcttagaactcaatccccgccttgctcggtactccacgttcgggatccggaattcgcctctccattactcggcagcaaagggccaccatgagattgtctccctcctaatcgagtccggtgttaatattaaccttagaaattgcagagggcagactgctctgatgcaagcttgtctatatggtcactggaaagttgtacagattctagttctttttaaagctaatattcacaggagagattgttttagcggcgcgaccgctattcattttgccgcgctaaaaggtcatactcgctgcattcggcttcttgtggctgattatgtgcctagcttgtcagagttttggaccattatgcgtggaaagtccacagatgaaatgaaaaagggtgcctttgatgccgcgtctctccagagactagttaatggaaagtctgatggtggtgtcacccccgcttcacttggcagcccttcatggacatgctgagagtgtacagttgctgctagaccttggagcctctgtctctgaggtgactgtcaatgatggttcaacaattgacctcattggttcggggagcacacccctccattacgcggcgtgtggtggaagtgctgtttgctgccaacttctcattgcagcaggagcaaacatgggagctcaaaatgttaacgggttgactcctttattggtggctcgttcgtggcacaagactagcatcgaaggtattctaagcaagcaaccagaaaaccgaatgcgtattcttccttcaccatacctttgcttaccactgatgagcattgtcaaaattgccagggaatgtggatggaggaaaacttccgcctcatccacttgtcaggatccatgtgtcatatgtttggaggtggaatgcactgtagctgcagaaggttgcggccatgagttctgcaccaaatgtgcactctacttgtgctccaccactagcagctcaacatccacccgtggagttcctggctccatatcatgccctctgtgtcgccatgccatcgtctccttcatgaggctcaccagcactaccccgataaaggagcttccatggacaagcgcgtcactagctctatgtgcagcgggctcaaacactggccgccctgaacatggcgggtccttgcatcgaaggcctgacctgcgtcgactgcgctccatctcagttcagctgggatgctcttcttttagatccattggctctgggaagctgtcgtccatgaagctgaactgcacaggagctgaagaggcggtgccttgcctcgtcagctgcctcaggcccgatgtgcagcgttcatcgtcgtacaggggaagaattaggagatattcagagttttgaaaggatggttttgtggcgtccttcctgcgagtttttagggtttgggaatttaaacctgtgtcgtcatgttcctcttcgtttgtttccctgttgtttaatatgcatgcagtcctcgttgtgaagatctatttgtgtacatggcccgtttgtcttcattacttttacttatatgtgaattatataccatctctgttttgcaattaccgacaagttaatactcc

SEQ ID NO: 214700 - DNA, 2217 bp, Zea Mays
gcggcttaccatttcttggatcagttaggggaggatagactcttcatttggattcatgtccttcccggtcaatttgggtcagtttgtttaccatagaaaggtggcatcttttggcttctgctctttggtctatgtggatccagtgccaaattggaccgaccgaagctgattcttgctggcagaaagtgcccaactgtgctaccatttatttccaatgaatccttggctatctactcaaataaacaccgagtccgtgaggccatttcgtctctgcttatgtaggattcttatgttcatgtggacatgtggcgcattgcctggcctttcgcaaatcagtttcttctggagtgcccaagtggttcttctcttcccatatcgatataaggctaacaccgtgtgatgcctgcctcaatacatcttggccccaagaacactctgattctgtgcagttccatacggtgctcaacaagtgatatccagtatttggagggtctttgcaagaagcgttgctctgttgctcttgctcatattttgtgttctgataggtccaagcatcatggggctcttaggtatgatgggcgactcttttggttgctcggcgactggggagcgacttgtgtctgctgcaagagatggagacatccaggaggccagggctctcttagaactcaatccccgccttgctcggtactccacgttcgggatccggaattcgcctctccattactcggcagcaaagggccaccatgagattgtctccctcctaatcgagtccggtgttaatattaaccttagaaattgcagagggcagactgctctgatgcaagcttgtctatatggtcactggaaagttgtacagattctagttctttttaaagctaatattcacaggagagattgttttagcggcgcgaccgctattcattttgccgcgctaaaaggtcatactcgctgcattcggcttcttgtggctgattatgtgcctagcttgtcagagttttggaccattatgcgtggaaagtccacagatgaaatgaaaaagggtgcctttgatgccgcgtctctccagagactagttaatggaaagtctgatggtggtgtcacccccgcttcacttggcagcccttcatggacatgctgagagtgtacagttgctgctagaccttggagcctctgtctctgaggtgactgtcaatgatggttcaacaattgacctcattggttcggggagcacacccctccattacgcggcgtgtggtggaagtgctgtttgctgccaagagcaaacatgggagctcaaaatgttaacgggttgactcctttattggtggctcgttcgtggcacaagactagcatcgaaggtattctaagcaagcaaccagaaaaccgaatgcgtattcttccttcaccatacctttgcttaccactgatgagcattgtcaaaattgccagggaatgtggatggaggaaaacttccgcctcatccacttgtcaggatccatgtgtcatatgtttggaggtggaatgcactgtagctgcagaaggttgcggccatgagttctgcaccaaatgtgcactctacttgtgctccaccactagcagctcaacatccacccgtggagttcctggctccatatcatgccctctgtgtcgccatgccatcgtctccttcatgaggctcaccagcactaccccgataaaggagcttccatggacaagcgcgtcactagctctatgtgcagcgggctcaaacactggccgccctgaacatggcgggtccttgcatcgaaggcctgacctgcgtcgactgcgctccatctcagttcagctgggatgctcttcttttagatccattggctctgggaagctgtcgtccatgaagctgaactgcacaggagctgaagaggcggtgccttgcctcgtcagctgcctcaggcccgatgtgcagcgttcatcgtcgtacaggggaagaattaggagatattcagagttttgaaaggatggttttgtggcgtccttcctgcgagtttttagggtttgggaatttaaacctgtgtcgtcatgttcctcttcgtttgtttccctgttgtttaatatgcatgcagtcctcgttgtgaagatctatttgtgtacatggcccgtttgtcttcattacttttacttatatgtgaattatataccatctctgttttgcaattaccgacaagttaatactcc

SEQ ID NO: 214701 - DNA, 1202 bp, Zea Mays
gcgtatgtaaattctgacgttcatcgatgtctctccagagactagttaatggaaagtctgatggtggtgtcacccccgcttcacttggcagcccttcatggacatgctgagagtgtacagttgctgctagaccttggagcctctgtctctgaggtgactgtcaatgatggttcaacaattgacctcattggttcggggagcacacccctccattacgcggcgtgtggtggaagtgctgtttgctgccaacttctcattgcagcaggagcaaacatgggagctcaaaatgttaacgggttgactcctttattggtggctcgttcgtggcacaagactagcatcgaaggtattctaagcaagcaaccagaaaaccgaatgcgtattcttccttcaccatacctttgcttaccactgatgagcattgtcaaaattgccagggaatgtggatggaggaaaacttccgcctcatccacttgtcaggatccatgtgtcatatgtttggaggtggaatgcactgtagctgcagaaggttgcggccatgagttctgcaccaaatgtgcactctacttgtgctccaccactagcagctcaacatccacccgtggagttcctggctccatatcatgccctctgtgtcgccatgccatcgtctccttcatgaggctcaccagcactaccccgataaaggagcttccatggacaagcgcgtcactagctctatgtgcagcgggctcaaacactggccgccctgaacatggcgggtccttgcatcgaaggcctgacctgcgtcgactgcgctccatctcagttcagctgggatgctcttcttttagatccattggctctgggaagctgtcgtccatgaagctgaactgcacaggagctgaagaggcggtgccttgcctcgtcagctgcctcaggcccgatgtgcagcgttcatcgtcgtacaggggaagaattaggagatattcagagttttgaaaggatggttttgtggcgtccttcctgcgagtttttagggtttgggaatttaaacctgtgtcgtcatgttcctcttcgtttgtttccctgttgtttaatatgcatgcagtcctcgttgtgaagatctatttgtgtacatggcccgtttgtcttcattacttttacttatatgtgaattatataccatctctgttttgcaattaccgacaagttaatactcc

SEQ ID NO: 214702 - DNA, 2641 bp, Zea Mays
atggagggccgcgacgacgacgacacgggaggggccggcgacggcgcgggtgtcgggaagggcggggagaagaaggggaggaagtcgccggagtccaaggccgtcatcgacaaggccggggagggcaaccggatggtcttcttcgatggcccggcgctggcgttcgacctggaggacctgctccgcgcctccgccgaggttctcggcaagggcgcattcgggacggcgtaccgggccgtgctggaggacgtcaccacggtcgtcgtcaagcggctcagcaaggaggtcagcgccgggcgccgtgacttcgagcagcagatggagctggtcggccggattcgccatcgcaacgtcgtcgagctccgcgcctactactactccaaggacgagaagctgcttgtgtacgattactacaccagcggaagtgtatccaacatgcttcatggttttgggtacccgttgccatctctagccctgtcgtcctgtccacgccctcagccaaaccctagcactcggtcgcgcacaggcacaacgcagcgcagtcgcgccgtcggcattcagccgtcgcggactcgccgcccacccaggtcccaggctgggagagtggcagacacccactccgccactcgtcctcagccaccgaccaccgtccgtggttccccgttcgccaccggccaccgccagtccaccacccccccggcgcggcggcgcccctcctcctcccacacagcacacatgcgcacggcttcagctgcagttcatgaacacgactgaaggattgcaatggttctgttttttctgaatagcaccatgccaggactgccatccgagaaggagtcgatacccaacctcatcttgcgaggctttggcaccatcgaccgtgtgaaggcgaagctggagcaggcctgccctgaagtggtgtcatgtgccgatatcttggctctggtagcaagggacgtcgttgtactgaccaaagggcctcacggggatgttccaatctggcggagagatggtagaagatcggtgaagcaagatgcactggacaacctccacgcgcccttcttcgatgttggtcggaacatgtgccagttcttcatgcccaagggcctcaacgccaaggaccagattgttctgctaggtacccctccttggagaacatagggcttttgctgatggtgatgctgtattctgggataaggaatatgctcatgcattgaaatgttacactctagtacgtccttggttatctcctaatatttaacctgcatttatagttaccagtttagcacttcagaatatatctattgtcaagccgctgcatgtcgagaattctgatgaatttgataactagtgctggttttaccttactataaggccttgttcgtttccgtcggattgcacccggaatcgttccaactaatcaaaatttatataaattagagaagcaatccggtcaggaatcgttccgacccaccaatccagccgaaacgaacaagccctaatgattttccttatctttaacaatgtgcactcatacattagtgttcaaaaagaagcacataaaagtttcttcaaacatgctatgaaatttggtatcttattgttaaaccttgctttacctgctagtgtttatgcgcaaaattagaacttactgcctaatgtttatgattttaagattataatatttttgtcaatatgtgccaaaataaggtaacgttcatcctgaatcagcgattgtctaagcctgcagaagtgttagtaggaaccgtgctggggctgtatgaggacatcagatacaagtctgagtaaaaaaaagtgcacctgaaacaggttgatattattggactgggttctgggggttgatattattggactgggttctggtaccgaggtggaccagaaacttaagtatgctaatgatctttcctcgggtgtgatactcggaagagagcttgtgaaataagtgcatgcaccgctggtgcccaggtaaggggtcagcgccttttgttttctgccacctcacatacgtttcagtagttttgattgggtaatcatctgtatagacttcaccttgtgattcatcctgatatgtaataacgaattttgcacgtaaagacacataggtttgtcaggatgcatgcttgttagctgtttgcttatatgatcctgaaagcccttaagaggctttatttatggttaaaagctcgaacaattaaggatgtcagtgctggttctgatctcttcgaggtagaaccaacaaagtggtttcctgatagagctgcctcttgtatgctttgcacaatactttttcgtctaaaatttttgcacttgccatcattgctaattttgtggttattttcaaagggtagaagtttgatgcctactggtaagatactttacatctactgatttatgagccgtagaccggacaggagatgaagatgatgccttacatgaatgccaaggcaccgaacggtgaagcctgggtggccatcattactcacctattgatgcatttgttctcactaagacgtaggaattctttggactatgtatttagctcagaaatttctgtttctgtatgttgtacctcttatactaactcataattctttaccttacaatattcagatgactatat

SEQ ID NO: 214703 - DNA, 2658 bp, Zea Mays
atggagggccgcgacgacgacgacacgggaggggccggcgacggcgcgggtgtcgggaagggcggggagaagaaggggaggaagtcgccggagtccaaggccgtcatcgacaaggccggggagggcaaccggatggtcttcttcgatggcccggcgctggcgttcgacctggaggacctgctccgcgcctccgccgaggttctcggcaagggcgcattcgggacggcgtaccgggccgtgctggaggacgtcaccacggtcgtcgtcaagcggctcagcaaggaggtcagcgccgggcgccgtgacttcgagcagcagatggagctggtcggccggattcgccatcgcaacgtcgtcgagctccgcgcctactactactccaaggacgagaagctgcttgtgtacgattactacaccagcggaagtgtatccaacatgcttcatggttttgggtacccgttgccatctctagccctgtcgtcctgtccacgccctcagccaaaccctagcactcggtcgcgcacaggcacaacgcagcgcagtcgcgccgtcggcattcagccgtcgcggactcgccgcccacccaggtcccaggctgggagagtggcagacacccactccgccactcgtcctcagccaccgaccaccgtccgtggttccccgttcgccaccggccaccgccagtccaccacccccccggcgcggcggcgcccctcctcctcccacacagcacacatgcgcacggcttcagctgcagttcatgaacacgactgaaggattgcaatggttctgttttttctgaatagcaccatgccaggactgccatccgagaaggagtcgatacccaacctcatcttgcgaggctttggcaccatcgaccgtgtgaaggcgaagctggagcaggcctgccctgaagtggtgtcatgtgccgatatcttggctctggtagcaagggacgtcgttgtactgaccaaagggcctcacggggatgttccaatctggcggagagatggtagaagatcggtgaagcaagatgcactggacaacctccacgcgcccttcttcgatgttggtcggaacatgtgccagttcttcatgcccaagggcctcaacgccaaggaccagattgttctgctagctgtgcatgagctataggtacccctccttggagaacatagggcttttgctgatggtgatgctgtattctgggataaggaatatgctcatgcattgaaatgttacactctagtacgtccttggttatctcctaatatttaacctgcatttatagttaccagtttagcacttcagaatatatctattgtcaagccgctgcatgtcgagaattctgatgaatttgataactagtgctggttttaccttactataaggccttgttcgtttccgtcggattgcacccggaatcgttccaactaatcaaaatttatataaattagagaagcaatccggtcaggaatcgttccgacccaccaatccagccgaaacgaacaagccctaatgattttccttatctttaacaatgtgcactcatacattagtgttcaaaaagaagcacataaaagtttcttcaaacatgctatgaaatttggtatcttattgttaaaccttgctttacctgctagtgtttatgcgcaaaattagaacttactgcctaatgtttatgattttaagattataatatttttgtcaatatgtgccaaaataaggtaacgttcatcctgaatcagcgattgtctaagcctgcagaagtgttagtaggaaccgtgctggggctgtatgaggacatcagatacaagtctgagtaaaaaaaagtgcacctgaaacaggttgatattattggactgggttctgggggttgatattattggactgggttctggtaccgaggtggaccagaaacttaagtatgctaatgatctttcctcgggtgtgatactcggaagagagcttgtgaaataagtgcatgcaccgctggtgcccaggtaaggggtcagcgccttttgttttctgccacctcacatacgtttcagtagttttgattgggtaatcatctgtatagacttcaccttgtgattcatcctgatatgtaataacgaattttgcacgtaaagacacataggtttgtcaggatgcatgcttgttagctgtttgcttatatgatcctgaaagcccttaagaggctttatttatggttaaaagctcgaacaattaaggatgtcagtgctggttctgatctcttcgaggtagaaccaacaaagtggtttcctgatagagctgcctcttgtatgctttgcacaatactttttcgtctaaaatttttgcacttgccatcattgctaattttgtggttattttcaaagggtagaagtttgatgcctactggtaagatactttacatctactgatttatgagccgtagaccggacaggagatgaagatgatgccttacatgaatgccaaggcaccgaacggtgaagcctgggtggccatcattactcacctattgatgcatttgttctcactaagacgtaggaattctttggactatgtatttagctcagaaatttctgtttctgtatgttgtacctcttatactaactcataattctttaccttacaatattcagatgactatat

SEQ ID NO: 214704 - DNA, 3462 bp, Zea Mays
ccatttagtgataaagctttggagtctgctgtacggcattcgcctccagcgacggccgcgcttacacgtagtggtgccactgctagaatttgtcaggaacacaagcacacaagaatccgaaaatgaaaggcagcagccagcagggaacacgccgggcctggaactgggtcagtgccgtctacaggtggtggacgcagtcgtatgtgttgatgtcgtctgccgtgcacctgaggtccaagcgccgccgcccgcacgagtgctgctcgccgcgcgcctgagcgccatccgcagttcgttcaggccgcctaggccgcacgtccgactcccgagcgctgccaaccacacacctaaacgcgccgctcacgcccatcagcttcctcgagcgcaccacgctcgtctaccccgaccgcccctccatcgtcgccgctggacacgacgccgcgccgccgccccgcacctggcggcagacccgggactgctgcctccgcctcgccgccgcgctcgcggggctcggcgtcgcgcgccgtgacgtggttgcggtgttcgcgcagaacatcccggccttctgcgagctccacttcggcattcccatggcgggcgccgtgatctgcgcgctcaactcgcggctcgacgccggcatggcgtccgtgctgctgcagcactcggaggccaaggtcgtgttcgtggacgccgtgctgctgggcgtcgcccgggaagcgctccgcttcatctcccagcaggccggcggagcgagcagggtacccgccgtggtgctaatcaacggggcgctcgacgagccgccgccagcggcgacaggaaacaacaagatcccaggcgtcgatcgatgctacgagtacgaggccctcctcagcaacagcagaggcggcgatccagagttcttgatccggtggccggacgatgagaacgagccgatcgcgctggatctgcgtgcaggggcggtgaatcgcggggaggggcgctggatctgcgggcggtgaatcgcggggggggggggggggcggtgaatcgcggggaggggcgctggatctgcgggcggtgaatcgcggggggggggggggggcggtgaatcgtggggaggggcgctggatctgcgggcggtgggtgaatcgcggggggcggggggcgctggatccgcgtgcgggctgacgtgagcgctgagcgggattcgcggcgtggacgttgaggcgggggcagtctacgctccactcttaatagttgtagagatgttatcggctatgtgcactctagttgtgtagaggatggcttccatgttgtatctgcgtgatgctaactcttgagggcgtttagtttgtgaatgtgataatgcagtagcgccggatcttttcttcgcgcccgtgtcgcgagacggctccgctagcagttacgtgttcgcgcgcaagccgccaccaccaccagtctgtcccgttccccacctcaccctcttcttccctatactcgggctacacctgcgaccactgctcacctgtcgcggccatgactcccgcatccacctcccctctcgccgccgccgtcctgcccacgaacttatcttccttctctcgctgcccacctcgccgcctcccgcgcatctcctgcctggcagcgcccgaacgcgggggcaacaatgcgtcgaacgcctcgccggcaccgcagcagccgaggtggggtgccgcggtatccgccgcgctcgcggcggccgtggttgccgcctctatgccagcttacgcggacctgaacaagtttgaggccgagcagcggggcgaatttggcattggctctgccgcgcagttcggctcggccgatctcaagaaggctgtccacgttaacgagaacttcaggcgggccaacttcacatccgctgatatgagagagtcagatttcagtggttccacattcaatggtgcctatcttgaaaaggctgttgcttataaggcaaatttcactggtgctgatttgagtgatacattaatggaccgcatggttctgaatgaagctaaccttacaaatgctgttcttgtacggtcagtcctcacacgtagtgatcttggaggagccatcattgaaggtgctgacttcagtgatgctgttattgacctatcacagaaacaggcattatgcaaatatgcaagtgggaccaaccccatgacaggggtgagcactcgaaaaagcctaggatgtggcaatagccgtcgaaatgcatatgggagcccttcatcccctctgttgagtgccccgccacagaagatccttgaccgagatggtttctgtgatccagctactggtatgtgcgatgcaagctgagaggtttgatccaacatggaaactggtcaatggatggtgtacatacattggagattgagtaagagcagaacagtgcagagaaacaagtcgtttttcttttcctcttgccattgttgtaacattgcaacacggaatcaggtaaaattcaggatgtagatgagatatgcacgctgagtactgaatggcatgtatagcatagtatgtatacgaaaatagatcatatcaatcatgtgcttcatgcttgaaaggagtggcccctgccttgttctaaagccaacatagccaaaagcagaagttcaacagaggagtgtctcagcaaataaactttccactccatttcacaaacattgctgatgcatcggcagcaaccagagctgccgttctggatgaaccgcacaaatagacgtccatcgacagcttgactgtttgtgcagattgtcaggtcagttgctgaagtccctccttagcttcagctttcagctagctaccttgttaacatcaggtcctgaaacctgatatcaaataacaatatatatatatataaccacttcggttacatgtttattatgcatatggagatttttcatgtgccatgacacgcattgcatgatacatatttgtacactaataaatcaggtgtgggaggcatattttatatatatgaattgtatagggcttccaatggattcatgtacgttgtgtagtagctacttccacatgctcgcctcgccgtccccagaggcagatgtagaggcgaagtccagtgcttcttccggctgcctgttctcagactgaaatgcctgcgccgggctggagtaagcggtctctttcgctgtgtcatcgccgccgtggctgacgagctgagacgcgacgaacttgtcgagcactctccagtcggtgaccgagtcgtccatgtaagcggcttccgtcatcggcagttgccgcgcggtgtacccagaagcatcgtcgggggactggaggctgcagctgccctgggcggcgatgtaggcgggaggaggcttggggctctccaactgtgggagctgctgcaagaaggcgtcttggctgggcagaaggtgatggtactccagctccggcttgcagtggtagagctgctgctggccgctgtacaccgccgct

SEQ ID NO: 214705 - DNA, 2295 bp, Zea Mays
gcggggggcggggggcgctggatccgcgtgcgggctgacgtgagcgctgagcgggattcgcggcgtggacgttgaggcgggggcagtctacgctccactcttaatagttgtagagatgttatcggctatgtgcactctagttgtgtagaggatggcttccatgttgtatctgcgtgatgctaactcttgagggcgtttagtttgtgaatgtgataatgcagtagcgccggatcttttcttcgcgcccgtgtcgcgagacggctccgctagcagttacgtgttcgcgcgcaagccgccaccaccaccagtctgtcccgttccccacctcaccctcttcttccctatactcgggctacacctgcgaccactgctcacctgtcgcggccatgactcccgcatccacctcccctctcgccgccgccgtcctgcccacgaacttatcttccttctctcgctgcccacctcgccgcctcccgcgcatctcctgcctggcagcgcccgaacgcgggggcaacaatgcgtcgaacgcctcgccggcaccgcagcagccgaggtggggtgccgcggtatccgccgcgctcgcggcggccgtggttgccgcctctatgccagcttacgcggacctgaacaagtttgaggccgagcagcggggcgaatttggcattggctctgccgcgcagttcggctcggccgatctcaagaaggctgtccacgttaacgagaacttcagatttcagtggttccacattcaatggtgcctatcttgaaaaggctgttgcttataaggcaaatttcactggtgctgatttgagtgatacattaatggaccgcatggttctgaatgaagctaaccttacaaatgctgttcttgtacggtcagtcctcacacgtagtgatcttggaggagccatcattgaaggtgctgacttcagtgatgctgttattgacctatcacagaaacaggcattatgcaaatatgcaagtgggaccaaccccatgacaggggtgagcactcgaaaaagcctaggatgtggcaatagccgtcgaaatgcatatgggagcccttcatcccctctgttgagtgccccgccacagaagatccttgaccgagatggtttctgtgatccagctactggtatgtgcgatgcaagctgagaggtttgatccaacatggaaactggtcaatggatggtgtacatacattggagattgagtaagagcagaacagtgcagagaaacaagtcgtttttcttttcctcttgccattgttgtaacattgcaacacggaatcaggtaaaattcaggatgtagatgagatatgcacgctgagtactgaatggcatgtatagcatagtatgtatacgaaaatagatcatatcaatcatgtgcttcatgcttgaaaggagtggcccctgccttgttctaaagccaacatagccaaaagcagaagttcaacagaggagtgtctcagcaaataaactttccactccatttcacaaacattgctgatgcatcggcagcaaccagagctgccgttctggatgaaccgcacaaatagacgtccatcgacagcttgactgtttgtgcagattgtcaggtcagttgctgaagtccctccttagcttcagctttcagctagctaccttgttaacatcaggtcctgaaacctgatatcaaataacaatatatatatatataaccacttcggttacatgtttattatgcatatggagatttttcatgtgccatgacacgcattgcatgatacatatttgtacactaataaatcaggtgtgggaggcatattttatatatatgaattgtatagggcttccaatggattcatgtacgttgtgtagtagctacttccacatgctcgcctcgccgtccccagaggcagatgtagaggcgaagtccagtgcttcttccggctgcctgttctcagactgaaatgcctgcgccgggctggagtaagcggtctctttcgctgtgtcatcgccgccgtggctgacgagctgagacgcgacgaacttgtcgagcactctccagtcggtgaccgagtcgtccatgtaagcggcttccgtcatcggcagttgccgcgcggtgtacccagaagcatcgtcgggggactggaggctgcagctgccctgggcggcgatgtaggcgggaggaggcttggggctctccaactgtgggagctgctgcaagaaggcgtcttggctgggcagaaggtgatggtactccagctccggcttgcagtggtagagctgctgctggccgctgtacaccgccgct

SEQ ID NO: 214706 - DNA, 3309 bp, Zea Mays
gcggggggcggggggcgctggatccgcgtgcgggctgacgtgagcgctgagcgggattcgcggcgtggacgttgaggcgggggcagtctacgctccactcttaatagttgtagagatgttatcggctatgtgcactctagttgtgtagaggatggcttccatgttgtatctgcgtgatgctaactcttgagggcgtttagtttgtgaatgtgataatgcagtagcgccggatcttttcttcgcgcccgtgtcgcgagacggctccgctagcagttacgtgttcgcgcgcaagccgccaccaccaccagtctgtcccgttccccacctcaccctcttcttccctatactcgggctacacctgcgaccactgctcacctgtcgcggccatgactcccgcatccacctcccctctcgccgccgccgtcctgcccacgaacttatcttccttctctcgctgcccacctcgccgcctcccgcgcatctcctgcctggcagcgcccgaacgcgggggcaacaatgcgtcgaacgcctcgccggcaccgcagcagccgaggtggggtgccgcggtatccgccgcgctcgcggcggccgtggttgccgcctctatgccagcttacgcggacctgaacaagtttgaggccgagcagcggggcgaatttggcattggctctgccgcgcagttcggctcggccgatctcaagtatgccagcacctctgcttcttcatctcttcttcatgaccattttgttgttacattgcctaggtaatttgctttgttttaatggtcttacaggaaggctgtccacgttaacgagaacttcaggtgggtccttaatttcacttgtaccgagttagaatcccctagtttttcaatggcaacattaaaggaatagttagtagaaaggaaatatattttcaacttcgataattataccggatataacttagcttgctttctgcctgtttcggtctgatgtgattttggccgtatggaaatttaagtattagcgataaacttcacggatataacgatggcagttgtgagtttataaactgaattgtttccaaaatagtccagcattgtgtgtgtatgcattttatgagcattgctttaactcatagttacaagttactagatggaaacaacttgttgtatgaaatgcctatttatggagaaagtgtgtaacaaatatgctacagaattactataacgccccgtttggatccttggaattgaattccattctaataatagtaatttagacacatatcaattaagttaatttggttttatacaaaatatattgtatactattattagcataatgtcggggatatttatgtgctacatttttactatggatgagtgagtcgtagagcgtcaagttgtagagtagaaacaaattctactgatacataaaatcatttcacgtcctctaccctattaatttgagatatgcttatatctgaactttagaaagtggtggaatgttaaattccaaggtaatatgttactttattaagtaaattccaattcctccaaaatgaatgaatccaaacgacccgtaactgtaagtacagtgttgtcaaaccagaataagagtaattatctgtgatatggataaggtcataaggataactaaaggaacaatagttttttctattcctcatctctcatttacataatgcatcatttgttgctttaggcgggccaacttcacatccgctgatatgagagagtcagatttcagtggttccacattcaatggtgcctatcttgaaaaggctgttgcttataaggcaaatttcactggtgctgatttgagtgatacattaatggaccgcatggttctgaatgaagctaaccttacaaatgctgttcttgtacggtcagtcctcacacgtagtgatcttggaggagccatcattgaaggtgctgacttcagtgatgctgttattgacctatcacagaaacaggcattatgcaaatatgcaagtgggaccaaccccatgacaggggtgagcactcgaaaaagcctaggatgtggcaatagccgtcgaaatgcatatgggagcccttcatcccctctgttgagtgccccgccacagaagatccttgaccgagatggtttctgtgatccagctactggtatgtgcgatgcaagctgagaggtttgatccaacatggaaactggtcaatggatggtgtacatacattggagattgagtaagagcagaacagtgcagagaaacaagtcgtttttcttttcctcttgccattgttgtaacattgcaacacggaatcaggtaaaattcaggatgtagatgagatatgcacgctgagtactgaatggcatgtatagcatagtatgtatacgaaaatagatcatatcaatcatgtgcttcatgcttgaaaggagtggcccctgccttgttctaaagccaacatagccaaaagcagaagttcaacagaggagtgtctcagcaaataaactttccactccatttcacaaacattgctgatgcatcggcagcaaccagagctgccgttctggatgaaccgcacaaatagacgtccatcgacagcttgactgtttgtgcagattgtcaggtcagttgctgaagtccctccttagcttcagctttcagctagctaccttgttaacatcaggtcctgaaacctgatatcaaataacaatatatatatatataaccacttcggttacatgtttattatgcatatggagatttttcatgtgccatgacacgcattgcatgatacatatttgtacactaataaatcaggtgtgggaggcatattttatatatatgaattgtatagggcttccaatggattcatgtacgttgtgtagtagctacttccacatgctcgcctcgccgtccccagaggcagatgtagaggcgaagtccagtgcttcttccggctgcctgttctcagactgaaatgcctgcgccgggctggagtaagcggtctctttcgctgtgtcatcgccgccgtggctgacgagctgagacgcgacgaacttgtcgagcactctccagtcggtgaccgagtcgtccatgtaagcggcttccgtcatcggcagttgccgcgcggtgtacccagaagcatcgtcgggggactggaggctgcagctgccctgggcggcgatgtaggcgggaggaggcttggggctctccaactgtgggagctgctgcaagaaggcgtcttggctgggcagaaggtgatggtactccagctccggcttgcagtggtagagctgctgctggccgctgtacaccgccgct

SEQ ID NO: 214707 - DNA, 3022 bp, Zea Mays
gggccggcgtcgagtggagatccaatcgaaaatcgaactgacttcatcttctgttggtcaacaggagagcccgttgaaatcctggacctctcaattgtccttttctctctccccgcccaccttcccctgttctgccgcctccccagtccggcgtgcatcagcagcgacatcagagtcggcgatgggaggcgtcatcgacgttctcgtccccttatgttgatgaagtggtgtgccgtggagattccttgaccgatttcttgccggtaagacggagtctgccatctgcgtggctggtcatcgcggtgagcaaggaacgacgaagtgcgcccctccgcccttcggctcgtcgttgtgccttgcgtcgtcgggtggagttccttcccctgcttcaagctaattcggtttttccctctcatcctgtcagttttctctttgttggcattttcggttctctgctgtgaggttttttaaggtgattttgttcgcatctgtgatttgtgtctctgtgttcatcgtttgatgagggattcgatgccaaattcatttgaatcgattacaggaaatcatgcaaaaaatcaaacacatacctgtagaattgcgttggattggattccaaaaaataatgaaggaaaaaggaaaaacaaatctgatccgattttgtggcctgcatgcttactaacttcgtttttaagaggctccaggaaaatgtaattttgggtagggtttgtcaagcggtggtgcctgaatgtatcttctcctgtcacctccctcctttcacattagagttattgggtctacctttactgggtctactcctggatcctgctctatttaattatccttttttgtgccaaagcagccaaaccgccaatcaccacaaattgtagattaatgtttccagcattagcttgctgctcctggttccatacctgcaatcagttgcaaatacaccatgttttgtactaccccctcccccaattaaactttataattaaatgaaaaagtgtaggagtttgcctagtgaccacaaagcattttttggtgcattggaatcttgtgtatgcttgaatttaaaattatgaattcaaatgttgttgaattacatgcaggacccataaactttgaattattatgatgtgaaaaatgatttataatacagtatgtgcacaagtgtagatagatataagaaaatgaaatataggggaagggatcattggtagtgtcaccctaaagtgctggaaaagttttaaggtgcttcccatagaacaacttcttgggggagcactattggtatggaattgctcttattcagtttttttggggtttctgaggatcctccatgtcccctagattattgacctcactttgttctttgtatcgatttattgttgtaggcagttataatagtaggaggtatgcgtgctttgtagaatcatacagatgcttgttgaacatgtgtctttgtttctgtgtctgtgtcaacaagatgttctagcatcaacaagatcctgattagcatgtcaacttccagacaaaaagagtagagcagcaaaatggagaaccatggaaaattggatgggtgggatgaagttctggaagaagaagatgagttagcgagtggggcaaaagtgtaaagaagcctagattctcattacgaggatatgattttgttccattagatgttaagactgataacttgtgcattggggagcaagatggttcttctgcagtgccatcaactaaagcttcacaaaccatggtggctgaacggttggaaaacgttgaggaacaaactgaagatttggcaccagagtttgcccttccacccaaagcaaatactttagtttctgagctgctagataatttacagcgtaggggtggttcttttgtcaggacaccatctttgttgcaccaacatgctccaagcatatcaatcagggagcaggaagtttcatccggagtgccaccaactaaagcttcacaagctttgatggatgaaccgtttgaaaatgacaatggacaaactgaagagttgccatcagagctcccctgctcgatcaagagaccaaaattttcagttgcagaacttctagaagacctacagggtagaagtggttcttatgttgagacagcatctttgtcacaccaacacaccagagctaaacattggaagccaaagttcctttcttccgagaagaaaacaatagctattctaggagacaggagtattgacagtgaggaccccttggagcatgtaattgacggaacatctagcgaggaggaagatgctactcaaaaccacttgagtttggtgaacaaagatgagaaccagcaaactatggctgacctatttcaagaagtttttaatccaacaaacatggatggtgccatgaaatcaatgagatcaacaggagctggtaactatggaagaatgcaacagattatgcacatggagaaagattggcatgtggaattctcgaggcagtatagcagagagcacaattatgtcaaggtcattggaaggaaagctaacagtctgcagctgcatgttccaggaaaagggcaatgatgccactataagtaatgcctcagcagacggcaccatggatgaaagcagaactaggaggactattatcttcagtccaaagatatgtaacaatgtagatcttctggttggaaacataattcatatcttcccaccatggaaggaagttaaaatacaagaagagcatgtgattatttgcacctacttctcgcaccaccaccggacttgatactcggagatatttctgtgctagctgcaaagctagaggcagaccgccagcataaccgttgctgacagtttaatgttgatgtactcgcagggtctattctgtttgttttgtaatcacaagtgtactggctgcaaagctataggcagaccgcaagcataaccgttcctgatagcctaatgctgatgtacttgcagtctctcttctgttttacaatcacaagttactgaggcctagttcggattctctaa

SEQ ID NO: 214708 - DNA, 3198 bp, Zea Mays
gggccggcgtcgagtggagatccaatcgaaaatcgaactgacttcatcttctgttggtcaacaggagagcccgttgaaatcctggacctctcaattgtccttttctctctccccgcccaccttcccctgttctgccgcctccccagtccggcgtgcatcagcagcgacatcagagtcggcgatgggaggcgtcatcgacgttctcgtccccttatgttgatgaagtggtgtgccgtggagattccttgaccgatttcttgccggtaagacggagtctgccatctgcgtggctggtcatcgcggtgagcaaggaacgacgaagtgcgcccctccgcccttcggctcgtcgttgtgccttgcgtcgtcgggtggagttccttcccctgcttcaagctaattcggtttttccctctcatcctgtcagttttctctttgttggcattttcggttctctgctgtgaggttttttaaggtgattttgttcgcatctgtgatttgtgtctctgtgttcatcgtttgatgagggattcgatgccaaattcatttgaatcgattacaggaaatcatgcaaaaaatcaaacacatacctgtagaattgcgttggattggattccaaaaaataatgaaggaaaaaggaaaaacaaatctgatccgattttgtggcctgcatgcttactaacttcgtttttaagaggctccaggaaaatgtaattttgggtagggtttgtcaagcggtggtgcctgaatgtatcttctcctgtcacctccctcctttcacattagagttattgggtctacctttactgggtctactcctggatcctgctctatttaattatccttttttgtgccaaagcagccaaaccgccaatcaccacaaattgtagattaatgtttccagcattagcttgctgctcctggttccatacctgcaatcagttgcaaatacaccatgttttgtactaccccctcccccaattaaactttataattaaatgaaaaagtgtaggagtttgcctagtgaccacaaagcattttttggtgcattggaatcttgtgtatgcttgaatttaaaattatgaattcaaatgttgttgaattacatgcaggacccataaactttgaattattatgatgtgaaaaatgatttataatacagtatgtgcacaagtgtagatagatataagaaaatgaaatataggggaagggatcattggtagtgtcaccctaaagtgctggaaaagttttaaggtgcttcccatagaacaacttcttgggggagcactattggtatggaattgctcttattcagtttttttggggtttctgaggatcctccatgtcccctagattattgacctcactttgttctttgtatcgatttattgttgtaggcagttataatagtaggaggtatgcgtgctttgtagaatcatacagatgcttgttgaacatgtgtctttgtttctgtgtctgtgtcaacaagatgttctagcatcaacaagatcctgattagcatgtcaacttccagacaaaaagagtagagcagcaaaatggagaaccatggaaaattggatgggtgggatgaagttctggaagaagaagatgagttagcgagtgtatgcaaatatcctattagcacatcgtacctttcttatggaacaagcagaagtatgttatctcatttccagcatctctcctcttagagagaatgttgtgagcaaaggaggactttgttttgttaaactataccaggtggacaatctaatgcgtgtcctctgtttccatactgcagggggcaaaagtgtaaagaagcctagattctcattacgaggatatgattttgttccattagatgttaagactgataacttgtgcattggggagcaagatggttcttctgcagtgccatcaactaaagcttcacaaaccatggtggctgaacggttggaaaacgttgaggaacaaactgaagatttggcaccagagtttgcccttccacccaaagcaaatactttagtttctgagctgctagataatttacagcttgcaccaacatgctccaagcatatcaatcagggagcaggaagtttcatccggagtgccaccaactaaagcttcacaagctttgatggatgaaccgtttgaaaatgacaatggacaaactgaagagttgccatcagagctcccctgctcgatcaagagaccaaaattttcagttgcagaacttctagaagacctacagggtagaagtggttcttatgttgagacagcatctttgtcacaccaacacaccagagctaaacattggaagccaaagttcctttcttccgagaagaaaacaatagctattctaggagacaggagtattgacagtgaggaccccttggagcatgtaattgacggaacatctagcgaggaggaagatgctactcaaaaccacttgagtttggtgaacaaagatgagaaccagcaaactatggctgacctatttcaagaagtttttaatccaacaaacatggatggtgccatgaaatcaatgagatcaacaggagctggtaactatggaagaatgcaacagattatgcacatggagaaagattggcatgtggaattctcgaggcagtatagcagagagcacagttattcaggtgatttaaagggaactactgttcagattatgtcaaggtcattggaaggaaagctaacagtctgcagctgcatgttccaggaaaagggcaatgatgccactataagtaatgcctcagcagacggcaccatggatgaaagcagaactaggaggactattatcttcagtccaaagatatgtaacaatgtagatcttctggttggaaacataattcatatcttcccaccatggaaggaagttaaaatacaagaagagcatgtgattatttgcacctacttctcgcaccaccaccggacttgatactcggagatatttctgtgctagctgcaaagctagaggcagaccgccagcataaccgttgctgacagtttaatgttgatgtactcgcagggtctattctgtttgttttgtaatcacaagtgtactggctgcaaagctataggcagaccgcaagcataaccgttcctgatagcctaatgctgatgtacttgcagtctctcttctgttttacaatcacaagttactgaggcctagttcggattctctaa

SEQ ID NO: 214709 - DNA, 1944 bp, Zea Mays
gggccggcgtcgagtggagatccaatcgaaaatcgaactgacttcatcttctgttggtcaacaggagagcccgttgaaatcctggacctctcaattgtccttttctctctccccgcccaccttcccctgttctgccgcctccccagtccggcgtgcatcagcagcgacatcagagtcggcgatgggaggcgtcatcgacgttctcgtccccttatgttgatgaagtggtgtgccgtggagattccttgaccgatttcttgccggtaagacggagtctgccatctgcgtggctggtcatcgcggtgagcaaggaacgacgaagtgcgcccctccgcccttcggctcgtcgttgtgccttgcgtcgtcgggtggagttccttcccctgcttcaagctaattcgacaaaaagagtagagcagcaaaatggagaaccatggaaaattggatgggtgggatgaagttctggaagaagaagatgagttagcgagtgtatgcaaatatcctattagcacatcgtacctttcttatggaacaagcagaaggggcaaaagtgtaaagaagcctagattctcattacgaggatatgattttgttccattagatgttaagactgataacttgtgcattggggagcaagatggttcttctgcagtgccatcaactaaagcttcacaaaccatggtggctgaacggttggaaaacgttgaggaacaaactgaagatttggcaccagagtttgcccttccacccaaagcaaatactttagtttctgagctgctagataatttacagcgtaggggtggttcttttgtcaggacaccatctttgttgcaccaacatgctccaagcatatcaatcagggagcaggaagtttcatccggagtgccaccaactaaagcttcacaagctttgatggatgaaccgtttgaaaatgacaatggacaaactgaagagttgccatcagagctcccctgctcgatcaagagaccaaaattttcagttgcagaacttctagaagacctacagggtagaagtggttcttatgttgagacagcatctttgtcacaccaacacaccagagctaaacattggaagccaaagttcctttcttccgagaagaaaacaatagctattctaggagacaggagtattgacagtgaggaccccttggagcatgtaattgacggaacatctagcgaggaggaagatgctactcaaaaccacttgagtttggtgaacaaagatgagaaccagcaaactatggctgacctatttcaagaagtttttaatccaacaaacatggatggtgccatgaaatcaatgagatcaacaggagctggtaactatggaagaatgcaacagattatgcacatggagaaagattggcatgtggaattctcgaggcagtatagcagagagcacaattatgtcaaggtcattggaaggaaagctaacagtctgcagctgcatgttccaggaaaagggcaatgatgccactataagtaatgcctcagcagacggcaccatggatgaaagcagaactaggaggactattatcttcagtccaaagatatgtaacaatgtagatcttctggttggaaacataattcatatcttcccaccatggaaggaagttaaaatacaagaagagcatgtgattatttgcacctacttctcgcaccaccaccggacttgatactcggagatatttctgtgctagctgcaaagctagaggcagaccgccagcataaccgttgctgacagtttaatgttgatgtactcgcagggtctattctgtttgttttgtaatcacaagtgtactggctgcaaagctataggcagaccgcaagcataaccgttcctgatagcctaatgctgatgtacttgcagtctctcttctgttttacaatcacaagttactgaggcctagttcggattctctaa

SEQ ID NO: 214710 - DNA, 3790 bp, Zea Mays
gccgcagctgttcaccttcacccggcggcccgcgtgcgctgtctccccccaggccccccacctctctggctctctctctctctgcgagtctgcgacgacggggctaccgccgcctccgtacgccaggtgccgaggtcttcgttggtcctttcgccggcgacatccaccagaaattatatcatcaattcattaccgggtgtacatttgtacacagtacacccatgtccttcactggatccgcccctgtagtgaggataatatctttggagtttcggagggggcgcgctagaaggatggtttccaaaatgagatttcggaatgctctcggttctagaccatttcagtgttgttcgcgtgagaatcatacatatgtccggaagctgttggaccgagtgtcggagagatcaaagctccttaaaaaggtgtctgttttggtgggttacagtaatccacaagatttagttgagaaacaaagagcccctggggaatcttctgcagagttgattagtgccttgaaagaaatcgatttcccagaaattactgcaaagtttccatgcataaaagttggtgatgcatcacctgttgaactgtatgaggattctactaacatgaagtttaaagaagctgcactttctgaaaagctcacaaatttcatccaaggctcagctcgaaatttggagtcagcttatgaattccataatgactgtcatccattgaatcaaacacccacaactgcaggtgatctttcaatcagtgaagagatccctctcattgaaccaatagttgatacgaagtcccccgagtcattgtcagatgctataacctctgacaatagtatactggataaaagtataaggtgcttgcctggaacaactagtaggcaatatcgccagctagaggatggtggtttccatacggtccgcaaattattgcagcattttcctcggacttatgcagatctgcaaaaccctcaaggccccatagaatatgggcagtatattatgttatctggtactgttatatcttccaggggaatcaaggttaagtccactttaggtcttcttgaggtggttgttggttgttccataatcgagtctgaattgagctcttcagttgagagtagtcactctggagcagagcaaaagagaattcacttgcacctcaacagatttttcagtggcgcacgtttttcttcccaacattttcttaacttaatgtcagcaaagcacaaagaaggggatcttgtttatgttagtggtaagataaaaaaggtgcttgctaatggccattatgagttgaaggagtacacaattgacgctattgaaggagaaggggaacacagcactatgcttgctaggaaaccacaccctatatacccgtcgaaagcgggattaaaacctagtctgcttggcctttcaatctctagggccttgaagatattgagcccagatgttgatccagtgcctcccgatgttctcgttgaattcaacttgcctaatctctttgatgcttacatgggaattcacaaacctaaggatcgatctgaagctgattttgctcgaagaaggcttatatttgatgatttcttttacctccagttaggaagactatttcaaatgcttgaagcagttggtacgcgggttgagaaggaggaattgttatacaagtgcaaaagtcatgagctgaatactgttggtgtagatgattggtctcctcttacaaagaaattgttgagggctcttccttattggcttactcctagtcagttggatgctgttcaagagattatatgggatctcaggagaccagttcccatgaacagactcttgcagggggatgttggttgtggaaagaccattgttgctttcctggcatgtatggaggttgttaattcaggatttcaggctgctttcatggttccaacagaggtgcttgctgtccagcattatgaacacctaacttcattgctagagaagtttgatggagatgagaaaccaaatattgccttgctaactggttcaacgtccacaagggagtcaaggataattcgagatggtctgaaaactggagagataggcatggtcattggaacacactgcttaatagctgataaaactgaattttcagctttacgtatctctgttatagatgaacagcagcgctttggagttgtacagagaggcaggtttaacagtaagctatatacttcttcctcaaagttgagtggtgaaaatacaagttcagacgaggcttctgattctgaaacatttatggctccacacgttcttgcgatgtcagctacccctattccaagaacattggcacttgctttatatggtgatatgtctcttactcagatcacggacctgcctcctggaaggcaacctattaaaacccttgctcttgaaggaaatgatgtagggtttgaagctgtcttccagatgatgagggatgaactgatagacgggggcaaggtctaccttgtgtatcctatcatagatgagtctgagcacttgccacaactccgtgctgcaacagctggatttgattccataaagcaaaaattcgaaggctatccctgtgggctattacacggccgcatgaggagcgatgagaaggaagaaactctcaacagttttagaagcggagaaacacgcattctcctgtcgacacaggtgatcgagatcggggtcgatgttcctgatgcttccatgatggttgtcatgaacgctgagcgatttggaatctctcagctgcatcagctgcgagggagagtaggtcgcggtgagaggaaatccagatgcatattcctggcttcaacttcgagcacgctgccaaggctgaaggtgctcgagaagtcctccgatgggttttacctggctaatgcagacctgctgctccgtggccctggcaatctactaggtaaaaagcaatctggtcatcttccagaatttccaatagctagattggaggtcgatggtggtattttacaagaggcccatcttgccgctctgaaagtgctggtcgcaagcaacgacctagcgttgtatccacggctgaaggtggagctcagcatgaggcagccattgtgcattcttggagattgacatgtcaacagtactgctcgtaggctcgtagcattgggcgacgcgtgtactgtggataactattggtcgtaggctcgtagcgtcggcaaagttgacatgccgtctggtgagcgaggcgtgtaccatgaataactgttagactgattgtgtgagtgtgtgtgggctggtaccattgttaggctgccggttcattagggttagagttgagtctatatattgtaaccccttctctatgcaatacaatgatccacttcactattctacatgttattagactaggttagggttttctgaaacccacagtagccaccggtcgcctcccaccccacagcagccgccaccacctgagccgtcgtcgccctccaggaggctcctccctctcggggcggcacttgcccctggcgcggctgtgcatgggcgcggcccctcgtagctcggcgcgggagtggcagcccctggcctcgacggcgcgaggcgcgaccccctggcagtgtggacgcgacggtccgtccatggcggcgcggccacgccggccccggcgcgggaaacggctcggcggcgcacgacacggagcctcatcacgaggcaatggtggccacggcgccgccctggcggctggctcctccggcgaggtacagcctcggcgcgacctaggcgcgagcgtaggctcgtgggcctcctct

SEQ ID NO: 214711 - DNA, 3626 bp, Zea Mays
gccgcagctgttcaccttcacccggcggcccgcgtgcgctgtctccccccaggccccccacctctctggctctctctctctctgcgagtctgcgacgacggggctaccgccgcctccgtacgccaggtgccgaggtcttcgttggtcctttcgccggcgacatccaccagaaattatatcatcaattcattaccgggtgtacatttgtacacagtacacccatgtccttcactggatccgcccctgtagtgaggataatatctttggagtttcggagggggcgcgctagaaggatggtttccaaaatgagatttcggaatgctctcggttctagaccatttcagtgttgttcgcgtgagaatcatacatatgtccggaagctgttggaccgagtgtcggagagatcaaagctccttaaaaaggtgtctgttttggtgggttacagtaatccacaagatttagttgagaaacaaagagcccctggggaatcttctgcagagttgattagtgccttgaaagaaatcgatttcccagaaattactgcaaagtttccatgcataaaagttggtgatgcatcacctgttgaactgtatgaggattctactaacatgaagtttaaagaagctgcactttctgaaaagctcacaaatttcatccaaggctcagctcgaaatttggagtcagcttatgaattccataatgactgtcatccattgaatcaaacacccacaactgcaggtgatctttcaatcagtgaagagatccctctcattgaaccaatagttgatacgaagtcccccgagtcattgtcagatgctataacctctgacaatagtatactggataaaagtataaggtgcttgcctggaacaactagtaggcaatatcgccagctagaggatggtggtttccatacggtccgcaaattattgcagcattttcctcggacttatgcagatctgcaaaaccctcaaggccccatagaatatgggcagtatattatgttatctggtactgttatatcttccaggggaatcaaggttaagtccactttaggtcttcttgaggtggttgttggttgttccataatcgagtctgaattgagctcttcagttgagagtagtcactctggagcagagcaaaagagaattcacttgcacctcaacagatttttcagtggcgcacgtttttcttcccaacattttcttaacttaatgtcagcaaagcacaaagaaggggatcttgtttatgttagtggtaagggccttgaagatattgagcccagatgttgatccagtgcctcccgatgttctcgttgaattcaacttgcctaatctctttgatgcttacatgggaattcacaaacctaaggatcgatctgaagctgattttgctcgaagaaggcttatatttgatgatttcttttacctccagttaggaagactatttcaaatgcttgaagcagttggtacgcgggttgagaaggaggaattgttatacaagtgcaaaagtcatgagctgaatactgttggtgtagatgattggtctcctcttacaaagaaattgttgagggctcttccttattggcttactcctagtcagttggatgctgttcaagagattatatgggatctcaggagaccagttcccatgaacagactcttgcagggggatgttggttgtggaaagaccattgttgctttcctggcatgtatggaggttgttaattcaggatttcaggctgctttcatggttccaacagaggtgcttgctgtccagcattatgaacacctaacttcattgctagagaagtttgatggagatgagaaaccaaatattgccttgctaactggttcaacgtccacaagggagtcaaggataattcgagatggtctgaaaactggagagataggcatggtcattggaacacactgcttaatagctgataaaactgaattttcagctttacgtatctctgttatagatgaacagcagcgctttggagttgtacagagaggcaggtttaacagtaagctatatacttcttcctcaaagttgagtggtgaaaatacaagttcagacgaggcttctgattctgaaacatttatggctccacacgttcttgcgatgtcagctacccctattccaagaacattggcacttgctttatatggtgatatgtctcttactcagatcacggacctgcctcctggaaggcaacctattaaaacccttgctcttgaaggaaatgatgtagggtttgaagctgtcttccagatgatgagggatgaactgatagacgggggcaaggtctaccttgtgtatcctatcatagatgagtctgagcacttgccacaactccgtgctgcaacagctggatttgattccataaagcaaaaattcgaaggctatccctgtgggctattacacggccgcatgaggagcgatgagaaggaagaaactctcaacagttttagaagcggagaaacacgcattctcctgtcgacacaggtgatcgagatcggggtcgatgttcctgatgcttccatgatggttgtcatgaacgctgagcgatttggaatctctcagctgcatcagctgcgagggagagtaggtcgcggtgagaggaaatccagatgcatattcctggcttcaacttcgagcacgctgccaaggctgaaggtgctcgagaagtcctccgatgggttttacctggctaatgcagacctgctgctccgtggccctggcaatctactaggtaaaaagcaatctggtcatcttccagaatttccaatagctagattggaggtcgatggtggtattttacaagaggcccatcttgccgctctgaaagtgctggtcgcaagcaacgacctagcgttgtatccacggctgaaggtggagctcagcatgaggcagccattgtgcattcttggagattgacatgtcaacagtactgctcgtaggctcgtagcattgggcgacgcgtgtactgtggataactattggtcgtaggctcgtagcgtcggcaaagttgacatgccgtctggtgagcgaggcgtgtaccatgaataactgttagactgattgtgtgagtgtgtgtgggctggtaccattgttaggctgccggttcattagggttagagttgagtctatatattgtaaccccttctctatgcaatacaatgatccacttcactattctacatgttattagactaggttagggttttctgaaacccacagtagccaccggtcgcctcccaccccacagcagccgccaccacctgagccgtcgtcgccctccaggaggctcctccctctcggggcggcacttgcccctggcgcggctgtgcatgggcgcggcccctcgtagctcggcgcgggagtggcagcccctggcctcgacggcgcgaggcgcgaccccctggcagtgtggacgcgacggtccgtccatggcggcgcggccacgccggccccggcgcgggaaacggctcggcggcgcacgacacggagcctcatcacgaggcaatggtggccacggcgccgccctggcggctggctcctccggcgaggtacagcctcggcgcgacctaggcgcgagcgtaggctcgtgggcctcctct

SEQ ID NO: 214712 - DNA, 3757 bp, Zea Mays
gttcaccttcacccggcggcccgcgtgcgctgtctccccccaggccccccacctctctggctctctctctctctgcgagtctgcgacgacggggctaccgccgcctccgtacgccaggtgccgaggtcttcgttggtcctttcgccggcgacatccaccagaaattatatcatcaattcattaccgggtgtacatttgtacacagtacacccatgtccttcactggatccgcccctgtagtgaggataatatctttggagtttcggagggggcgcgctagaaggatggtttccaaaatgagatttcggaatgctctcggttctagaccatttcagtgttgttcgcgtgagaatcatacatatgtccggaagctgttggaccgagtgtcggagagatcaaagctccttaaaaaggtgtctgttttggtgggttacagtaatccacaagatttagttgagaaacaaagagcccctggggaatcttctgcagagttgattagtgccttgaaagaaatcgatttcccagaaattactgcaaagtttccatgcataaaagttggtgatgcatcacctgttgaactgtatgaggattctactaacatgaagtttaaagaagctgcactttctgaaaagctcacaaatttcatccaaggctcagctcgaaatttggagtcagcttatgaattccataatgactgtcatccattgaatcaaacacccacaactgcaggtgatctttcaatcagtgaagagatccctctcattgaaccaatagttgatacgaagtcccccgagtcattgtcagatgctataacctctgacaatagtatactggataaaagtataaggtgcttgcctggaacaactagtaggcaatatcgccagctagaggatggtggtttccatacggtccgcaaattattgcagcattttcctcggacttatgcagatctgcaaaaccctcaaggccccatagaatatgggcagtatattatgttatctggggaatcaaggttaagtccactttaggtcttcttgaggtggttgttggttgttccataatcgagtctgaattgagctcttcagttgagagtagtcactctggagcagagcaaaagagaattcacttgcacctcaacagatttttcagtggcgcacgtttttcttcccaacattttcttaacttaatgtcagcaaagcacaaagaaggggatcttgtttatgttagtgataaaaaaggtgcttgctaatggccattatgagttgaaggagtacacaattgacgctattgaaggagaaggggaacacagcactatgcttgctaggaaaccacaccctatatacccgtcgaaagcgggattaaaacctagtctgcttggcctttcaatctctagggccttgaagatattgagcccagatgttgatccagtgcctcccgatgttctcgttgaattcaacttgcctaatctctttgatgcttacatgggaattcacaaacctaaggatcgatctgaagctgattttgctcgaagaaggcttatatttgatgatttcttttacctccagttaggaagactatttcaaatgcttgaagcagttggtacgcgggttgagaaggaggaattgttatacaagtgcaaaagtcatgagctgaatactgttggtgtagatgattggtctcctcttacaaagaaattgttgagggctcttccttattggcttactcctagtcagttggatgctgttcaagagattatatgggatctcaggagaccagttcccatgaacagactcttgcagggggatgttggttgtggaaagaccattgttgctttcctggcatgtatggaggttgttaattcaggatttcaggctgctttcatggttccaacagaggtgcttgctgtccagcattatgaacacctaacttcattgctagagaagtttgatggagatgagaaaccaaatattgccttgctaactggttcaacgtccacaagggagtcaaggataattcgagatggtctgaaaactggagagataggcatggtcattggaacacactgcttaatagctgataaaactgaattttcagctttacgtatctctgttatagatgaacagcagcgctttggagttgtacagagaggcaggtttaacagtaagctatatacttcttcctcaaagttgagtggtgaaaatacaagttcagacgaggcttctgattctgaaacatttatggctccacacgttcttgcgatgtcagctacccctattccaagaacattggcacttgctttatatggtgatatgtctcttactcagatcacggacctgcctcctggaaggcaacctattaaaacccttgctcttgaaggaaatgatgtagggtttgaagctgtcttccagatgatgagggatgaactgatagacgggggcaaggtctaccttgtgtatcctatcatagatgagtctgagcacttgccacaactccgtgctgcaacagctggatttgattccataaagcaaaaattcgaaggctatccctgtgggctattacacggccgcatgaggagcgatgagaaggaagaaactctcaacagttttagaagcggagaaacacgcattctcctgtcgacacaggtgatcgagatcggggtcgatgttcctgatgcttccatgatggttgtcatgaacgctgagcgatttggaatctctcagctgcatcagctgcgagggagagtaggtcgcggtgagaggaaatccagatgcatattcctggcttcaacttcgagcacgctgccaaggctgaaggtgctcgagaagtcctccgatgggttttacctggctaatgcagacctgctgctccgtggccctggcaatctactaggtaaaaagcaatctggtcatcttccagaatttccaatagctagattggaggtcgatggtggtattttacaagaggcccatcttgccgctctgaaagtgctggtcgcaagcaacgacctagcgttgtatccacggctgaaggtggagctcagcatgaggcagccattgtgcattcttggagattgacatgtcaacagtactgctcgtaggctcgtagcattgggcgacgcgtgtactgtggataactattggtcgtaggctcgtagcgtcggcaaagttgacatgccgtctggtgagcgaggcgtgtaccatgaataactgttagactgattgtgtgagtgtgtgtgggctggtaccattgttaggctgccggttcattagggttagagttgagtctatatattgtaaccccttctctatgcaatacaatgatccacttcactattctacatgttattagactaggttagggttttctgaaacccacagtagccaccggtcgcctcccaccccacagcagccgccaccacctgagccgtcgtcgccctccaggaggctcctccctctcggggcggcacttgcccctggcgcggctgtgcatgggcgcggcccctcgtagctcggcgcgggagtggcagcccctggcctcgacggcgcgaggcgcgaccccctggcagtgtggacgcgacggtccgtccatggcggcgcggccacgccggccccggcgcgggaaacggctcggcggcgcacgacacggagcctcatcacgaggcaatggtggccacggcgccgccctggcggctggctcctccggcgaggtacagcctcggcgcgacctaggcgcgagcgtaggctcgtgggcctcctct

SEQ ID NO: 214713 - DNA, 3636 bp, Zea Mays
gttcaccttcacccggcggcccgcgtgcgctgtctccccccaggccccccacctctctggctctctctctctctgcgagtctgcgacgacggggctaccgccgcctccgtacgccaggtgccgaggtcttcgttggtcctttcgccggcgacatccaccagaaattatatcatcaattcattaccgggtgtacatttgtacacagtacacccatgtccttcactggatccgcccctgtagtgaggataatatctttggagtttcggagggggcgcgctagaaggatggtttccaaaatgagatttcggaatgctctcggttctagaccatttcagtgttgttcgcgtgagaatcatacatatgtccggaagctgttggaccgagtgtcggagagatcaaagctccttaaaaaggtgtctgttttggtgggttacagtaatccacaagatttagttgagaaacaaagagcccctggggaatcttctgcagagttgattagtgccttgaaagaaatcgatttcccagaaattactgcaaagtttccatgcataaaagttggtgatgcatcacctgttgaactgtatgaggattctactaacatgaagtttaaagaagctgcactttctgaaaagctcacaaatttcatccaaggctcagctcgaaatttggagtcagcttatgaattccataatgactgtcatccattgaatcaaacacccacaactgcaggtgatctttcaatcagtgaagagatccctctcattgaaccaatagttgatacgaagtcccccgagtcattgtcagatgctataacctctgacaatagtatactggataaaagtataaggtgcttgcctggaacaactagtaggcaatatcgccagctagaggatggtggtttccatacggtccgcaaattattgcagcattttcctcggacttatgcagatctgcaaaaccctcaaggccccatagaatatgggcagtatattatgttatctggtactgttatatcttccagataaaaaaggtgcttgctaatggccattatgagttgaaggagtacacaattgacgctattgaaggagaaggggaacacagcactatgcttgctaggaaaccacaccctatatacccgtcgaaagcgggattaaaacctagtctgcttggcctttcaatctctagggccttgaagatattgagcccagatgttgatccagtgcctcccgatgttctcgttgaattcaacttgcctaatctctttgatgcttacatgggaattcacaaacctaaggatcgatctgaagctgattttgctcgaagaaggcttatatttgatgatttcttttacctccagttaggaagactatttcaaatgcttgaagcagttggtacgcgggttgagaaggaggaattgttatacaagtgcaaaagtcatgagctgaatactgttggtgtagatgattggtctcctcttacaaagaaattgttgagggctcttccttattggcttactcctagtcagttggatgctgttcaagagattatatgggatctcaggagaccagttcccatgaacagactcttgcagggggatgttggttgtggaaagaccattgttgctttcctggcatgtatggaggttgttaattcaggatttcaggctgctttcatggttccaacagaggtgcttgctgtccagcattatgaacacctaacttcattgctagagaagtttgatggagatgagaaaccaaatattgccttgctaactggttcaacgtccacaagggagtcaaggataattcgagatgcaagctgttctccctagttctttcactcactctcaagttccacatgcatatattaatatctccgctctattcgtattctattacagggtctgaaaactggagagataggcatggtcattggaacacactgcttaatagctgataaaactgaattttcagctttacgtatctctgttatagatgaacagcagcgctttggagttgtacagagaggcaggtttaacagtaagctatatacttcttcctcaaagttgagtggtgaaaatacaagttcagacgaggcttctgattctgaaacatttatggctccacacgttcttgcgatgtcagctacccctattccaagaacattggcacttgctttatatggtgatatgtctcttactcagatcacggacctgcctcctggaaggcaacctattaaaacccttgctcttgaaggaaatgatgtagggtttgaagctgtcttccagatgatgagggatgaactgatagacgggggcaaggtctaccttgtgtatcctatcatagatgagtctgagcacttgccacaactccgtgctgcaacagctggatttgattccataaagcaaaaattcgaaggctatccctgtgggctattacacggccgcatgaggagcgatgagaaggaagaaactctcaacagttttagaagcggagaaacacgcattctcctgtcgacacaggtgatcgagatcggggtcgatgttcctgatgcttccatgatggttgtcatgaacgctgagcgatttggaatctctcagctgcatcagctgcgagggagagtaggtcgcggtgagaggaaatccagatgcatattcctggcttcaacttcgagcacgctgccaaggctgaaggtgctcgagaagtcctccgatgggttttacctggctaatgcagacctgctgctccgtggccctggcaatctactaggtaaaaagcaatctggtcatcttccagaatttccaatagctagattggaggtcgatggtggtattttacaagaggcccatcttgccgctctgaaagtgctggtcgcaagcaacgacctagcgttgtatccacggctgaaggtggagctcagcatgaggcagccattgtgcattcttggagattgacatgtcaacagtactgctcgtaggctcgtagcattgggcgacgcgtgtactgtggataactattggtcgtaggctcgtagcgtcggcaaagttgacatgccgtctggtgagcgaggcgtgtaccatgaataactgttagactgattgtgtgagtgtgtgtgggctggtaccattgttaggctgccggttcattagggttagagttgagtctatatattgtaaccccttctctatgcaatacaatgatccacttcactattctacatgttattagactaggttagggttttctgaaacccacagtagccaccggtcgcctcccaccccacagcagccgccaccacctgagccgtcgtcgccctccaggaggctcctccctctcggggcggcacttgcccctggcgcggctgtgcatgggcgcggcccctcgtagctcggcgcgggagtggcagcccctggcctcgacggcgcgaggcgcgaccccctggcagtgtggacgcgacggtccgtccatggcggcgcggccacgccggccccggcgcgggaaacggctcggcggcgcacgacacggagcctcatcacgaggcaatggtggccacggcgccgccctggcggctggctcctccggcgaggtacagcctcggcgcgacctaggcgcgagcgtaggctcgtgggcctcctct

SEQ ID NO: 214714 - DNA, 3849 bp, Zea Mays
gttcaccttcacccggcggcccgcgtgcgctgtctccccccaggccccccacctctctggctctctctctctctgcgagtctgcgacgacggggctaccgccgcctccgtacgccaggtgccgaggtcttcgttggtcctttcgccggcgacatccaccagaaattatatcatcaattcattaccgggtgtacatttgtacacagtacacccatgtccttcactggatccgcccctgtagtgaggataatatctttggagtttcggagggggcgcgctagaaggatggtttccaaaatgagatttcggaatgctctcggttctagaccatttcagtgttgttcgcgtgagaatcatacatatgtccggaagctgttggaccgagtgtcggagagatcaaagctccttaaaaaggtgtctgttttggtgggttacagtaatccacaagatttagttgagaaacaaagagcccctggggaatcttctgcagagttgattagtgccttgaaagaaatcgatttcccagaaattactgcaaagtttccatgcataaaagttggtgatgcatcacctgttgaactgtatgaggattctactaacatgaagtttaaagaagctgcactttctgaaaagctcacaaatttcatccaaggctcagctcgaaatttggagtcagcttatgaattccataatgactgtcatccattgaatcaaacacccacaactgcaggtgatctttcaatcagtgaagagatccctctcattgaaccaatagttgatacgaagtcccccgagtcattgtcagatgctataacctctgacaatagtatactggataaaagtataaggtgcttgcctggaacaactagtaggcaatatcgccagctagaggatggtggtttccatacggtccgcaaattattgcagcattttcctcggacttatgcagatctgcaaaaccctcaaggccccatagaatatgggcagtatattatgttatctggggaatcaaggttaagtccactttaggtcttcttgaggtggttgttggttgttccataatcgagtctgaattgagctcttcagttgagagtagtcactctggagcagagcaaaagagaattcacttgcacctcaacagatttttcagtggcgcacgtttttcttcccaacattttcttaacttaatgtcagcaaagcacaaagaaggggatcttgtttatgttagtggtaagataaaaaaggtgcttgctaatggccattatgagttgaaggagtacacaattgacgctattgaaggagaaggggaacacagcactatgcttgctaggaaaccacaccctatatacccgtcgaaagcgggattaaaacctagtctgcttggcctttcaatctctagggccttgaagatattgagcccagatgttgatccagtgcctcccgatgttctcgttgaattcaacttgcctaatctctttgatgcttacatgggaattcacaaacctaaggatcgatctgaagctgattttgctcgaagaaggcttatatttgatgatttcttttacctccagttaggaagactatttcaaatgcttgaagcagttggtacgcgggttgagaaggaggaattgttatacaagtgcaaaagtcatgagctgaatactgttggtgtagatgattggtctcctcttacaaagaaattgttgagggctcttccttattggcttactcctagtcagttggatgctgttcaagagattatatgggatctcaggagaccagttcccatgaacagactcttgcagggggatgttggttgtggaaagaccattgttgctttcctggcatgtatggaggttgttaattcaggatttcaggctgctttcatggttccaacagaggtgcttgctgtccagcattatgaacacctaacttcattgctagagaagtttgatggagatgagaaaccaaatattgccttgctaactggttcaacgtccacaagggagtcaaggataattcgagatgcaagctgttctccctagttctttcactcactctcaagttccacatgcatatattaatatctccgctctattcgtattctattacagggtctgaaaactggagagataggcatggtcattggaacacactgcttaatagctgataaaactgaattttcagctttacgtatctctgttatagatgaacagcagcgctttggagttgtacagagaggcaggtttaacagtaagctatatacttcttcctcaaagttgagtggtgaaaatacaagttcagacgaggcttctgattctgaaacatttatggctccacacgttcttgcgatgtcagctacccctattccaagaacattggcacttgctttatatggtgatatgtctcttactcagatcacggacctgcctcctggaaggcaacctattaaaacccttgctcttgaaggaaatgatgtagggtttgaagctgtcttccagatgatgagggatgaactgatagacgggggcaaggtctaccttgtgtatcctatcatagatgagtctgagcacttgccacaactccgtgctgcaacagctggatttgattccataaagcaaaaattcgaaggctatccctgtgggctattacacggccgcatgaggagcgatgagaaggaagaaactctcaacagttttagaagcggagaaacacgcattctcctgtcgacacaggtgatcgagatcggggtcgatgttcctgatgcttccatgatggttgtcatgaacgctgagcgatttggaatctctcagctgcatcagctgcgagggagagtaggtcgcggtgagaggaaatccagatgcatattcctggcttcaacttcgagcacgctgccaaggctgaaggtgctcgagaagtcctccgatgggttttacctggctaatgcagacctgctgctccgtggccctggcaatctactaggtaaaaagcaatctggtcatcttccagaatttccaatagctagattggaggtcgatggtggtattttacaagaggcccatcttgccgctctgaaagtgctggtcgcaagcaacgacctagcgttgtatccacggctgaaggtggagctcagcatgaggcagccattgtgcattcttggagattgacatgtcaacagtactgctcgtaggctcgtagcattgggcgacgcgtgtactgtggataactattggtcgtaggctcgtagcgtcggcaaagttgacatgccgtctggtgagcgaggcgtgtaccatgaataactgttagactgattgtgtgagtgtgtgtgggctggtaccattgttaggctgccggttcattagggttagagttgagtctatatattgtaaccccttctctatgcaatacaatgatccacttcactattctacatgttattagactaggttagggttttctgaaacccacagtagccaccggtcgcctcccaccccacagcagccgccaccacctgagccgtcgtcgccctccaggaggctcctccctctcggggcggcacttgcccctggcgcggctgtgcatgggcgcggcccctcgtagctcggcgcgggagtggcagcccctggcctcgacggcgcgaggcgcgaccccctggcagtgtggacgcgacggtccgtccatggcggcgcggccacgccggccccggcgcgggaaacggctcggcggcgcacgacacggagcctcatcacgaggcaatggtggccacggcgccgccctggcggctggctcctccggcgaggtacagcctcggcgcgacctaggcgcgagcgtaggctcgtgggcctcctct

SEQ ID NO: 214715 - DNA, 3776 bp, Zea Mays
gttcaccttcacccggcggcccgcgtgcgctgtctccccccaggccccccacctctctggctctctctctctctgcgagtctgcgacgacggggctaccgccgcctccgtacgccaggtgccgaggtcttcgttggtcctttcgccggcgacatccaccagaaattatatcatcaattcattaccgggtgtacatttgtacacagtacacccatgtccttcactggatccgcccctgtagtgaggataatatctttggagtttcggagggggcgcgctagaaggatggtttccaaaatgagatttcggaatgctctcggttctagaccatttcagtgttgttcgcgtgagaatcatacatatgtccggaagctgttggaccgagtgtcggagagatcaaagctccttaaaaaggtgtctgttttggtgggttacagtaatccacaagatttagttgagaaacaaagagcccctggggaatcttctgcagagttgattagtgccttgaaagaaatcgatttcccagaaattactgcaaagtttccatgcataaaagttggtgatgcatcacctgttgaactgtatgaggattctactaacatgaagtttaaagaagctgcactttctgaaaagctcacaaatttcatccaaggctcagctcgaaatttggagtcagcttatgaattccataatgactgtcatccattgaatcaaacacccacaactgcaggtgatctttcaatcagtgaagagatccctctcattgaaccaatagttgatacgaagtcccccgagtcattgtcagatgctataacctctgacaatagtatactggataaaagtataaggtgcttgcctggaacaactagtaggcaatatcgccagctagaggatggtggtttccatacggtccgcaaattattgcagcattttcctcggacttatgcagatctgcaaaaccctcaaggccccatagaatatgggcagtatattatgttatctggtactgttatatcttccaggggaatcaaggttaagtccactttaggtcttcttgaggtggttgttggttgttccataatcgagtctgaattgagctcttcagttgagagtagtcactctggagcagagcaaaagagaattcacttgcacctcaacagatttttcagtggcgcacgtttttcttcccaacattttcttaacttaatgtcagcaaagcacaaagaaggggatcttgtttatgttagtgataaaaaaggtgcttgctaatggccattatgagttgaaggagtacacaattgacgctattgaaggagaaggggaacacagcactatgcttgctaggaaaccacaccctatatacccgtcgaaagcgggattaaaacctagtctgcttggcctttcaatctctagggccttgaagatattgagcccagatgttgatccagtgcctcccgatgttctcgttgaattcaacttgcctaatctctttgatgcttacatgggaattcacaaacctaaggatcgatctgaagctgattttgctcgaagaaggcttatatttgatgatttcttttacctccagttaggaagactatttcaaatgcttgaagcagttggtacgcgggttgagaaggaggaattgttatacaagtgcaaaagtcatgagctgaatactgttggtgtagatgattggtctcctcttacaaagaaattgttgagggctcttccttattggcttactcctagtcagttggatgctgttcaagagattatatgggatctcaggagaccagttcccatgaacagactcttgcagggggatgttggttgtggaaagaccattgttgctttcctggcatgtatggaggttgttaattcaggatttcaggctgctttcatggttccaacagaggtgcttgctgtccagcattatgaacacctaacttcattgctagagaagtttgatggagatgagaaaccaaatattgccttgctaactggttcaacgtccacaagggagtcaaggataattcgagatggtctgaaaactggagagataggcatggtcattggaacacactgcttaatagctgataaaactgaattttcagctttacgtatctctgttatagatgaacagcagcgctttggagttgtacagagaggcaggtttaacagtaagctatatacttcttcctcaaagttgagtggtgaaaatacaagttcagacgaggcttctgattctgaaacatttatggctccacacgttcttgcgatgtcagctacccctattccaagaacattggcacttgctttatatggtgatatgtctcttactcagatcacggacctgcctcctggaaggcaacctattaaaacccttgctcttgaaggaaatgatgtagggtttgaagctgtcttccagatgatgagggatgaactgatagacgggggcaaggtctaccttgtgtatcctatcatagatgagtctgagcacttgccacaactccgtgctgcaacagctggatttgattccataaagcaaaaattcgaaggctatccctgtgggctattacacggccgcatgaggagcgatgagaaggaagaaactctcaacagttttagaagcggagaaacacgcattctcctgtcgacacaggtgatcgagatcggggtcgatgttcctgatgcttccatgatggttgtcatgaacgctgagcgatttggaatctctcagctgcatcagctgcgagggagagtaggtcgcggtgagaggaaatccagatgcatattcctggcttcaacttcgagcacgctgccaaggctgaaggtgctcgagaagtcctccgatgggttttacctggctaatgcagacctgctgctccgtggccctggcaatctactaggtaaaaagcaatctggtcatcttccagaatttccaatagctagattggaggtcgatggtggtattttacaagaggcccatcttgccgctctgaaagtgctggtcgcaagcaacgacctagcgttgtatccacggctgaaggtggagctcagcatgaggcagccattgtgcattcttggagattgacatgtcaacagtactgctcgtaggctcgtagcattgggcgacgcgtgtactgtggataactattggtcgtaggctcgtagcgtcggcaaagttgacatgccgtctggtgagcgaggcgtgtaccatgaataactgttagactgattgtgtgagtgtgtgtgggctggtaccattgttaggctgccggttcattagggttagagttgagtctatatattgtaaccccttctctatgcaatacaatgatccacttcactattctacatgttattagactaggttagggttttctgaaacccacagtagccaccggtcgcctcccaccccacagcagccgccaccacctgagccgtcgtcgccctccaggaggctcctccctctcggggcggcacttgcccctggcgcggctgtgcatgggcgcggcccctcgtagctcggcgcgggagtggcagcccctggcctcgacggcgcgaggcgcgaccccctggcagtgtggacgcgacggtccgtccatggcggcgcggccacgccggccccggcgcgggaaacggctcggcggcgcacgacacggagcctcatcacgaggcaatggtggccacggcgccgccctggcggctggctcctccggcgaggtacagcctcggcgcgacctaggcgcgagcgtaggctcgtgggcctcctct

SEQ ID NO: 214716 - DNA, 3612 bp, Zea Mays
gttcaccttcacccggcggcccgcgtgcgctgtctccccccaggccccccacctctctggctctctctctctctgcgagtctgcgacgacggggctaccgccgcctccgtacgccaggtgccgaggtcttcgttggtcctttcgccggcgacatccaccagaaattatatcatcaattcattaccgggtgtacatttgtacacagtacacccatgtccttcactggatccgcccctgtagtgaggataatatctttggagtttcggagggggcgcgctagaaggatggtttccaaaatgagatttcggaatgctctcggttctagaccatttcagtgttgttcgcgtgagaatcatacatatgtccggaagctgttggaccgagtgtcggagagatcaaagctccttaaaaaggtgtctgttttggtgggttacagtaatccacaagatttagttgagaaacaaagagcccctggggaatcttctgcagagttgattagtgccttgaaagaaatcgatttcccagaaattactgcaaagtttccatgcataaaagttggtgatgcatcacctgttgaactgtatgaggattctactaacatgaagtttaaagaagctgcactttctgaaaagctcacaaatttcatccaaggctcagctcgaaatttggagtcagcttatgaattccataatgactgtcatccattgaatcaaacacccacaactgcaggtgatctttcaatcagtgaagagatccctctcattgaaccaatagttgatacgaagtcccccgagtcattgtcagatgctataacctctgacaatagtatactggataaaagtataaggtgcttgcctggaacaactagtaggcaatatcgccagctagaggatggtggtttccatacggtccgcaaattattgcagcattttcctcggacttatgcagatctgcaaaaccctcaaggccccatagaatatgggcagtatattatgttatctggtactgttatatcttccaggggaatcaaggttaagtccactttaggtcttcttgaggtggttgttggttgttccataatcgagtctgaattgagctcttcagttgagagtagtcactctggagcagagcaaaagagaattcacttgcacctcaacagatttttcagtggcgcacgtttttcttcccaacattttcttaacttaatgtcagcaaagcacaaagaaggggatcttgtttatgttagtgggccttgaagatattgagcccagatgttgatccagtgcctcccgatgttctcgttgaattcaacttgcctaatctctttgatgcttacatgggaattcacaaacctaaggatcgatctgaagctgattttgctcgaagaaggcttatatttgatgatttcttttacctccagttaggaagactatttcaaatgcttgaagcagttggtacgcgggttgagaaggaggaattgttatacaagtgcaaaagtcatgagctgaatactgttggtgtagatgattggtctcctcttacaaagaaattgttgagggctcttccttattggcttactcctagtcagttggatgctgttcaagagattatatgggatctcaggagaccagttcccatgaacagactcttgcagggggatgttggttgtggaaagaccattgttgctttcctggcatgtatggaggttgttaattcaggatttcaggctgctttcatggttccaacagaggtgcttgctgtccagcattatgaacacctaacttcattgctagagaagtttgatggagatgagaaaccaaatattgccttgctaactggttcaacgtccacaagggagtcaaggataattcgagatggtctgaaaactggagagataggcatggtcattggaacacactgcttaatagctgataaaactgaattttcagctttacgtatctctgttatagatgaacagcagcgctttggagttgtacagagaggcaggtttaacagtaagctatatacttcttcctcaaagttgagtggtgaaaatacaagttcagacgaggcttctgattctgaaacatttatggctccacacgttcttgcgatgtcagctacccctattccaagaacattggcacttgctttatatggtgatatgtctcttactcagatcacggacctgcctcctggaaggcaacctattaaaacccttgctcttgaaggaaatgatgtagggtttgaagctgtcttccagatgatgagggatgaactgatagacgggggcaaggtctaccttgtgtatcctatcatagatgagtctgagcacttgccacaactccgtgctgcaacagctggatttgattccataaagcaaaaattcgaaggctatccctgtgggctattacacggccgcatgaggagcgatgagaaggaagaaactctcaacagttttagaagcggagaaacacgcattctcctgtcgacacaggtgatcgagatcggggtcgatgttcctgatgcttccatgatggttgtcatgaacgctgagcgatttggaatctctcagctgcatcagctgcgagggagagtaggtcgcggtgagaggaaatccagatgcatattcctggcttcaacttcgagcacgctgccaaggctgaaggtgctcgagaagtcctccgatgggttttacctggctaatgcagacctgctgctccgtggccctggcaatctactaggtaaaaagcaatctggtcatcttccagaatttccaatagctagattggaggtcgatggtggtattttacaagaggcccatcttgccgctctgaaagtgctggtcgcaagcaacgacctagcgttgtatccacggctgaaggtggagctcagcatgaggcagccattgtgcattcttggagattgacatgtcaacagtactgctcgtaggctcgtagcattgggcgacgcgtgtactgtggataactattggtcgtaggctcgtagcgtcggcaaagttgacatgccgtctggtgagcgaggcgtgtaccatgaataactgttagactgattgtgtgagtgtgtgtgggctggtaccattgttaggctgccggttcattagggttagagttgagtctatatattgtaaccccttctctatgcaatacaatgatccacttcactattctacatgttattagactaggttagggttttctgaaacccacagtagccaccggtcgcctcccaccccacagcagccgccaccacctgagccgtcgtcgccctccaggaggctcctccctctcggggcggcacttgcccctggcgcggctgtgcatgggcgcggcccctcgtagctcggcgcgggagtggcagcccctggcctcgacggcgcgaggcgcgaccccctggcagtgtggacgcgacggtccgtccatggcggcgcggccacgccggccccggcgcgggaaacggctcggcggcgcacgacacggagcctcatcacgaggcaatggtggccacggcgccgccctggcggctggctcctccggcgaggtacagcctcggcgcgacctaggcgcgagcgtaggctcgtgggcctcctct

SEQ ID NO: 214717 - DNA, 1995 bp, Zea Mays
gcgagcgacccctcctccctaccttttaagtggaaagggggatgttggttgtggaaagaccattgttgctttcctggcatgtatggaggttgttaattcaggatttcaggctgctttcatggttccaacagaggtgcttgctgtccagcattatgaacacctaacttcattgctagagaagtttgatggagatgagaaaccaaatattgccttgctaactggttcaacgtccacaagggagtcaaggataattcgagatggtctgaaaactggagagataggcatggtcattggaacacactgcttaatagctgataaaactgaattttcagctttacgtatctctgttatagatgaacagcagcgctttggagttgtacagagaggcaggtttaacagtaagctatatacttcttcctcaaagttgagtggtgaaaatacaagttcagacgaggcttctgattctgaaacatttatggctccacacgttcttgcgatgtcagctacccctattccaagaacattggcacttgctttatatggtgatatgtctcttactcagatcacggacctgcctcctggaaggcaacctattaaaacccttgctcttgaaggaaatgatgtagggtttgaagctgtcttccagatgatgagggatgaactgatagacgggggcaaggtctaccttgtgtatcctatcatagatgagtctgagcacttgccacaactccgtgctgcaacagctggatttgattccataaagcaaaaattcgaaggctatccctgtgggctattacacggccgcatgaggagcgatgagaaggaagaaactctcaacagttttagaagcggagaaacacgcattctcctgtcgacacaggtgatcgagatcggggtcgatgttcctgatgcttccatgatggttgtcatgaacgctgagcgatttggaatctctcagctgcatcagctgcgagggagagtaggtcgcggtgagaggaaatccagatgcatattcctggcttcaacttcgagcacgctgccaaggctgaaggtgctcgagaagtcctccgatgggttttacctggctaatgcagacctgctgctccgtggccctggcaatctactaggtaaaaagcaatctggtcatcttccagaatttccaatagctagattggaggtcgatggtggtattttacaagaggcccatcttgccgctctgaaagtgctggtcgcaagcaacgacctagcgttgtatccacggctgaaggtggagctcagcatgaggcagccattgtgcattcttggagattgacatgtcaacagtactgctcgtaggctcgtagcattgggcgacgcgtgtactgtggataactattggtcgtaggctcgtagcgtcggcaaagttgacatgccgtctggtgagcgaggcgtgtaccatgaataactgttagactgattgtgtgagtgtgtgtgggctggtaccattgttaggctgccggttcattagggttagagttgagtctatatattgtaaccccttctctatgcaatacaatgatccacttcactattctacatgttattagactaggttagggttttctgaaacccacagtagccaccggtcgcctcccaccccacagcagccgccaccacctgagccgtcgtcgccctccaggaggctcctccctctcggggcggcacttgcccctggcgcggctgtgcatgggcgcggcccctcgtagctcggcgcgggagtggcagcccctggcctcgacggcgcgaggcgcgaccccctggcagtgtggacgcgacggtccgtccatggcggcgcggccacgccggccccggcgcgggaaacggctcggcggcgcacgacacggagcctcatcacgaggcaatggtggccacggcgccgccctggcggctggctcctccggcgaggtacagcctcggcgcgacctaggcgcgagcgtaggctcgtgggcctcctct

SEQ ID NO: 214718 - DNA, 2389 bp, Zea Mays
ttcctccgcgccttcaagtccggcaagcccgacgccttctttgacagtctccctttcctggatacatgctcgatgctcctagtaaacactaaacaccgtgcgtgatgttctgaacatctatctatctctctctctgagctagatttatgtggtacgaagaaccctcctgttcagatgggcctatgtatgatacgtgttgctcactcgcttgctcctcctcgcagtctcaatggatggatgctgtcgttttttgcctttgcccgccctgaatggctgctgcaaagtctggaactgaaacagcttattaaggcagattaagcaagagctcgctcatcaccattaatcagttgtgctgatcaaacagacgaacagtcagatagacaggtcgtcggccgtgaacgccagcggcccatcaaagtgcaccagcttgccgcccacatcgccaccggactccacctccgccgccgacgaccacataggggcggcgacaccggttctgacgggagaagaaaacggcgcgcggacggacagcgacggagcatgattaatggttctcctcaacggctaataacgattcttcaggaaagttttactcttattaaactccctgacatcgtccaaggaagcaagtgatttcattatgaaagattggtctattttctccaaatttgatcataatggagcttacctccccatgttgccaatcgactctccaatatctcatgatgttgggttaggattgatatcacaagtcggaaacttagttgaatgttcatttcaacatccaaggcatatatgtgctacggggagtggcacagttcaggaagcattcagctgtttgaacaagtttgctgaagctttctatttctggttttctagagcatcgaatcctaagctattccaaaggctatcagctgctgcaggctcaagttcaagagtttgtcggtcacacataaagcaagtggcctcttgcttgcagcatttaccaggactacagtttggttcacaattaagaaaagatcatgctgtacagatgcttttagcgaggcttgcaagcacaacttttggacgcctgtggacggaggtggaggagcatcatgcctgcaacatccttatgttggctgccgctactgtagtaccaccatttgaaaacatatctccgaagatgctggctgagtcaatggcactaagaaaagatggtgggaacatcccctgctggacagtcatactcggaagaaatccgtccaggttgtgcgtgtgttgctgtgccaagagtactcttgcgagaagatgtaacagaaccgaaaactggcatcaagttccccactctacttaaagacaattccaatctgactacagaggtccttgttggaatgggtttcagaagcatgcgaataatgagggttaaagatctgaatctttatgcctttggattatatatacaacctgattctgtttgcaaaaagctgggtccaaagtatgcttgtattccagatgctgagttgaaggatcacccagatttctatgaagatcttttgagggaaaatattgatatgactgttaggctagtagtaagctacaatggcctcagcattggcacagttcgagatgcatttgagaagtctcttgccttccggctgaaaaagatgaatcctaatactgattatgattgcttgaagacatttggttcttgttttaatgaatacattcgtatacctgctggtacaaagatagacttccggcaaacatccgatggtcagctaataactgaaattgatggcaaacaaattggcactgtccacagcaaatatctctgcagaaccttcttcgatatgtatattggtgacccccctgtttcagttgagaccaaacacggcattgcgcaaaatgtggctggactcatgagaagatgctaggaaaacagggaaaccaaaccgaagaactcggaactatttcctccatctatacaaggagagatgtacatagaaaggaagccaggagaggattgattgtatttttagtggtagacagcgactttgtatgctgtaattaacaggcagaaggtttcgacagacaggcctggcatccttagcaaatgcctcctatgcttctcatatggtatggcattttgccatttcctggttcgctgggggcactgtatcatgagcatatccaagagcttctcagaagtctcccctaaattatgttttttttttgaaaaatggcggttccttttaccaatcattctcactaattttttaaatgtcccttagaactgattttcaggagttattttgtacaacaggaggatgtttctctatcccaagtcaaaaaaatggcggggttcagctttgtccctacggactcgagggtaatgtagataattgag

SEQ ID NO: 214719 - DNA, 3703 bp, Zea Mays
ccaggcctccagggtttaggctcgccgccgtcccgtcccgtcccgtcccgcctcgcccaccgcgcgccgcgatgcctccttccaagggcaagaagaagaacccatcgacgtcgccgcggccgtccccacgcacgccttcatcttgtccctccgctggctccggaactggcgatggcgagagaagcgtcgacctcccatccatcgccgccgccgccgcggagcagttcccggcgctcgtgccacgcggcggtagtggctactttgctggcatcgttgccgaagtggcccctagggatgggagccgcggcggccgcttggggaggctctggctctccgaggccgctatggtcggcgccgggatgcggcctgggtgctttgtctccgtctcactaatttcgtcaagcagtgatcagttagatggttttccattaattaatttatttgaggagtgcaacagattctttgatcttgatctggacaatgatctcctttatggtgaagctgggaaaaactttgtggttgctacagttctcccctcgcgtgaggttccaaagaatggtatcaagctctcttgggatcttgcttgtgttttgggacacccttttgtaggtcgatcattgtttatttgccccttatgtacacttcaggccccaaagcgtagtgatgatgttcatattttacgggtaatgaaatgcaagaatctttatcttagcctagttccacctaatgttggatcttccaaaggcattgaatcagagtctgactaccatcctgaaagaagcgcaatggttatggagacacctaagaggggtccttcaactccactgcgtaagaaggaatcgcatcactttgcttccaacaatggctcttcaatgtgcttggatccaaccactgcaagatcagcactagcagatgagaaaatcaatgagttgttgcatacttcagcattgtggtggctcaatggtagacacttgcttaaaggaaactttgttcctctctcaatatgcggaaaactgtctctatttgtggtcatgggagcagaaccagatagttcttctcaagatgttttgtatgagaatgggaatacactgtctaatgcagaggattcaactaaatcccaggaaaacccagttttattccttgttgacagaaccacaaaagttcatttatctgattctgtctgcacaaagcagcttgactcagataaaccgggtttaccatcagaacctcacgagtatgatgataaaagaaatgcagatttcaatcattctccaacacttggtgggttatctaaagagtcagcaaccataaaaggaataatttcattttcactagctgatcaaattggtctgccaagatacaaaggtattcttctttatggtccacctggaacagggaagacctctcttgcttcttcctgtgcctatgatgcaggggtcaacctttttacaatcaatggaccagagatcattagtcattattacggagaaagcgagcaatctttgtacgatgttttcacttcagccaagcaagcagcacctgctgtggagtgccatccccaggacagaggatggacatacttcgccaccttctaattggagttcatcactctctgaccaatgaagaagttgagtctgttgctctagcaacccatggatttgtgggtgctgatctagcagcagtgtgcaatgaggctgcattgagtgctctccggcgttacatcagcctaaaagaaaattcaattcaacaacttggtcatcctggctgtagtttttataagtgtaatagtcaagatactgaagattcaagctcattatcgtcatctttctcaaagttgaccatgtcatcatatgttgcttgcatgaacggtggtaacataaaaagtagcgagtcttatgatgatacagatgaaataccactatatgtaaccaataaggattttgacaaggctaaaacaaaagttagaccgagtgcgatgcgcgaggttattcttgagcttccgaaggtacgttgggaagatgttggtggtcagtgcagtgtcaaggagcaactgattgaagctatccaattaccacaaaaatgcccagaagcatttgaacgtttagggatccgaccccctagaggattgctaatgataggaccaccaggttgcagcaagactttgatggctcgtgctgcagcttctgaagcaaaattgaatttcctggctgttaagggtcctgaacttttcagcaagtgggtcggtgactcagaaaaggcagtgagatcgctatttgcaaaggcgcgggctaatgcaccagcaatattattttttgatgaaatagatgggcttgcagtaactcgtgggcaagaaaatgatggcacgtctgttgctgatagggtcctcagtcagttgcttgtggaaatggatggtttggaccagagagttggtgttactgttattgcagctacaaatcgccctgacaaaattgatcccgcacttctgaggccaggtcgtttcgatagggtgctggatgtgcaaccacctgatgaagctgaccgtgcagatattttccggatccatacacgcagcatgccatgcagtgccgacatgaatctaaatgaactcgctagactcacagaaggctacactggcgccgacataaagctcatctgcagggaagctgctgttgccgcacttgatgagaggtttgacattcaagaagtagcaatgagacatttcaattctgcgatcgacagaacaaaaccttcagatgtcaagttcttccaagaacttgcaaagcaattccgcagatcgttgacttcactgaggaagcaataattctgagaaagcgttgaggaatgggtcaagcatcaccctctcactccctacatttttgcttggtccagagaatggagttggttaatccatacaagtacacggctagcttagccatctggaatcagttcatccaaagaaataaaacatggggtgacctcattctggatattcatgtgatttctcaaagcaggcgccacatcagtgaacctggcgtgactgaatctgggctggcacaggatccacaggtgaccgttcctcaacttcgcatggactgtcagcaggcgcagtggtatcctcttcaatgtgttcgtcagattcatcaatgtcctggatagctaatggcagcattctgcatcaattggcggagttccagccacaagttcagatgcttcagctgacgaatcttgcacgtggggattgctttcagaatgatcagaggaatgcttgatcccaaacttgcagctgtcatggcaagagctggtggatgctcgtaggaaatgcgggaccggcttctacttcctctttaacatcaggtgtcatgctgctgccatccataactactagagcagcatttatcaggtcttcacatttgttatgtgagggactaaaatttagttagaggaaccaaacatggtcttagtcttcaactcttcatggtttgagcatgggagaaggggggagtggactataaattgggcgtagaggttgtggatttgtgaacctagaatgaaatagattctgctgttattctcaagaaattgaggcatgaagtctaaaaagacgaatttaaaggaaaaataaataaatgttgcagcagtttaaacagccaactttaatccgaagctaacagcctgctttgaacgttatgggacaaaatgtggc

SEQ ID NO: 214720 - DNA, 4305 bp, Zea Mays
gccagctcgggtcaggggcatagacgtccactgtagatccctcgcgtcaggggtataaacgtccaatcccccacttaaccgtcaccacgcccacttgcatcgccgttgcggaattgcggagcgcgccgccaaaacaaacgcgtcctgctgccggaatcagaagatcccgaggggttctgatctgagggcccaccatcctctctacacggcacaggaacccaactactactactacaatcgttgccagggagctcaaccgactcgggaccaaaatcggctgctgttgctggctgggacgaaatcggaggcatccgcctttctcgagagatcgagctccgcgccggagcaggcgggccaggcggtgccgctgctgcctgctggtgggtttacaacatagggatggagtcgagatccatccggattcgacattcgaggtcttctgctttgctgttttaaacctgtagaggcagaggacttgggaatgctgaaaaatgtgcctgcaaaccgacgggggaattttttgtgcaaacaagattcgacctctgttcaagcagatattgttggcttctcatgagtatgggcttcatgctgatactgcccttattttcaatgatttaaagcacagtagattgaaggcctttatatttgttggccatcaccttggagacgacggttaaaatcttctacattctttgataagtggtgtggcgcttgttcattattctatcgttgcatagtttgatacgatggatgggaggaggacaattttgatgggacgatatgaaattggtaaacagctgggacaaggaacctttgcaaaggtcttttatgctcgtaatcttactactggcctggctgttgccataaagatgattaacaaggacaaggtcatgaaggttgggctcatggagcagataaagagggagatctcaataatgaggttagtgaagcatccaaatattcttcagctttatgaggttatggctagcaagagcaaaatttattttgttctggagtatgctaaaggtggtgagcttttcaacaaaattgctaaggggggaaagctcagtgaggatgctgcgaggaaatatttccagcagttggtcagtgctgttgatttttgccacagtcgaggtgtctatcaccgtgacttgaagcctgaaaaccttctacttgatgagaatgaaaaccttaaagtctcagattttggcctaagtgctctagctgagtccaagaggcaagatggtctcctgcataccacatgtggaactccagcttatgttgctcctgaagtgctgagtagaaaaggttatgatggtgcaaagtctgatgtgtggtcttgtggagtaattctttttgtgcttgtggctggttaccttcctttccatgacacaaatttgatagagatgtacaggaagatttccagagccgagtttagatgccctcgttttttctcaactgagctgaaggatctgctacataaaatccttgttccagatccaagcactagaatttctatctcgaggataaagaggagtgcttggtacagaaaaccggttgaagcacatgcaaagaaaaatgaggcagaaacaagcgagaatacttgtacgggtgaaggtacaacttctgtctcaacagagtgcagtacgtctgagggaaatcaagggccattaagcctcccaaacttgaatgcatttgacatcatctgtctctcaacaggttttaatctttctgggttttttgaggataagtatggtcgcagggaagagagatttactaccagacagcctgtaacaacagtatttacaaagctgaaggagcttgccaaacgcctaaagttgagggtcaagaagaaagaaaatgggaccttgaaattggcagctccgaaggaaggaaagaagggtatgcttgagcttgatgcagagatttttgaggttgctccttctttgctcttagttgagttgaaaaaaaccaatggggacacgctggagtatcaaaagctagtgaaagaggagataaggccggcactgaaggatattgtttgggtttggcaagatgatcaacaccagtgctcacaatcaccagagtctctattatcaccaccggagacacaggatgaattgcgattatcattgcctcagcaagagggtcaagacttcttagaagccccattgccatcactatcgcttgaccagttgaaatcaccaactgccccagagcaagcagagcaactgccacaaccagaacagttgcaaacgccaatcgctccagaggagcaaattaactagctctaacagccagctgatgccaaaaaagcaaaggaaaaaggtcccgacaaaaaagaaaggatttgcatgtacaatatcagcagtggagtgttgaaggaacgtctctcctggagacatacaaaggcatccagatatgtccccatcgaagaaacagttaacaaacaacaatgattcgctgtactggtcaaatgaaaaatatgactactcttgctcttggttggatgaccgggcaatgatttcagctttgcttgatgtggtcatagaagaagactctgcaagtctactccccccggagcgctctcccctcttcctcttgtagctggtgtggaggctgagctgcatccggtctctgttggccataagagcatggatgcagaaatgaaacagccacttgagggatccatgtccctgaacatcgacagcgaaggtgaaccccacattggaaatggatcgatcgtcgtcgagaaccctgcatctgacctggtgaagtcagaatctgaccgaataaaaaccttttaccagacggtcctgtcggctatcatggtgttcgtcacggcagcgctatcaagctacaaggacatgaagcctctttactcgaccacaagccacggcaaagctcacctcagcaacctcctagtcgacgagggcctattcatattcatgaccttcttgtgtgctatggtcctaatgatgtctgagttcgtcgtgcaccagcatggccggcggggccatgtctggtgctgggttcgcaccattctcgttgcagtcaccggtgtgatgctaatcgtggctgacacaatcctcctcatcgtgacgaaccgaagcaacatgttgctgtcagttcttcttgtaccggaggtgttgcttttcggcgtggccgtgagcgttggagcatggatgcaagagagtttacccagctcggagcttggcagcaggtacgattccgccatgaagggaacctttgatatagctacagttggcaccattgtctcgttcacgcttcaggggggcatcgtctttggctacctgaaaaccccagacagtaatcaggtcaagcatgacccgccgctggacctcgctgcgtgctacgccacctcgacgctctccctgaccggaatgacaatgtgtgccatgccgctggcatatctccccaacggcatgctggaggttctcgtcagagtcgtcgagaggcttaggagtgctgtgctggccgctctggcgatgatggcgctggtcgtctcagtggagttcctggatggattcgtcgtggtctccttctttcccgacgccgtcacgattgccctgtactacgtggtgaagctgttctcggcatgtcaaccccgagaggagatctcacagctggacttcaccttccggatcgttgccgccgcggggttcacgctaatgactggactctatgcggcttttacggggacagatcactatggcttcaacctcaagaccgctatgttcatcctgttgcttgcagttgtgtcgagcttgagccgtctggcaatcccacttcacatgcctgaggcgggagtgggaggagtcatcgagttcggcattgttagtatagctctctcttttcccctgctggcgcttctggctgccattccattggtgttcaaggtcttcgtcgaccattacatcaatcgctagtctttgggttgtctggcgcaattcttcctgtggtacagtgccagtaatgaatgatgcgtttttaaactaagggcataaatttaaaaatcttatttttattactgcatttactcagtctaggttgcttgtttggaagagcaacagcaagagactagccagatcctttgtaaggataaatttggctattattagaagaaaaatgtctttaaatttagtagctctctatccgtacagttttactattttatctacagttttactattttatttttagatagcctacttcgatcatcatataaagttctgaatttatggagtaggttgaactagtgtactttttaaaaatctattttag

SEQ ID NO: 214721 - DNA, 4311 bp, Zea Mays
gccagctcgggtcaggggcatagacgtccactgtagatccctcgcgtcaggggtataaacgtccaatcccccacttaaccgtcaccacgcccacttgcatcgccgttgcggaattgcggagcgcgccgccaaaacaaacgcgtcctgctgccggaatcagaagatcccgaggggttctgatctgagggcccaccatcctctctacacggcacaggaacccaactactactactacaatcgttgccagggagctcaaccgactcgggaccaaaatcggctgctgttgctggctgggacgaaatcggaggcatccgcctttctcgagagatcgagctccgcgccggagcaggcgggccaggcggtgccgctgctgcctgctggtgggtttacaacatagggatggagtcgagatccatccggattcgacattcgaggtcttctgctttgctgttttaaacctgtagaggcagaggacttgggaatgctgaaaaatgtgcctgcaaaccgacgggggaattttttgtgcaaacaagattcgacctctgttcaagcagatattgttggcttctcatgagtatgggcttcatgctgatactgcccttattttcaatgatttaaagcacagtagattgaaggcctttatatttgttggccatcaccttggagacgacggttaaaatcttctacattctttgataagtggtgtggcgcttgttcattattctatcgttgcatagtttgatacgatggatgggaggaggacaattttgatgggacgatatgaaattggtaaacagctgggacaaggaacctttgcaaaggtcttttatgctcgtaatcttactactggcctggctgttgccataaagatgattaacaaggacaaggtcatgaaggttgggctcatggagcagataaagagggagatctcaataatgaggttagtgaagcatccaaatattcttcagctttatgaggttatggctagcaagagcaaaatttattttgttctggagtatgctaaaggtggtgagcttttcaacaaaattgctaaggggggaaagctcagtgaggatgctgcgaggaaatatttccagcagttggtcagtgctgttgatttttgccacagtcgaggtgtctatcaccgtgacttgaagcctgaaaaccttctacttgatgagaatgaaaaccttaaagtctcagattttggcctaagtgctctagctgagtccaagaggcaagatggtctcctgcataccacatgtggaactccagcttatgttgctcctgaagtgctgagtagaaaaggttatgatggtgcaaagtctgatgtgtggtcttgtggagtaattctttttgtgcttgtggctggttaccttcctttccatgacacaaatttgatagagatgtacaggaagatttccagagccgagtttagatgccctcgttttttctcaactgagctgaaggatctgctacataaaatccttgttccagatccaagcactagaatttctatctcgaggataaagaggagtgcttggtacagaaaaccggttgaagcacatgcaaagaaaaatgaggcagaaacaagcgagaatacttgtacgggtgaaggtacaacttctgtctcaacagagtgcagtacgtctgagggaaatcaagggccattaagcctcccaaacttgaatgcatttgacatcatctgtctctcaacaggttttaatctttctgggttttttgaggataagtatggtcgcagggaagagagatttactaccagacagcctgtaacaacagtatttacaaagctgaaggagcttgccaaacgcctaaagttgagggtcaagaagaaagaaaatgggaccttgaaattggcagctccgaaggaaggaaagaagggtatgcttgagcttgatgcagagatttttgaggttgctccttctttgctcttagttgagttgaaaaaaaccaatggggacacgctggagtatcaaaagctagtgaaagaggagataaggccggcactgaaggatattgtttgggtttggcaagatgatcaacaccagtgctcacaatcaccagagtctctattatcaccaccggagacacaggatgaattgcgattatcattgcctcagcaagagggtcaagacttcttagaagccccattgccatcactatcgcttgaccagttgaaatcaccaactgccccagagcaagcagagcaactgccacaaccagaacagttgcaaacgccaatcgctccagaggagcaaattaactagctctaacagccagctgatgccaaaaaagcaaaggaaaaaggtcccgacaaaaaagaaaggatttgcatatcgtagtacacttgctgtccatgtcctgcagaggaacgtctctcctggagacatacaaaggcatccagatatgtccccatcgaagaaacagttaacaaacaacaatgattcgctgtactggtcaaatgaaaaatatgactactcttgctcttggttggatgaccgggcaatgatttcagctttgcttgatgtggtcatagaagaagactctgcaagtctactccccccggagcgctctcccctcttcctcttgtagctggtgtggaggctgagctgcatccggtctctgttggccataagagcatggatgcagaaatgaaacagccacttgagggatccatgtccctgaacatcgacagcgaaggtgaaccccacattggaaatggatcgatcgtcgtcgagaaccctgcatctgacctggtgaagtcagaatctgaccgaataaaaaccttttaccagacggtcctgtcggctatcatggtgttcgtcacggcagcgctatcaagctacaaggacatgaagcctctttactcgaccacaagccacggcaaagctcacctcagcaacctcctagtcgacgagggcctattcatattcatgaccttcttgtgtgctatggtcctaatgatgtctgagttcgtcgtgcaccagcatggccggcggggccatgtctggtgctgggttcgcaccattctcgttgcagtcaccggtgtgatgctaatcgtggctgacacaatcctcctcatcgtgacgaaccgaagcaacatgttgctgtcagttcttcttgtaccggaggtgttgcttttcggcgtggccgtgagcgttggagcatggatgcaagagagtttacccagctcggagcttggcagcaggtacgattccgccatgaagggaacctttgatatagctacagttggcaccattgtctcgttcacgcttcaggggggcatcgtctttggctacctgaaaaccccagacagtaatcaggtcaagcatgacccgccgctggacctcgctgcgtgctacgccacctcgacgctctccctgaccggaatgacaatgtgtgccatgccgctggcatatctccccaacggcatgctggaggttctcgtcagagtcgtcgagaggcttaggagtgctgtgctggccgctctggcgatgatggcgctggtcgtctcagtggagttcctggatggattcgtcgtggtctccttctttcccgacgccgtcacgattgccctgtactacgtggtgaagctgttctcggcatgtcaaccccgagaggagatctcacagctggacttcaccttccggatcgttgccgccgcggggttcacgctaatgactggactctatgcggcttttacggggacagatcactatggcttcaacctcaagaccgctatgttcatcctgttgcttgcagttgtgtcgagcttgagccgtctggcaatcccacttcacatgcctgaggcgggagtgggaggagtcatcgagttcggcattgttagtatagctctctcttttcccctgctggcgcttctggctgccattccattggtgttcaaggtcttcgtcgaccattacatcaatcgctagtctttgggttgtctggcgcaattcttcctgtggtacagtgccagtaatgaatgatgcgtttttaaactaagggcataaatttaaaaatcttatttttattactgcatttactcagtctaggttgcttgtttggaagagcaacagcaagagactagccagatcctttgtaaggataaatttggctattattagaagaaaaatgtctttaaatttagtagctctctatccgtacagttttactattttatctacagttttactattttatttttagatagcctacttcgatcatcatataaagttctgaatttatggagtaggttgaactagtgtactttttaaaaatctattttag

SEQ ID NO: 214722 - DNA, 1909 bp, Zea Mays
ggaattttcgtctgggtgcgtttgcgtcggctcccaggccccagcttctccgtggcgatatgccgatatccgataaaccccgcacatcctgactgcaactctgaacagcgaagcacccatggccctcgccaccacagccgtctccctccaccttttcctcacccggcccgcctccgtgctccgcgtaggccgcggcctcccatgcctcctcctccgagccacttcgtccacctccgcctccccggacttcaacatcaccttcgcggagcccgcgccgtccaaaaaggccccgtccgcgcagccgctggtcccgtggatcgtccgcggggaggacggcaagccccgcctcagcacctccccgccgccggacgtaatccaggccatcgcgctcgcggaggcggaggccaagaaggccgccaagaaggaaaccctcaagggccagaatggcgcagttgccgccgccgccgcggctgcttccaatgccagcgtcaagggcaaggaaaggaagcccgccccgaccgtgccgcccaagttctccaaggcagccaggaggttttacaatgagaatatcaaggagcgggagccgcaacggctcgccaaggtccttgccgccgcaggagtggcatcaagaaggaccagtgaggagctcatcttccaagggaaggtgactgtcaatggttcagtctgtacttctcctcagaccaaagttgacatctcaaaggattctatctacgttaacgggaaccgcatttccaagaagttgcctccaaagctgtattttgctgttaacaagccaaaggggtacatttgctcatgtggtgaagagtcaaaatctgttgtctccttatttaatgattatttgaagggctggaacaagattcaaccagggttgccaaaaccacgcttgtttactgtgggtcgtcttgatgttgccacggctggtctgataatagtcacaaatgatggtgagtttgctcaaaagcttgcacatccttcttcaaatgtaacaaaagaatatgtggtgactattgatggtgccgtgcacaaaaaacatctcatagctatcagtgaaggcacaaaaattgatggggtcatgtgcattcctgatttagtagaaccattggctgcccaatcagatacaagaaagacccgcctaaggatagtggttcatgaaggacggaatcatgaagttcgtgaacttgtacagaatgcagggctacaggtttatgcattgaaacgtgttcggataggcaggttcaggcttccagcagatctgggaattgggaagtttgttgagctcaaacaggctgatatcaaggcactagatggcaacaactagagatgacatctgatgtggctaataagcgcatcttgtccaaagatggtagtaatcctcaaagtcacaatacatgagctgctactcaactcagaaagcttgtgaatgttctggatgtccattggtggtggtggctgatgatcaagtgtggcaaacatgttttgccttgaagaacttgtgaactactccatacttcgcctgcgctgcgaatctccacatcatatcaaacggcagaaccaagtccgcgatgcagcagtcgtttggtgaggatggaacattgtcaaatagcgatcttctgttggcatatacattttactctctattctaaattataatttttttagatgcattgtttttactaaattaaaatatcttatagtttagaatgcatcttgtccaacaggtagtcaataatggcagacgagttatatttggccaaattacattgtactccgtgtaccgagaactgtttttttaagaatcctttattgaccaggaatttttttcttgtaattgtggcactgttatttctatagtcatgagaatcccttcatttttagggctagtttggga

SEQ ID NO: 214723 - DNA, 1796 bp, Zea Mays
gcgtttgcgtcggctcccaggccccagcttctccgtggcgatatgccgatatccgataaaccccgcacatcctgactgcaactctgaacagcgaagcacccatggccctcgccaccacagccgtctccctccaccttttcctcacccggcccgcctccgtgctccgcgtaggccgcggcctcccatgcctcctcctccgagccacttcgtccacctccgcctccccggacttcaacatcaccttcgcggagcccgcgccgtccaaaaaggccccgtccgcgcagccgctggtcccgtggatcgtccgcggggaggacggcaagccccgcctcagcacctccccgccgccggacgtaatccaggccatcgcgctcgcggaggcggaggccaagaaggccgccaagaaggaaaccctcaagggccagaatggcgcagttgccgccgccgccgcggctgcttccaatgccagcgtcaagggcaaggaaaggaagcccgccccgaccgtgccgcccaagttctccaaggcagccaggaggttttacaatgagaatatcaaggagcgggagccgcaacggctcgccaaggtccttgccgccgcaggagtggcatcaagaaggaccagtgaggagctcatcttccaagggaaggtgactgtcaatggttcagtctgtacttctcctcagaccaaagttgacatctcaaaggattctatctacgttaacgggaaccgcatttccaagaagttgcctccaaagctgtattttgctgttaacaagccaaaggggtacatttgctcatgtggtgaagagtcaaaatctgttgtctccttatttaatgattatttgaagggctggaacaagattcaaccagggttgccaaaaccacgcttgtttactgtgggtcgtcttgatgttgccacggctggtctgataatagtcacaaatgatgctatcagtgaaggcacaaaaattgatggggtcatgtgcattcctgatttagtagaaccattggctgcccaatcagatacaagaaagacccgcctaaggatagtggttcatgaaggacggaatcatgaagttcgtgaacttgtacagaatgcagggctacaggtttatgcattgaaacgtgttcggataggcaggttcaggcttccagcagatctgggaattgggaagtttgttgagctcaaacaggctgatatcaaggcactagatggcaacaactagagatgacatctgatgtggctaataagcgcatcttgtccaaagatggtagtaatcctcaaagtcacaatacatgagctgctactcaactcagaaagcttgtgaatgttctggatgtccattggtggtggtggctgatgatcaagtgtggcaaacatgttttgccttgaagaacttgtgaactactccatacttcgcctgcgctgcgaatctccacatcatatcaaacggcagaaccaagtccgcgatgcagcagtcgtttggtgaggatggaacattgtcaaatagcgatcttctgttggcatatacattttactctctattctaaattataatttttttagatgcattgtttttactaaattaaaatatcttatagtttagaatgcatcttgtccaacaggtagtcaataatggcagacgagttatatttggccaaattacattgtactccgtgtaccgagaactgtttttttaagaatcctttattgaccaggaatttttttcttgtaattgtggcactgttatttctatagtcatgagaatcccttcatttttagggctagtttggga

SEQ ID NO: 214724 - DNA, 1129 bp, Zea Mays
caggctcggcctgggtctcaggtacatttgctcatgtggtgaagagtcaaaatctgttgtctccttatttaatgattatttgaagggctggaacaagattcaaccagggttgccaaaaccacgcttgtttactgtgggtcgtcttgatgttgccacggctggtctgataatagtcacaaatgatggtgagtttgctcaaaagcttgcacatccttcttcaaatgtaacaaaagaatatgtggtgactattgatggtgccgtgcacaaaaaacatctcatagctatcagtgaaggcacaaaaattgatggggtcatgtgcattcctgatttagtagaaccattggctgcccaatcagatacaagaaagacccgcctaaggatagtggttcatgaaggacggaatcatgaagttcgtgaacttgtacagaatgcagggctacaggtttatgcattgaaacgtgttcggataggcaggttcaggcttccagcagatctgggaattgggaagtttgttgagctcaaacaggctgatatcaaggcactagatggcaacaactagagatgacatctgatgtggctaataagcgcatcttgtccaaagatggtagtaatcctcaaagtcacaatacatgagctgctactcaactcagaaagcttgtgaatgttctggatgtccattggtggtggtggctgatgatcaagtgtggcaaacatgttttgccttgaagaacttgtgaactactccatacttcgcctgcgctgcgaatctccacatcatatcaaacggcagaaccaagtccgcgatgcagcagtcgtttggtgaggatggaacattgtcaaatagcgatcttctgttggcatatacattttactctctattctaaattataatttttttagatgcattgtttttactaaattaaaatatcttatagtttagaatgcatcttgtccaacaggtagtcaataatggcagacgagttatatttggccaaattacattgtactccgtgtaccgagaactgtttttttaagaatcctttattgaccaggaatttttttcttgtaattgtggcactgttatttctatagtcatgagaatcccttcatttttagggctagtttggga

SEQ ID NO: 214725 - DNA, 2312 bp, Zea Mays
taacgctctgcattcgcggcgctatcagttccgcacgccactctggtgccaggaatattccgctcctcctgccctccgccctcgacccttccgcaaacccagctctctgctggcagttcgtgagggcagcatgagggcgccgctgctgctatgggcggccgccacgtggctggccgtcagcgccgtggcgcaccctggcagacgtggcggcggcggcggggagcagccgctgtcgaggatcgccgtcgagagcgcggtcctcgccgtcgacgatgcggcgcacgtcagggcgtcccccttggtactggggctcaagggcgagagcagcgaatgggtggacgtggagttcttccatcccgacccatccagcgacgactggatcggtgtcttctctcccgcggatttcagtgctgcgatctgtgagcctgagaatccgaggcagtctcctccagtgctttgctctgcacctatcaagtaccagtttgcaaccttcaaaaatgatgggtataacaagaccggaaagggctacctgaagcttcagctgatcaaccagaggggagatttctcgttcgcacttttttcaggaggcctcttgaagcccaagctgattgccgtctccaacaaggtggcatttgcgaatccgaaggcgccggtgtacccacgtttggcgcaaggcaagtcttggaatgaaatgacagtaacctggacaagtggctatgatattacagaagcggttcctttcgttgaatggggcgagaaaggcggacgccggtttcttgctccagctggaactctaacgtttgacagaaacagcatgtgtggtgcaccagcgcgaactgttggttggcgccatcctggctacatccatactagctacctgaaggatctgtggccagactcgcggtacacttacaggcttggccacaggctaatgaatgggacccgcgtctggagcaaatcatacagcttcagagcatcaccttaccctggacaagattctttgcagcgagttgtcatatttggagacatgggaaaggcagaggcagatggttcaaatgagttcaacaacttccagccaggttcactgaatactacgtaccagatcacgagtgacatagaaaacatcgacatggtggtccacatcggggacatctgctacgcgaacggctacttgtctcagtgggatcagttcactgcacagatcgaaccgattgcttcgacggtgccatacatggttggcagtggtaaccacgagagggattggcctggcaccggttcattctacggcaacctcgactccggcggagaatgcggcgtccctgcccaaaccgtgttctacactccggctgagaaccgcgcaaagttctggtacgcaacggactacggcatgttcaggttctgcgtcgctcacacggaggaggactggaggcccgggaccgagcagtacaggttcatcgagcggtgcctgtcgtccgtcgacaggcagaagcagccgtggctcgtcttcctcgcgcaccgcgtccttgggtactcgtcctgcgcctactacgagtcggagggcacgttcgaggagcccatggggcgggaagcgctgcaggagctctggcagaagtacaaggtcgacctcgccttctatggacacgtccacagctacgagaggacgtgcccagtctaccagagccagtgcgtcgtcgacgcgtcggaccactacagcgggccgttccaggcgacgacgcacgtcgtggtcggcggcgcgggagccagcctctcggagttcgccgcctcgaagatccagtggagccacttcaccgacttcgaccacggcttcgtcaagctcaccgccttcaaccactcgtcgctgctgttcgagtacaagaagagccgcgacggcaacgtgtacgaccgtttcaccatctcgcgcgactaccgggacgtcctcgcttgctccgtcgacaactgcccccggaccacactggcctcatgaagcctcacgatcgcggtggttttcacttttcagacaagggattcggtccgtgcggtgggtctcttgcagggcagcagcgattcaagttactgtacatagttttttttttctttttttctttttttggtagtgcgccaataaatgaggcgttttctttactgcctccgttacctgcatgtgaaactatgttgttctacccgtagctaaaatatgttttagtatgagaagggttaaccaaaacgttttggtttattttccgggacactgccgaaaacgagagaccgaccaatatttgtaatctacaacggctattaaggtcaaacaccag

SEQ ID NO: 214726 - DNA, 2428 bp, Zea Mays
aacaagtggtcagggaattcaggtgcatctgctgtttgttttaggctctctgctggcagttcgtgagggcagcatgagggcgccgctgctgctatgggcggccgccacgtggctggccgtcagcgccgtggcgcaccctggcagacgtggcggcggcggcggggagcagccgctgtcgaggatcgccgtcgagagcgcggtcctcgccgtcgacgatgcggcgcacgtcagggcgtcccccttggtactggggctcaagggcgagagcagcgaatgggtggacgtggagttcttccatcccgacccatccagcgacgactggatcggtgtcttctctcccgcggatttcagtgctgcgatctgtgagcctgagaatccgaggcagtctcctccagtgctttgctctgcacctatcaagtaccagtttgcaaccttcaaaaatgatgggtataacaagaccggaaagggctacctgaagcttcagctgatcaaccagaggggagatttctcgttcgcacttttttcaggaggcctcttgaagcccaagctgattgccgtctccaacaaggtggcatttgcgaatccgaaggcgccggtgtacccacgtttggcgcaagatgacagtaacctggacaagtggctatgatattacagaagcggttcctttcgttgaatggggcgagaaaggcggacgccggtttcttgctccagctggaactctaacgtttgacagaaacagcatgtgtggtgcaccagcgcgaactgttggttggcgccatcctggctacatccatactagctacctgaaggatctgtggccagactcgcggtacacttacaggcttggccacaggctaatgaatgggacccgcgtctggagcaaatcatacagcttcagagcatcaccttaccctggacaagattctttgcagcgagttgtcatatttggagacatgggaaaggcagaggcagatggttcaaatgagttcaacaacttccagccaggttcactgaatactacgtaccagatcacgagtgacatagaaaacatcgacatggtggtccacatcggggacatctgctacgcgaacggctacttgtctcagtgggatcagttcactgcacagatcgaaccgattgcttcgacggtgccatacatggttggcaggtcagctgagtgcctctcagttcgatactctctcatctcatgtccctcccatgtatacaatactgcttacaagaagaggagcttctgcagtggtaaccacgagagggattggcctggcaccggttcattctacggcaacctcgactccggcggagaatgcggcgtccctgcccaaaccgtgttctacactccggctgagaaccgcgcaaagttctggtacgcaacggactacggcatgttcaggttctgcgtcgctcacacggaggaggactggaggcccgggaccgagcagtacaggttcatcgagcggtgcctgtcgtccgtcgacaggcagaagcagccgtggctcgtcttcctcgcgcaccgcgtccttgggtactcgtcctgcgcctactacgagtcggagggcacgttcgaggagcccatggggcgggaagcgctgcaggagctctggcagaagtacaaggtcgacctcgccttctatggacacgtccacagctacgagaggacgtgcccagtctaccaggtgcgccttcatcagcttccatctacagccagcgaacaagtgcttgtaattcatcctacagagagccttgactgtaatcttccaaccaatttttctgcagagccagtgcgtcgtcgacgcgtcggaccactacagcgggccgttccaggcgacgacgcacgtcgtggtcggcggcgcgggagccagcctctcggagttcgccgcctcgaagatccagtggagccacttcaccgacttcgaccacggcttcgtcaagctcaccgccttcaaccactcgtcgctgctgttcgagtacaagaagagccgcgacggcaacgtgtacgaccgtttcaccatctcgcgcgactaccgggacgtcctcgcttgctccgtcgacaactgcccccggaccacactggcctcatgaagcctcacgatcgcggtggttttcacttttcagacaagggattcggtccgtgcggtgggtctcttgcagggcagcagcgattcaagttactgtacatagttttttttttctttttttctttttttggtagtgcgccaataaatgaggcgttttctttactgcctccgttacctgcatgtgaaactatgttgttctacccgtagctaaaatatgttttagtatgagaagggttaaccaaaacgttttggtttattttccgggacactgccgaaaacgagagaccgaccaatatttgtaatctacaacggctattaaggtcaaacaccag

SEQ ID NO: 214727 - DNA, 977 bp, Zea Mays
gggaccagcatgcagctgatgaaaggatacgtttagaggagctccgtagcaaggttttatcagaaggacatggagttagttacttggactctgaggaggaattgtctctccctgagactgggtttcaactgttccagaagtatgctgagcagattcagaaatggggctggatcatcagcggcgggagcaattcatctgaatcattcaaaaagaacatgaacattctgaagagacaagtccgtcttgtcactcttgttgctgttccatgtattttcggtgtcaaattgactgggaaagatctcatggagtttatttggcagcttgacgagactgatggatcgtcagatatgcccccagcagttctccgtattctgaacttcaaagcatgcagaggagcgatcatgtttggcgaccccttgctaccatctgagtgctgtctgattattgaagaactgaaagcaacatctctatgcttccagtgtgctcatggtcgcccaaccactgtccccatcttgaacatcgcatccctccacgatgagctggcgaggctccaaatgctgagtggaaggaaggcagagacctggcacggcttggggcaccatgagcccagccttgagcgtgctcacatgcgcctcgaacgactgagaaagctacgccgaggcctgtagccatagtggtttgaatcagataaaagggtgtgtgtttcgtatagtttgtagagaagcgagtgaaatctcagtgtgctctataattgtacatatactagatattcattcatgacaaagaggtaaaacggcgcccatcaccgtcacctgacaggcgagcggggttttccacggcatgttgtaaagtttgtacattctggttgccatgaaaatctatgtaaaattcaattcaaccgtgccaatgtgattagctgaagttgagatgggtgtgatacattcgagcaagtttaagcaggctttatgatgttgcta

SEQ ID NO: 214728 - DNA, 5324 bp, Zea Mays
gacgatgtggtaatcaaaacgaaaaaattcggaactggaaccacatcccccgtgaaggcgaggaggggccagcagcagtagggtagggtggaactggaactcaaagctgatacttcttccctagtctcctcggcgggcgacacgctcggatcgatccccgccgccgcagcctccctcaccctctccaatccaatccgcagctacccaatggcgacggagctgctccccgtggtggacctgcgcgtgctctcacagcccgacctggacgcgctcgccgccgcctccgcgcacgccctggcgccgcggacctgccccgacgccgacccgctcccgcctctcaagatcgaccgcgccgtcttcaacgagagcgccggttcccggaagcagaccttctcccgccgccgcctcgccgcctcgccctcgtccgcccgtcactcctcctccgcgcagacgtccaccgggcggaagaacgaccccgagggcgacctcgtcgcgtaccacctccgccgtctcttcgtccccgatgacccctcgctcccgccccctccagaaccgcaaaccctagccctactacaagagccctccccccctccgccgccggcccccgaccccgaccgggagaccaccaacgccaagggggtctccgttgaccttctcgggcttgcggcgatgccggagccctacgatgccgagctgcacaggcggacggccggtatggcctccggtaccgacctgcagggtttcatcgacagcctcgcaggggagtgggtaagccagaagaagcggaggaagaatgtggacgcgtccttcttcggggatcacctccctcgcgggtggaagctgcagctcgggctcaagcgaaacagtggatccatctgggtgcgctgcttcagctacgtgagccccaagggacgtcacttttctacttgcaaagaggtttctgcatacctcatgtcacttcttgggtatccagagctcaaaccagccgctaatcagtatgaaagcacaggacaacattactcgagtgccaacaatggtgatggtagtgttttaggtttcaaagatcaaattggtttaattacggacaagacaaatgtacagcaccacttgtcatgtcatgaaaagagggctaaaaggcgcagaactagcaagtttggtgagccagtagtgggaaaagatggtaaatttgaatgtcctatttgttttaagaccttcgaggaggaatcccggtactttggccatgttggagctcatgcaaggtatgaagggttgactcctgaagcatttgtggataagactacttatagaagggcaactaataatcacttggcagaaatttcatttggtcttcaagagttacctgaatcacatggacaaaacaataaggtttcttatggtgaaacagtctttcggcaccataatcattcaaatgaacatgttgacaataactctacggccactgagctttttagtacaaattatccagataatttcattagaccaaataaaacctggggtaggtctgaagaaggtccttccttcaatgatgcttcaagtgtatgtagatacacaaattttacgggccatgccgatttgacagttccagaaagagcatcaatctctaataatcaaagtgttagcaacattaatggttttttgggagtgtctatgtttagtgatcagccaggaagtaaccatgttatcagacctactgtctttggaacaaataatacggtggaaggaagagatgtcaacctcaattcatgtgtaaatacaatatcttttcctattgctaatgcaaataatgaaacatcagctggcctgaatgaagctaatcggttatctactactgcaaaatgttttagtggcagttctaataacaatgatggtgcatctagtgcatcttcccattgcggatcgaccaataaaatctatagttcgtatggcacaacaagcaaaacccaagctgttggctccagatgcatcagtggaagctatgagccttatggtgaagattgtggtgctcttaaagttaacccttttgccagcaagaacaatactgctgtgtatcagtctaaattgggcacacaacctgtctatgttgtggcaactagggcaaattgttttgcttctggttcgatgcagacaaataacagtgataaagaacttgcatccagtgccatggaacggattgatagcgtgaagaacagaacaagtaaagaaacaggatttgtcactgaagcttataacaatgatgcctttagtggtggtattactgaaaagggttttgcgcagttcagtaacagttctactcacataaagcccaatgcttctggccattgttcactacctgaatcaaaaactccaacaaatggaagtgatatcaactgcatcaagggctcttcggttaatagaggtgatgttagcttcacaaatggctcgtttgtcaataggcccatcaacaacaatgaaccaaatgtagctaggcttgaggtgatggagaagttgaataatgtgatgcaaaaccgttataatgatcacgctcctggttttgatcctcatgctgcagctagtgctagccggaatgccaatggtcttatgcctatgcatgccaattttggttgcatgtcctctacagttcaatctgttgctaatgtttcaacgaccagcacatctcaagatcagggaatgtcgtgtggtggatgcgcagcaagcgtgaaacgtattctggagagtgagccccaggtacggtcagcaactgttaaccttgccactgagatggcagtcgtctgggcagtgcccgaggatagtgttgttcaggattggaaggagcagctgggtgagaagcttgccaatcagttgacgacatgtggctataaatccaatcttcgagattcttcaaaggttggttcacaaacagttttcgaaagaaagatgcaagacaaacttgaacagctgaaacaaagtggtagagaacttgctgtatcatgggcattatgtgcggtttgccttgtgggacacatttctcacctttttggagttaatatgccactgatgcacgtcattcattccactggatttcatttgtctctgtcaatatttacatttgtcggtcctggtcgaagactaatacttgatggcctaaagagtctgttgaaggggtctccgaacatgaatacgctggttggtttaggtgctttgtcatcctttgcagtcagctcaattgcagccttcattccgaagctggggtggaagacattttttgaggaaccagttatgttgatagcttttgttcttctagggaagaatctggagcagagggcaaaacttaaagctaccagtgatatgactggactgcttagtattcttccatctaaagcacgcctaatggtggataatgatgctgagaaatcatcattgattgaagtcccatgtgatactctagctgttggggactatgttgttgtgctacctggggatcacatcccagcagacggtattgtgaaagctggaaggagtacagttgatgaatcaagtttgacaggtgaacctatgcctgtaacaaagataacaggggcagaagtatcagcaggaagtattaacttgaatggtaaactcactgttgaagttagaagacctggtggtgagactgtcatgtctgacatacttcacttagttgaagaagcccagacaagggcggcccctgttcaacgattggctgacaaggttgcagggaactttacatatggagtcatggcactttctgctgctacttacatgttctggagtattttgggttctcaacttgtacctgctgctatccaacatggaggtgcaatgtctttggcattacaactttcttgcagtgttctggtaattgcttgtccttgtgctcttgggcttgccactcccactgctgtactggttggcacttcattaggtgcaacaagaggacttcttttacgtggtggggatgttttggagaagttctctgatgttgatgccgttgtgtttgacaagactggaactttaacaattggtagacctgtgataactaaagtaataccttctagaggcatgggcgatgcgaatacaaaggatttgggggccaaccagtgggcagaggctgacattctgagttttgctgctggagtggaatcaaatacaaaccacccgcttggaaaagccatcatggaagctgcaggggctgccaactgcgtcattatgaaggcaaatgatggatccttcatggaagaaccaggatctggtgctgtggctaccattggtgagaagcaggtttctgttggaacattagattggattagaaggcatggggtcattcacaaccccttcccagaagcagagcattttggccagtctgttgcatatgtagcagtgaatggtgctctggctggtcttatttgttttgaggataagctcaggggagattctcgtcaagttatcgagacactatctaaacaaggaattagtgtatatatgttatctggggacaaggaaagtgctgctatgaatgtggcttcagttgtcggtatccaggcagacaaggttcttgctgaagttaaaccacatgagaaaaagaagttcatatctgaactccagaaagagcacaaggtagtcgccatggttggtgacggcattaatgatgccgcagcactagcttcagctgatgttggaatcgcaatgggtggaggtgttggggcagctagtgatgtatcttcagttgtacttatgggcaacaggttatcccagcttatcgatgctttagagttgagtaaagagaccatgaagacggtgaagcaaaatctttggtgggctttcctgtataacattgttggactacccattgctgctggagcattgcttccagctacggggacgatactgacaccatcaatagctggagctctgatgggttttagttcggtcggtgtgatggccaactcgttgcttttgagggtgaggctgagctcaaggcggaagcgagaaccactgaaagccatctctgatgaggttgagaaaaattactcatcgaaatggagtacctgagtagttcggatcttagaccatgttcacgttcactcattcatatgatttggacacacgcatcaaaggcagttgtcagttgaacaaatgaaacagatgtagtatgcaattgctgaggtcagtcagttcctgtggtttggtagatcttcatggtgtgctataatataataccccctctattccaatttataaattttttgacttttttttaccaagtttgattagcttgtcttatttattttttttcgaaaaaatagaaa

SEQ ID NO: 214729 - DNA, 3231 bp, Zea Mays
ctgcagtgcacgcaccaacccaatccaccccccctcggcccacggcggcaccactacaccagtcagtcaccagaccactctgccgtcgccgcctacctcggcaacagtcaggacttaggacgcaactcatccccgccgcgagcaacgccaatgctccgaccgctacacgctacagccgccgccaccgctagctaggcccagccgcctcctcccttcccctccacgacgatggacccgaccacgcccgtccttgcgctctccaaggccttcgcctcctcccgcaccaagcccttcctcctcctcgccccgcaccgccgccgctccctcttcgccgcccgcgcgtctgccccctcctcgtcctccgtgccgggcgacctcctcatctcgctcgcgcggctcgcgctccgcggccccggaccccccgcggcgcctcggcggtggttcgcgagtgtctcttctgcctcgcctctcgcctcgggtggtccgccccgcggcggaggcggtcgggggaacggtgatggtgacggcggtggtggtggcgacggctggaagcgcccgcgcgcttcccagggagcgggtgtggtggaggaagcggcagcgcagggagccgatgtcatcgtccttgacgttgggggaatgtcgtgtggtggatgcgcagcaagcgtgaaacgtattctggagagtgagccccaggtacggtcagcaactgttaaccttgccactgagatggcagtcgtctgggcagtgcccgaggatagtgttgttcaggattggaaggagcagctgggtgagaagcttgccaatcagttgacgacatgtggctataaatccaatcttcgagattcttcaaaggttggttcacaaacagttttcgaaagaaagatgcaagacaaacttgaacagctgaaacaaagtggtagagaacttgctgtatcatgggcattatgtgcggtttgccttgtgggacacatttctcacctttttggagttaatatgccactgatgcacgtcattcattccactggatttcatttgtctctgtcaatatttacatttgtcggtcctggtcgaagactaatacttgatggcctaaagagtctgttgaaggggtctccgaacatgaatacgctggttggtttaggtgctttgtcatcctttgcagtcagctcaattgcagccttcattccgaagctggggtggaagacattttttgaggaaccagttatgttgatagcttttgttcttctagggaagaatctggagcagagggcaaaacttaaagctaccagtgatatgactggactgcttagtattcttccatctaaagcacgcctaatggtggataatgatgctgagaaatcatcattgattgaagtcccatgtgatactctagctgttggggactatgttgttgtgctacctggggatcacatcccagcagacggtattgtgaaagctggaaggagtacagttgatgaatcaagtttgacaggtgaacctatgcctgtaacaaagataacaggggcagaagtatcagcaggaagtattaacttgaatggtaaactcactgttgaagttagaagacctggtggtgagactgtcatgtctgacatacttcacttagttgaagaagcccagacaagggcggcccctgttcaacgattggctgacaaggttgcagggaactttacatatggagtcatggcactttctgctgctacttacatgttctggagtattttgggttctcaacttgtacctgctgctatccaacatggaggtaattgcttgtccttgtgctcttgggcttgccactcccactgctgtactggttggcacttcattaggtgcaacaagaggacttcttttacgtggtggggatgttttggagaagttctctgatgttgatgccgttgtgtttgacaagactggaactttaacaattggtagacctgtgataactaaagtaataccttctagaggcatgggcgatgcgaatacaaaggatttgggggccaaccagtgggcagaggctgacattctgagttttgctgctggagtggaatcaaatacaaaccacccgcttggaaaagccatcatggaagctgcaggggctgccaactgcgtcattatgaaggcaaatgatggatccttcatggaagaaccaggatctggtgctgtggctaccattggtgagaagcaggtttctgttggaacattagattggattagaaggcatggggtcattcacaaccccttcccagaagcagagcattttggccagtctgttgcatatgtagcagtgaatggtgctctggctggtcttatttgttttgaggataagctcaggggagattctcgtcaagttatcgagacactatctaaacaaggaattagtgtatatatgttatctggggacaaggaaagtgctgctatgaatgtggcttcagttgtcggtatccaggcagacaaggttcttgctgaagttaaaccacatgagaaaaagaagttcatatctgaactccagaaagagcacaaggtagtcgccatggttggtgacggcattaatgatgccgcagcactagcttcagctgatgttggaatcgcaatgggtggaggtgttggggcagctagtgatgtatcttcagttgtacttatgggcaacaggttatcccagcttatcgatgctttagagttgagtaaagagaccatgaagacggtgaagcaaaatctttggtgggctttcctgtataacattgttggactacccattgctgctggagcattgcttccagctacggggacgatactgacaccatcaatagctggagctctgatgggttttagttcggtcggtgtgatggccaactcgttgcttttgagggtgaggctgagctcaaggcggaagcgagaaccactgaaagccatctctgatgaggttgagaaaaattactcatcgaaatggagtacctgagtagttcggatcttagaccatgttcacgttcactcattcatatgatttggacacacgcatcaaaggcagttgtcagttgaacaaatgaaacagatgtagtatgcaattgctgaggtcagtcagttcctgtggtttggtagatcttcatggtgtgctataatataataccccctctattccaatttataaattttttgacttttttttaccaagtttgattagcttgtcttatttattttttttcgaaaaaatagaaa

SEQ ID NO: 214730 - DNA, 3250 bp, Zea Mays
ctgcagtgcacgcaccaacccaatccaccccccctcggcccacggcggcaccactacaccagtcagtcaccagaccactctgccgtcgccgcctacctcggcaacagtcaggacttaggacgcaactcatccccgccgcgagcaacgccaatgctccgaccgctacacgctacagccgccgccaccgctagctaggcccagccgcctcctcccttcccctccacgacgatggacccgaccacgcccgtccttgcgctctccaaggccttcgcctcctcccgcaccaagcccttcctcctcctcgccccgcaccgccgccgctccctcttcgccgcccgcgcgtctgccccctcctcgtcctccgtgccgggcgacctcctcatctcgctcgcgcggctcgcgctccgcggccccggaccccccgcggcgcctcggcggtggttcgcgagtgtctcttctgcctcgcctctcgcctcgggtggtccgccccgcggcggaggcggtcgggggaacggtgatggtgacggcggtggtggtggcgacggctggaagcgcccgcgcgcttcccagggagcgggtgtggtggaggaagcggcagcgcagggagccgatgtcatcgtccttgacgttgggggaatgtcgtgtggtggatgcgcagcaagcgtgaaacgtattctggagagtgagccccaggtacggtcagcaactgttaaccttgccactgagatggcagtcgtctgggcagtgcccgaggatagtgttgttcaggattggaaggagcagctgggtgagaagcttgccaatcagttgacgacatgtggctataaatccaatcttcgagattcttcaaaggttggttcacaaacagttttcgaaagaaagatgcaagacaaacttgaacagctgaaacaaagtggtagagaacttgctgtatcatgggcattatgtgcggtttgccttgtgggacacatttctcacctttttggagttaatatgccactgatgcacgtcattcattccactggatttcatttgtctctgtcaatatttacatttgtcggtcctggtcgaagactaatacttgatggcctaaagagtctgttgaaggggtctccgaacatgaatacgctggttggtttaggtgctttgtcatcctttgcagtcagctcaattgcagccttcattccgaagctggggtggaagacattttttgaggaaccagttatgttgatagcttttgttcttctagggaagaatctggagcagagggcaaaacttaaagctaccagtgatatgactggactgcttagtattcttccatctaaagcacgcctaatggtggataatgatgctgagaaatcatcattgattgaagtcccatgtgatactctagctgttggggactatgttgttgtgctacctggggatcacatcccagcagacggtattgtgaaagctggaaggagtacagttgatgaatcaagtttgacaggtgaacctatgcctgtaacaaagataacaggggcagaagtatcagcaggaagtattaacttgaatggtaaactcactgttgaagttagaagacctggtggtgagactgtcatgtctgacatacttcacttagttgaagaagcccagacaagggcggcccctgttcaacgattggctgacaaggttgcagggaactttacatatggagtcatggcactttctgctgctacttacatgttctggagtattttgggttctcaacttgtacctgctgctatccaacatggaggtgcaatgtctttggcattacaactttcttgcagtgttctggtaattgcttgtccttgtgctcttgggcttgccactcccactgctgtactggttggcacttcattaggtgcaacaagaggacttcttttacgtggtggggatgttttggagaagttctctgatgttgatgccgttgtgtttgacaagactggaactttaacaattggtagacctgtgataactaaagtaataccttctagaggcatgggcgatgcgaatacaaaggatttgggggccaaccagtgggcagaggctgacattctgagttttgctgctggagtggaatcaaatacaaaccacccgcttggaaaagccatcatggaagctgcaggggctgccaactgcgtcattatgaaggcaaatgatggatccttcatggaagaaccaggatctggtgctgtggctaccattggtgagaagcaggtttctgttggaacattagattggattagaaggcatggggtcattcacaaccccttcccagaagcagagcattttggccagtctgttgcatatgtagcagtgaatggtgctctggctggtcttatttgttttgaggataagctcaggggagattctcgtcaagttatcgagacactatctaaacaaggaattagtgtatatatgttatctggggacaaggaaagtgctgctatgaatgtggcttcagttgtcggtatccaggcagacaaggttcttgctgaagttaaaccacatgagaaaaagaagttcatatctgaactccagaaagagcacaaggtagtcgccatggttggtgacggcattaatgatgccgcagcactagcttcagctgatgttggaatcgcaatgggtggaggtgttggggcagctagtgatgtatcttcagttgtacttatgggcaacaggttatcccagcttatcgatgctttagagttgagtaaagagaccatgaagacggtgaagcaaaatctttggttggactacccattgctgctggagcattgcttccagctacggggacgatactgacaccatcaatagctggagctctgatgggttttagttcggtcggtgtgatggccaactcgttgcttttgagggtgaggctgagctcaaggcggaagcgagaaccactgaaagccatctctgatgaggttgagaaaaattactcatcgaaatggagtacctgagtagttcggatcttagaccatgttcacgttcactcattcatatgatttggacacacgcatcaaaggcagttgtcagttgaacaaatgaaacagatgtagtatgcaattgctgaggtcagtcagttcctgtggtttggtagatcttcatggtgtgctataatataataccccctctattccaatttataaattttttgacttttttttaccaagtttgattagcttgtcttatttattttttttcgaaaaaatagaaa

SEQ ID NO: 214731 - DNA, 3145 bp, Zea Mays
caccagaccactctgccgtcgccgcctacctcggcaacagtcaggacttaggacgcaactcatccccgccgcgagcaacgccaatgctccgaccgctacacgctacagccgccgccaccgctagctaggcccagccgcctcctcccttcccctccacgacgatggacccgaccacgcccgtccttgcgctctccaaggccttcgcctcctcccgcaccaagcccttcctcctcctcgccccgcaccgccgccgctccctcttcgccgcccgcgcgtctgccccctcctcgtcctccgtgccgggcgacctcctcatctcgctcgcgcggctcgcgctccgcggccccggaccccccgcggcgcctcggcggtggttcgcgagtgtctcttctgcctcgcctctcgcctcgggtggtccgccccgcggcggaggcggtcgggggaacggtgatggtgacggcggtggtggtggcgacggctggaagcgcccgcgcgcttcccagggagcgggtgtggtggaggaagcggcagcgcagggagccgatgtcatcgtccttgacgttgggggaatgtcgtgtggtggatgcgcagcaagcgtgaaacgtattctggagagtgagccccaggtacggtcagcaactgttaaccttgccactgagatggcagtcgtctgggcagtgcccgaggatagtgttgttcaggattggaaggagcagctgggtgagaagcttgccaatcagttgacgacatgtggctataaatccaatcttcgagattcttcaaaggttggttcacaaacagttttcgaaagaaagatgcaagacaaacttgaacagctgaaacaaagtggtagagaacttgctgtatcatgggcattatgtgcggtttgccttgtgggacacatttctcacctttttggagttaatatgccactgatgcacgtcattcattccactggatttcatttgtctctgtcaatatttacatttgtcggtcctggtcgaagactaatacttgatggcctaaagagtctgttgaaggggtctccgaacatgaatacgctggttggtttaggtgctttgtcatcctttgcagtcagctcaattgcagccttcattccgaagctgaatctggagcagagggcaaaacttaaagctaccagtgatatgactggactgcttagtattcttccatctaaagcacgcctaatggtggataatgatgctgagaaatcatcattgattgaagtcccatgtgatactctagctgttggggactatgttgttgtgctacctggggatcacatcccagcagacggtattgtgaaagctggaaggagtacagttgatgaatcaagtttgacaggtgaacctatgcctgtaacaaagataacaggggcagaagtatcagcaggaagtattaacttgaatggtaaactcactgttgaagttagaagacctggtggtgagactgtcatgtctgacatacttcacttagttgaagaagcccagacaagggcggcccctgttcaacgattggctgacaaggttgcagggaactttacatatggagtcatggcactttctgctgctacttacatgttctggagtattttgggttctcaacttgtacctgctgctatccaacatggaggtgcaatgtctttggcattacaactttcttgcagtgttctggtaattgcttgtccttgtgctcttgggcttgccactcccactgctgtactggttggcacttcattaggtgcaacaagaggacttcttttacgtggtggggatgttttggagaagttctctgatgttgatgccgttgtgtttgacaagactggaactttaacaattggtagacctgtgataactaaagtaataccttctagaggcatgggcgatgcgaatacaaaggatttgggggccaaccagtgggcagaggctgacattctgagttttgctgctggagtggaatcaaatacaaaccacccgcttggaaaagccatcatggaagctgcaggggctgccaactgcgtcattatgaaggcaaatgatggatccttcatggaagaaccaggatctggtgctgtggctaccattggtgagaagcaggtttctgttggaacattagattggattagaaggcatggggtcattcacaaccccttcccagaagcagagcattttggccagtctgttgcatatgtagcagtgaatggtgctctggctggtcttatttgttttgaggataagctcaggggagattctcgtcaagttatcgagacactatctaaacaaggaattagtgtatatatgttatctggggacaaggaaagtgctgctatgaatgtggcttcagttgtcggtatccaggcagacaaggttcttgctgaagttaaaccacatgagaaaaagaagttcatatctgaactccagaaagagcacaaggtagtcgccatggttggtgacggcattaatgatgccgcagcactagcttcagctgatgttggaatcgcaatgggtggaggtgttggggcagctagtgatgtatcttcagttgtacttatgggcaacaggttatcccagcttatcgatgctttagagttgagtaaagagaccatgaagacggtgaagcaaaatctttggtgggctttcctgtataacattgttggactacccattgctgctggagcattgcttccagctacggggacgatactgacaccatcaatagctggagctctgatgggttttagttcggtcggtgtgatggccaactcgttgcttttgagggtgaggctgagctcaaggcggaagcgagaaccactgaaagccatctctgatgaggttgagaaaaattactcatcgaaatggagtacctgagtagttcggatcttagaccatgttcacgttcactcattcatatgatttggacacacgcatcaaaggcagttgtcagttgaacaaatgaaacagatgtagtatgcaattgctgaggtcagtcagttcctgtggtttggtagatcttcatggtgtgctataatataataccccctctattccaatttataaattttttgacttttttttaccaagtttgattagcttgtcttatttattttttttcgaaaaaatagaaa

SEQ ID NO: 214732 - DNA, 3204 bp, Zea Mays
ctgccgtcgccgcctacctcggcaacagtcaggacttaggacgcaactcatccccgccgcgagcaacgccaatgctccgaccgctacacgctacagccgccgccaccgctagctaggcccagccgcctcctcccttcccctccacgacgatggacccgaccacgcccgtccttgcgctctccaaggccttcgcctcctcccgcaccaagcccttcctcctcctcgccccgcaccgccgccgctccctcttcgccgcccgcgcgtctgccccctcctcgtcctccgtgccgggcgacctcctcatctcgctcgcgcggctcgcgctccgcggccccggaccccccgcggcgcctcggcggtggttcgcgagtgtctcttctgcctcgcctctcgcctcgggtggtccgccccgcggcggaggcggtcgggggaacggtgatggtgacggcggtggtggtggcgacggctggaagcgcccgcgcgcttcccagggagcgggtgtggtggaggaagcggcagcgcagggagccgatgtcatcgtccttgacgttgggggaatgtcgtgtggtggatgcgcagcaagcgtgaaacgtattctggagagtgagccccaggtacggtcagcaactgttaaccttgccactgagatggcagtcgtctgggcagtgcccgaggatagtgttgttcaggattggaaggagcagctgggtgagaagcttgccaatcagttgacgacatgtggctataaatccaatcttcgagattcttcaaaggttggttcacaaacagttttcgaaagaaagatgcaagacaaacttgaacagctgaaacaaagtggtagagaacttgctgtatcatgggcattatgtgcggtttgccttgtgggacacatttctcacctttttggagttaatatgccactgatgcacgtcattcattccactggatttcatttgtctctgtcaatatttacatttgtcggtcctggtcgaagactaatacttgatggcctaaagagtctgttgaaggggtctccgaacatgaatacgctggttggtttaggtgctttgtcatcctttgcagtcagctcaattgcagccttcattccgaagctggggtggaagacattttttgaggaaccagttatgttgatagcttttgttcttctagggaagaatctggagcagagggcaaaacttaaagctaccagtgatatgactggactgcttagtattcttccatctaaagcacgcctaatggtggataatgatgctgagaaatcatcattgattgaagtcccatgtgatactctagctgttggggactatgttgttgtgctacctggggatcacatcccagcagacggtattgtgaaagctggaaggagtacagttgatgaatcaagtttgacaggtgaacctatgcctgtaacaaagataacaggggcagaagtatcagcaggaagtattaacttgaatggtaaactcactgttgaagttagaagacctggtggtgagactgtcatgtctgacatacttcacttagttgaagaagcccagacaagggcggcccctgttcaacgattggctgacaaggttgcagggaactttacatatggagtcatggcactttctgctgctacttacatgttctggagtattttgggttctcaacttgtacctgctgctatccaacatggaggtgcaatgtctttggcattacaactttcttgcagtgttctggtaattgcttgtccttgtgctcttgggcttgccactcccactgctgtactggttggcacttcattaggtgcaacaagaggacttcttttacgtggtggggatgttttggagaagttctctgatgttgatgccgttgtgtttgacaagactggaactttaacaattggtagacctgtgataactaaagtaataccttctagaggcatgggcgatgcgaatacaaaggatttgggggccaaccagtgggcagaggctgacattctgagttttgctgctggagtggaatcaaatacaaaccacccgcttggaaaagccatcatggaagctgcaggggctgccaactgcgtcattatgaaggcaaatgatggatccttcatggaagaaccaggatctggtgctgtggctaccattggtgagaagcaggtttctgttggaacattagattggattagaaggcatggggtcattcacaaccccttcccagaagcagagcattttggccagtctgttgcatatgtagcagtgaatggtgctctggctggtcttatttgttttgaggataagctcaggggagattctcgtcaagttatcgagacactatctaaacaaggaattagtgtatatatgttatctggggacaaggaaagtgctgctatgaatgtggcttcagttgtcggtatccaggcagacaaggttcttgctgaagttaaaccacatgagaaaaagaagttcatatctgaactccagaaagagcacaaggtagtcgccatggttggtgacggcattaatgatgccgcagcactagcttcagctgatgttggaatcgcaatgggtggaggtgttggggcagctagtgatgtatcttcagttgtacttatgggcaacaggttatcccagcttatcgatgctttagagttgagtaaagagaccatgaagacggtgaagcaaaatctttggtgggctttcctgtataacattttactctgcaggttggactacccattgctgctggagcattgcttccagctacggggacgatactgacaccatcaatagctggagctctgatgggttttagttcggtcggtgtgatggccaactcgttgcttttgagggtgaggctgagctcaaggcggaagcgagaaccactgaaagccatctctgatgaggttgagaaaaattactcatcgaaatggagtacctgagtagttcggatcttagaccatgttcacgttcactcattcatatgatttggacacacgcatcaaaggcagttgtcagttgaacaaatgaaacagatgtagtatgcaattgctgaggtcagtcagttcctgtggtttggtagatcttcatggtgtgctataatataataccccctctattccaatttataaattttttgacttttttttaccaagtttgattagcttgtcttatttattttttttcgaaaaaatagaaa

SEQ ID NO: 214733 - DNA, 826 bp, Zea Mays
gggggtgacttaggaagacaaatttggcaaaggaaaggataaatatgtgaaatcatttaaatgctattgttcttgctgaagttaaaccacatgagaaaaagaagttcatatctgaactccagaaagagcacaaggtagtcgccatggttggtgacggcattaatgatgccgcagcactagcttcagctgatgttggaatcgcaatgggtggaggtgttggggcagctagtgatgtatcttcagttgtacttatgggcaacaggttatcccagcttatcgatgctttagagttgagtaaagagaccatgaagacggtgaagcaaaatctttggtgggctttcctgtataacattgttggactacccattgctgctggagcattgcttccagctacggggacgatactgacaccatcaatagctggagctctgatgggttttagttcggtcggtgtgatggccaactcgttgcttttgagggtgaggctgagctcaaggcggaagcgagaaccactgaaagccatctctgatgaggttgagaaaaattactcatcgaaatggagtacctgagtagttcggatcttagaccatgttcacgttcactcattcatatgatttggacacacgcatcaaaggcagttgtcagttgaacaaatgaaacagatgtagtatgcaattgctgaggtcagtcagttcctgtggtttggtagatcttcatggtgtgctataatataataccccctctattccaatttataaattttttgacttttttttaccaagtttgattagcttgtcttatttattttttttcgaaaaaatagaaa

SEQ ID NO: 214734 - DNA, 1269 bp, Zea Mays
cagctcaagcacgccagccgcattctggttctgtacttctgtactctggttctatacggggtctccttcataccaccccagccttatctcttcaagtggtacgcatctctccctgtcagccttatctctcgcttcctgtccacagcaagccgcgccccagcccgtggccatcggcctcttcttcgccgcatgctctccttgctcgagctcgcccacttcctggtgcatcttcctcctcgcctcccatctcagggccaggctgctcggccacgcccagcagctccttgaacgcgtgcccctccgagcatcttgtccctttgttggttgccatctttcccagctccccagcgcaggtggctggctgtgcgttccccttgccggcgtcctcgttctccctgctcgtcggtccccgggaaaaaaaaacatctccctcacggctgctcccatggctgtctgcagccctagccgagctcgctctccccgcccagcagcaagcagctcctttcccctcgccatgaacgccgtcgatcccctactgcagttcctccacgtggtctggtcgtcgaccgcgcgcgtcacctgctcgtggttatgggaaaccagcgagcctctcctcacggcgtagtttccttgcatcatcgttcagcccgagatttagatgagaagaaagctttagcgaggcgcttgccaagtgcttggtgaatcacctcaaccggatgtggttgtcgatcttgcggagtcgagtcgagtttagtcgtggtacgctagctgattatgcgagctgaaggacatggatcagagcaaaccggtattggtggattaatcttgtggatgcatcaagccagcaccagaatggaagatgctcaccaagtggtcgtcaattaacaacactaacgtagtgtttatcccaggcaagctccggtgcatttgccacctccttgttgttttaaaacttttatcacttatatgctgcattaggtgataggagttgagtgatgaaacaattgatgtattgccattccttggaattcgattactattccttgatagagaactaatgaggcttagccctgcttagaaactaaaagttgtttcttttaaaaagaatgttgtgcaacattggatatgggttttatgaaaaaggaacttgcaataatgaaggcatcactcgcgatgatgaattcattattcgagtattgtacctctgtcaggtacatggtttgggtgttaaataataagatgagaccagacgttgagcaggaaaggtcg

SEQ ID NO: 214735 - DNA, 7434 bp, Zea Mays
gggcgtcggtggtggctgtatgagcatgtgaagctagttacaggcggcaagctgctttttcaagctctgatgcttctgccgacagggttgacaggctccagttgggatatgtctctggtgcaagagtgctgaagatgaaggagaggagctctttatgcgaaagtgcagccgatggaaactggggtttgaaatataaaaggaaaagaagcaagttaacagttagcccatctaatgagaatgaggctacctcaccaacatctgactctcgaatgagccatggttccaccaaaaagaagttgaagcatgacaataacatttctccatcagccaagaagataagagggcacgatgggtattttttcgagtgcgtagaatgtgatcttggtggcaatttgctatgttgtgatagctgtcctcgtgtttaccacttggaatgcctcaatcctcctcttaagcgtgcaccccctgggaagtggcaatgtccaagatgccgtccgaaaaaagttagcttgaagctgttaggtaatgcagatgttgacacttctaaacgtgaaaaaagtacaaggacatatgcaagtacggcatcagatagtccaccttcgcatacaaaagtctcctttaagaccaggaactccacacaagacaaaactggattaaacgaacaaggaaaagagtcatctggtggcacaatgaatgggggtgaaaccagtacgaagaataatgaagttgagaaaaagaagacactgatattacatttgaagaagcgttcaaccaaggaattgtcagagaacactaaaccctcgaagtcagaatttgttgaactttcagaagagaaaattgtaaaacatggaagtgttttgaaactcaagaaacatccacatcgtatggacttgtctccaagtaaatctaaaaccaggaggcaaagtagccagagagagagtaaaagatctggcacaaaaaagattaaatattccatgtctgatgatgacagtgtttcctcatcagaaccatcgacatctcttgataacagtgaatcaccaccaaaaagaaaacactcagatggaaaagcaccttcatccagtaccaagaaagggaaaaagaaagtgaaatttgttgagaaaaagcactctgaggagcagggcgtggtaggtgacaaaatgatgactacccaggaggatcagcaggtcgatcgcatcctaggctgccggcttcagatgagccaaatcaacccgccgtcccatgcttcattggagcagtttgaatcagctaatctccaggtggatggtatggttcttccacatgcttccgctggcattcctaataggcctcatgatggaacagagtcttctagaaatggtacaattgaggatatatgtgctgatgaatcagccaatcatagtggtcacaatttagaaatgcgaaaggatacggacagtaaatcccatgaaaaggagtcacataagcgagaacaagtcaagaagatattatcagtatgttctggtgatgagaccaatataatgaaagatgatcaagtagtcagagaaaatgtttcagcttccaaaaaaggtgaagatgagacatctgatttgccagcagaaaaggatgataccatacttccagtcaccagagcttgtacaatgatcaggaccaatcaagatcatacagatgaaagtaaacagcatgggaaaatagaacaaataacaaataaggactacaatgatgctggatatgagttcttgatcaaatgggttggaaaatcaaatattcacaacagttgggtttctgaatccgaggtaaaaatattagcaaaaaggaaactagaaaactacaaagcgaagtatggaatgagtttgataaacatttgcaaggaacagtggtgccagccacagcgagttattggtcttcgtgcttctgtagatgaagtggaagaggttttaatcaaatggtgtggtcttccttatgatgaatgcacttgggaaagatcagatgaacctaccctgatgaaatatagccatttggtcactcagttcaagaattttgaatgccaggctttggataaagatgtggtaaaagattatgcaaatgcaaggaaccgacatgagcttaatgtgttagttgatcagccaaaagaacttcagggcggcatgctcttccctcatcaattggaagcgttgaactggctgcggaaatgctggtacaagtcaaaaaatgttatccttgctgatgagatgggtcttggaaagacagtgtcagcttgtgcttttctatcatccctatattgtgaatttaagattaatttgccatgtcttgtcttggttcctctttctacaatgcccaattggatggctgaattttcatcttgggctcctcatttaaatgttgtggagtatcatggttctgcaaggtcaagatctatcattcgccagtatgagtggcatgcgggcgatgcaagccagattggcaaaacaaagagatcgtacaaattcaatgttttgcttaccacttatgaaatggtgcttgttgatgctgcatatcttcgttctgtctcatgggaagttcttatagttgatgagggacatcgcctgaagaattctagcagcaaactctttagtttacttaattcattctcatttcagcacagagttttgttgactggaactcccttacagaacaacattggtgaaatgtataacttattgaacttcttacagcctacttcttttccttctctatcatcatttgaggagaagtttaatgaccttacaacagcagaaaaagtagaggagctgaagaaacttgtagctcctcatatgcttcggagattgaaaaaagatgcaatgcaaaatatccccccaaagatagagcgaatggtacctgttgaattgacatcaatccaggctgaatactaccgtgctatgcttacaaagaactatcaagtactgcgcaacattggaaaaggtggtgcacaccagtctttattgaacatagtaatgcagcttcggaaagtctgcaaccatccctatcttattcctggaactgaacctgaatctggttcacctgagtttctgcatgaaatgcgcataaaagcctcagcaaagctaactttgttgcatttgatgctaaaaatattacacaaggaaggccatcgtgttcttattttctctcagatgacaaaacttcttgacatccttgaagattatctgactttagaatttggccctaaaacatttgaaagagttgatggctcagtatctgtggcggagcgccaggcagcgattgttcgctttaatcaggataagacacgttttgttttcttgctgtctacacggtcatgtggacttggtattaatttggcaactgcagatactgttatcatatatgattcggatttcaacccacatgctgatatacaggcgatgaacagggcacacagaattggacaatcgaacagacttctggtttacaggcttgtagtacgtgctagtgttgaagagcgtatcttgcaattagccaagaagaaattgatgcttgatcaacttttcgttaacaaatcagaatcacagaaagaagtggaagatatcattcgctggggtacagaggaactctttggaaatagtgacagtgtggatggtaaagataacagtgaagtcccaggtcctgttgctgatgttgaatttaagcatagaagaaaaactggtggcctaggtgatgtttatgaggacaaatgtattggtggttctaccaaacttgtttgggatgaaaatgctattttgaagcttcttgatagatcaaaccttccatcatcaatggctgaaagcactgacggggatttggacaatgatatgcttggtactgtgaagtcaatagattggaacgatgagctcaatgacgaccctggtaccaatgaggatactgcacctattgacaatgatggtagcgagcaggcatctgaatcaaagcaaggtgctaccaatcgttcagaagaaaatgaatgggataaacttttgcgtgtcaggtactctgcaatactatgggagcaatatcaaatagaggaggaggcatgtcttggtcgaggcaaacgtttaaggaaggctgtttcttacagagagacattcgcaacacttcctaacgaagctttaagtgaggactctgatgagggagatgaaccaaagagagaatatacagcagctggactggccttgaaggaaaaatatggaaagcttcgagctagacaaaaggaaaggattgctcagcgacacattatcaagaactatgctgatgataatcttgaagagttcatgactccatacgactctattgctaatgaacctgctgaaaatcctttggtaatcgtagaagatctaaattcttcacagctatctggcgcgaaacgtttcagtgactcaactggagaaatgaggcaatcctccaagaaatcaaagagatattctgaaatccctcaagatctttatgccaaaattcctggtaacacagcttcattcaagcaccactcaaaggccactgatgtattcaatccagggaccccaaatcacttgctacctgtacttggcctttgtgctcctaatgctgatcaggtgaactcatacaaaaactcaatttgtgcaccaagcataaaggagcgtaaaagggccagtggtgacattgtcaaacaactgtcaactcctgctgaccattctaatgtgcatagaaacgaagctcaatcagcttctgataaggccatctttcctggtgcatctgaggaggctttgcgaagaataagtaacatgattccagatagttattttcccttcagtcatattcctcctatatcagggaagggggttgatcctgttgaaaatcctggaccctccattgcatcatttcaagggaatctgggtcttccaaacttcagtctggaagacaacgctccacttaagcatattaagcctatacctgatatatttcctagcctgtcactgggtgctcataaggattatattcgtagttctgtcccagagttgccagatggttcattgctgccaaacttcatggcagatattactggtacttcgaagcaaaagtcatttatgtctggtctacttcctgggctgggtcttagcccagggcaaccaatacattcggctatgcctgataatcacaagaaagtcttggacaatataatgatgcgtgctcagtatgcgtcaaacaaattcttgaagaagagatcaaaactagattattggtcagaggatgaacttgatgctctgtggataggagttcgtaggcatggaaggggaaattgggatgctatgcttagagatccaaagctgaagtttttgaacaaccgaactagtgaggagctggccttgaggtggattttggaggagcaaaaaattatagatgaacctatgtctacatccaccaggcgttctaactcagcagcatttcctggaatatctgatgcaatgatgtctcgggcactgaatgaaagtaatttctctaaaatgaggatggagcagcctaaattgcagtcccacttaactgatattcagttaggttcgagtgatatcctatccacatttcctcatgttgacgctgctagttacattaactcaggggagggtggcccatctcaaataccatggcaggattttaagcatagatcaagttatgctggagattttcctgccggtgcatttgacaagttggagaaacctgatgttggaccgatcccgccatttatgccaaatcctttcatgactgacagcattggttcacttcccataaacagaaaaaacaatagttccatcccgcatagtgaaatcaggtcaagttctcgtgagaacattctttctggtgtttcggatggacagatcaacttgcttcatgagatgcagcgtcgtcgtcgtgtgaggtcaggcaaagaacccattgagatgaatctcaaccacatagaccactcaaatctccagcttgataatactagtgaccttggaggtttaaaaccaaacaagttacctcattggcttcaggaggctgtacgtgctccttcatctaagccacctgaacgtgagctaccagcaacagtttcggcaattgctcagtcggtctgccttcttcttggagaacaagaaccatcaatacctccattcttgatcccgggaacacctctttctcgcccaaaagatccaaggattaattcaaagaagaaactccgcaaggctcagcaatctaactctcatgtagagcattcaaaaattggatctggtgagggtgattgtgtcactaccccagcacccccatccattgaagcttcacctgcacttcctgtcgattgcgatgatggtgagccttcactcaacttgaaatctgcatcgttgtcatcttcagctggcagcaaggggctagatgaattacctcccacatttaaagaagcaaaccaaaccgtggatggctcagaagctgttgcggccaagtcagatgctcctgaaattggttgtcaggtacctggttcctctccattacatgacaaaggtagtgaatcctcggggtcgccagtgaaggacactcctgacgctggaatcagattgccaggatcagataactcagttatggcattttctgcactcccacttgttgatgaagcacctgggacaagcagcagagcagctgacacgcctgtgccatgtgatggcaatgagtcgaaagaggatgttccactagacaacgctgaaagcaccaggaaactggagccgaacggatgaactggctcctcttgcgagcatggatgcatcgcatcgagtttctgctaatacagccgacgaagatgggtggatgaaatgatcattagactcgagctagttagctcaacattcctttcttttgcgttcagcataacactgggattttccctctcccaatgtttccagtgttgatctcgtgttgtgtaatgctttagtgcaggtctcgttgcagataggatgaaacgcaaagggctagtggtacttagcagtagttgggcactagtccgtcgggggagcaactcgtggaaacctgtatacaagaaatgtatattttgctaatatggtgctggttgggtgtgtagaaggtagaccgctattcgtttatttatgcgtatatggtttagtaatttgccatctgtctagcggtggctgtaagagtagacgtgatgatgatattgcctagccttgactcgttggcctccatgcctagccgaagagaagctgtgttcatactgacataactgacatactgagcgacttttgactgtttttttttatttcattagcggcaacgaagccaagaaccatgatcttcactcttttgtccccaccccccaaaaaaaaccccggaactctcaactattgttgtgcactgtaatttacctcttcaaattagaaaagtgatgttttg

SEQ ID NO: 214736 - DNA, 3318 bp, Zea Mays
ctgacatccagggcgccctcacagtccaggactctgatgagggagatgaaccaaagagagaatatacagcagctggactggccttgaaggaaaaatatggaaagcttcgagctagacaaaaggaaaggattgctcagcgacacattatcaagaactatgctgatgataatcttgaagagttcatgactccatacgactctattgctaatgaacctgctgaaaatcctttggtaatcgtagaagatctaaattcttcacagctatctggcgcgaaacgtttcagtgactcaactggagaaatgaggcaatcctccaagaaatcaaagagatattctgaaatccctcaagatctttatgccaaaattcctggtaacacagcttcattcaagcaccactcaaaggccactgatgtattcaatccagggaccccaaatcacttgctacctgtacttggcctttgtgctcctaatgctgatcaggtgaactcatacaaaaactcaatttgtgcaccaagcataaaggagcgtaaaagggccagtggtgacattgtcaaacaactgtcaactcctgctgaccattctaatgtgcatagaaacgaagctcaatcagcttctgataaggccatctttcctggtgcatctgaggaggctttgcgaagaataagtaacatgattccagatagttattttcccttcagtcatattcctcctatatcagggaagggggttgatcctgttgaaaatcctggaccctccattgcatcatttcaagggaatctgggtcttccaaacttcagtctggaagacaacgctccacttaagcatattaagcctatacctgatatatttcctagcctgtcactgggtgctcataaggattatattcgtagttctgtcccagagttgccagatggttcattgctgccaaacttcatggcagatattactggtacttcgaagcaaaagtcatttatgtctggtctacttcctgggctgggtcttagcccagggcaaccaatacattcggctatgcctgataatcacaagaaagtcttggacaatataatgatgcgtgctcagtatgcgtcaaacaaattcttgaagaagagatcaaaactagattattggtcagaggatgaacttgatgctctgtggataggagttcgtaggcatggaaggggaaattgggatgctatgcttagagatccaaagctgaagtttttgaacaaccgaactagtgaggagctggccttgaggtggattttggaggagcaaaaaattatagatgaacctatgtctacatccaccaggcgttctaactcagcagcatttcctggaatatctgatgcaatgatgtctcgggcactgaatgaaagtaatttctctaaaatgaggatggagcagcctaaattgcagtcccacttaactgatattcagttaggttcgagtgatatcctatccacatttcctcatgttgacgctgctagttacattaactcaggggagggtggcccatctcaaataccatggcaggattttaagcatagatcaagttatgctggagattttcctgccggtgcatttgacaagttggagaaacctgatgttggaccgatcccgccatttatgccaaatcctttcatgactgacagcattggttcacttcccataaacagaaaaaacaatagttccatcccgcatagtgaaatcaggtcaagttctcgtgagaacattctttctggtgtttcggatggacagatcaacttgcttcatgagatgcagcgtcgtcgtcgtgtgaggtcaggcaaagaacccattgagatgaatctcaaccacatagaccactcaaatctccagcttgataatactagtgaccttggaggtttaaaaccaaacaagttacctcattggcttcaggaggctgtacgtgctccttcatctaagccacctgaacgtgagctaccagcaacagtttcggcaattgctcagtcggtctgccttcttcttggagaacaagaaccatcaatacctccattcttgatcccgggaacacctctttctcgcccaaaagatccaaggattaattcaaagaagaaactccgcaaggctcagcaatctaactctcatgtagagcattcaaaaattggatctggtgagggtgattgtgtcactaccccagcacccccatccattgaagcttcacctgcacttcctgtcgattgcgatgatggtgagccttcactcaacttgaaatctgcatcgttgtcatcttcagctggcagcaaggggctagatgaattacctcccacatttaaagaagcaaaccaaaccgtggatggctcagaagctgttgcggccaagtcagatgctcctgaaattggttgtcaggtacctggttcctctccattacatgacaaaggtagtgaatcctcggggtcgccagtgaaggacactcctgacgctggaatcagattgccaggatcagataactcagttatggcattttctgcactcccacttgttgatgaagcacctgggacaagcagcagagcagctgacacgcctgtgccatgtgatggcaatgagtcgaaagaggatgttccactagacaacgctgaaagcaccaggaaactggagccgaacggatgaactggctcctcttgcgagcatggatgcatcgcatcgagtttctgctaatacagccgacgaagatgggtggatgaaatgatcattagactcgagctagttagctcaacattcctttcttttgcgttcagcataacactgggattttccctctcccaatgtttccagtgttgatctcgtgttgtgtaatgctttagtgcaggtctcgttgcagataggatgaaacgcaaagggctagtggtacttagcagtagttgggcactagtccgtcgggggagcaactcgtggaaacctgtatacaagaaatgtatattttgctaatatggtgctggttgggtgtgtagaaggtagaccgctattcgtttatttatgcgtatatggtttagtaatttgccatctgtctagcggtggctgtaagagtagacgtgatgatgatattgcctagccttgactcgttggcctccatgcctagccgaagagaagctgtgttcatactgacataactgacatactgagcgacttttgactgtttttttttatttcattagcggcaacgaagccaagaaccatgatcttcactcttttgtccccaccccccaaaaaaaaccccggaactctcaactattgttgtgcactgtaatttacctcttcaaattagaaaagtgatgttttg

SEQ ID NO: 214737 - DNA, 3440 bp, Zea Mays
gacttcgtacgcttgctacttattggatgagctgggacgacatgttcattgaattcatacatgtaggagatgatgaactatatggatggatatcttgaccagttcaatgaatatacaattcaaggctcatttcctaccttacatgcctgccaactaatatgacctactgcacttctgccaaagcttcttgccttcgaaggaggaagaagaagatgatgagcagctaagaagaattcggcaacatctccatgaactctccaaaaatggagctttctccatggcttgtgttctccttgggtttccttgcgcaggctctcgtcatcttggctgacacgaatgcacaagacgcttctgggctgaatgggattcaagattcctggaacaagaagccatcaaactggagggtgggcactgacccatgtggagataaatggaacgggataagctgcaccacaagccgggtcacggctataagactctcgagtttaggattgtcaggatccctttcaggcgacatccagtccctgtccgaattgcagaccttggatttctcctacaacaaggacttgggcggtcctcttcctgcgtccatcggaagcctgagtaacctcgaaaacctgattcttgtcggttgcagcttttctggagaaataccgaaagaactcggacagctcaccaagcttagatttttatctttgaactcaaacaagttcagcggttccattccggcatcactcggaaggctctcgaatctatactggtttgatctggctgacaataagctctccggaggactcccggtgttcgacggcacgaatcccgggctggataacctgacaaatacaaagcacttccacttcggggtcaatcagctctcaggaacaataccgagccagattttcaactcaaatatgacgctgatacatgtgcttcttgacaacaacaacttcaccggacgcattcctcctactctgggccttctcaatacactagaagtcatgcgttttgataacaactaccagctgactgggccggttcctagcaacatcaacaacctcacaaaacttgcagagctccatctggaaaacaaccagctgactggtccactgccagacctcacagggatgatcgcgctcagttttgtggacatgagcaacaacagcttcaatgcatctggtgttccttcctggttcaccactctgccatctttgacctcactgtaccttgaaaacctgcgtgtcacagggcagctgccccaagccctgttcagccttcctgcagttcagacactgaggctccggggaaaccgtttcaacggcacgctaactatcggatcagactacagcactcagctccagctaatcgatctgcgagacaaccaaatcagccagataactgtcggcggatcacagtacaacaagcagctcatactagtcgggaaccccatctgcagcccggggacggggagcagcgagaaatactgcgcgtcgccggggcagtccaaccaggcggcgccgccgccgtacagcaccccgatgaactgctcggggctgccgccgccgtgcctctcggaccagctcgtgagcccaggctgcgtctgcgccgtgccctacaggggcaccctgttcttcaggtcgccgtccttctctgacctcagcaacggctcgtactggggccagctggagaccggcatcagagccaagttccggagtctcagcgtccccgtcgactcggttgcgctccacgatccgtccgtcaactcggtcaacaacctgcagctcgcgctggaggtgttccccagcggcaagacccagtttagtgagcaggacatctctgacatcgggttcatactcagcaaccagacgtataagccaccctcagtattcggtccgtactattttcttggccagccgtacagctttgccaatgtggtgctaataccttccaaatcgaaggcgaacaaccgcttacctctgatcgtcggagcctcggtgggtggagcggttcttgttgcaatagttcttgctcttgttaccatcgtcgcaaggaggaagaagagaccaaagcagaacgaagagaggagccagtcttttgtttcttgggacatgaagagcacgagcggcagcagcgtcccccagctgcgcggcgcgcgcacgttcaacttcgacgagctgaggaagatcaccagcaacttctcggaggcgaacgacatcggcaacggcggctacgggaaggtgtacagagggaccctgcctagcgggcagctggtggccgtgaagaggtgccagcaggggtccctgcaggggagcctcgaattcaggacggagatcgagctgctctcccgggtgcaccacaagaacgtggtcagcctagtgggcttctgcctggaccaggcggagcagatcctcgtctacgagtacgtccccaacggcacgctcaaggagagcctcacgggcaagtccggcgtgcgtctggactggcggcggcgcctccgggtgctgctcggcgccgccaagggcatcgcctacctccacgagctagccgacccgcctatcgtgcaccgcgacatcaagtccagcaacgtcctccttgacgagcgcctcaacgccaaggtctccgacttcggcctctccaagcccctcggagaggacggcaggggacaagtcaccacgcaagtcaagggcacgatgggctaccttgatcctgagtactacatgacgcagcagcttacggacaagagcgacgtgtacagcttcggcgtgctgatgctggagatggccacggcgaggaagccgctggagcgcggccggtacattgtcagggagatgaaggtggcgctggaccgtaccaaggacctgtacggcctgcacgacctgctggacccggtgctgggctcgtcgccgtccgcgctggccgggctggagcagtacgtggatctggcgctgcgctgcgtcgaggaggccggcgccgaccggccatcgatgggcgaggtggtcggcgagatcgagcgggtgctcaagatggccggcggcccggggcccgagtccgcgtccaactccatgagctacgccagccggacgccgcgtcacccctacggcggcgacagccccttcgaccacagcaacagcgggttgccgtccgcgagggttgagcccaagtgaatctacagcgcgcgccgcgagtacatgcggaaaagcttcactcttcaacaaaagctagctctgaatgtacagggtattgtaattattagtgttataattttggttactatgataggtgtgcgattggattaagaactgatttcttgataacgattgtttacatgataattttggttgctatgtatttaagatagatatgcaattggattgttgacatgctaatatatttcatgtatgtcatcaaatacacaaatgattatttatgttcaaatattagac

SEQ ID NO: 214738 - DNA, 5118 bp, Zea Mays
gtcgtccttccttctcattccccaagccaaacccccgggctccatcgaaccaaacctatttgaatcgccaaagccggtggcggtgggtctcactctcacagccctccgctcctcgtcctcacccctgcttcgcttgcctagccttccgtcgtcccctgctgtcagtccccgaagacggcggcgccgccggccatggaggaccccctcgccacggcgccgccaccgcgccggccccaccgggagcggcggcaccggcggaaggcgtcggacgccgccgcggccgcgctggcggcgcaggcggcgtcctcctacggcgacgtcttcggcgggcccccgcggttcgcgccgcctcctgcggcgttcgccgcgggggcggggactgcgccggcggactacgccgaggtgttcggcggagtcgcggcctcctgctccatcccctacctcgacctgccgcccgccgttgccagcggagtcggcgccggcgggtacggcgagatcttcggccgcttcgacttcggggagtttgcggtgccgtacgaggacatgctttctggtgcagagtctctggtggaggagatcgcgtcaccaagtgggagctcaagatcatcaactagaaaagaatcggtccgattggatactgagccatctgtaccctatcaacaagttccagatgctggttctggcaggcactctgatgacgagcaatttcatgcagtctcctttcctccagatggcgagcaaacgttcactatgtcatataacaagatcacccggggaaggccagatgatcttgttgaaatgaccgcttgcatagtagaaccttcaattagctatgtggttgactcttgcaatttgtcaaatgatttagaaatggattatgtcccagtaatggacagtggcacaaatgctaatgttgtgaaagaaaagatgaacctaccaaacattgcagattccggcctggagtgtgctgatagtgcttatgtggttgatcatcagcaacatatcccaacatgccctcccatctctgaaaatatttgccaggatgaaaactacaacaagaggtctagcacacattcagtgtcaagcgaggaagcaccttcccctgactatccattcttaagggtatccaacatcaaccttccagcagcacccatcaaagtacaaccaccaccgatgcccccatctaaattgcttaataaaaagggaagcaacgaaaatggagattctgatgtcaatcctaactcagttgctgctgctgctgctatgaaggaagcaatgcaatttgctgaagccagattaaaagctgcaaaagaattgatggagataaaaggtgtcagctctaaattccgtaagcggccagttcatcacaaaagcacaaaatcaactgaaattaaggaatacaatgcacctgaaaaagcacatctatttgaagaaaagctggatatgagaagattggtaaaagaggaaaatcaaagcaatgatatagctttgctggataaaaacacgggcagtgttgcacttgagcacagtgatcatgacaaaaaagggattatatcaccagggaagcctaaggagatgatgcaaaacgacagtgaactagaacaattaggagagtggacatcagatgctgatttttatgaattggttagcaatgatcagaaatgcagaactaatggagctgaatgcagagacaatggtctgatgacaaattccttagccaagcttgaccggtctgagaatgaaaaattaggaggctttgcaggtgagtcaaaaaggtctaggaaattgtgggattgtaacaacagaacatgtctgcggactgaacatgtaaatcagggaaaagatggtataggttcattggaggttgaacaaaagaatactaggtctccagaagttacagaacatgtaaatcagcaaaaagatgctatagattctgtggaaactgaacaaaagactcctaggtcacctgaagtttctccttgtaatgaaagggtgacgtatgaagagccaaccaaaggaaataatgatctgatgacaaattcttccaccaagctcgaccagtctgtgaaagtaaaggaagggggttttgcaggtgagccaaaaaggtttagaaaattgtggggcagtaacagtacaacagttctgagaacagtgcatgtaaatcaggaaaaagatgctatagctttcgtggaggctgaagaaaaggcacctaggttttcggaagttcctccttgtgatgaaagggtggcatcccaagaggcaactgattcccgtttagaacaatgtctaggggtggggaattctctaggtcacgaaaatggtgcacaatttgagacttcatgcgtgaataatttaccttcagaggtccatgcagacccagaaatctccagttcattttcggaatgttgttcatcaggaagtcatgccaatggtaatgaaaatcattctgaaagcacagctcaggaaactgcatttgtagggaactctagccaaaatgtcaacaataaagaggaacttgagcttccgtgcattgatgggttgccttgtacttcagcaaggaatcagattttgcaggaacattttaatgttattaatgctgatgaaaacaaggaaattgaagtgaaaatatcaaaattagaagggtcttccaaatcttatttgaattttgaggaagaaaagttacccagttttgttgatgaatcatgcctacagaacaaaaatgaaagagaaaatgaagtaaattcagaatcacccatccatgaaaagatgacaaagttcgggtttgaggacaaaggtgatgcatatgaagattttcaagagggagatatggatcaggttgctggatctgctgaagaggaaggttatgttacttcaggaagtggtattgctaatgaaagcgaatatgaagaagcagaagatgatatatttgtaggagacatggaatcaaatgtaagaacatgtggtagttttgacaaagatccatatcagcgccaagaatcacaaggatcatggggaccccaagatttggataatagaatggacaaaatcagtgatacaatatctcatggaaaggaaagggagactaaagaatccttgctggagaatgttgaaaagacagcggcagaagaagtactaaaccatgactgcagggaagggcagaaatccatggaaaccgttgactacatatggcccaaatatgtatgtgcagaatttaatgtaagtagtgacaaagatggtaatgtgtttgattctgctgatgaacttatcagcgacaatggcagtgattatgccatgaacatgagcacaatgtcaaataatctgcaagcttcattttcagaagcatgcagtagcattcaacatctttctcaaaaacctcagtctatttctgctgagaaggctgatgaaagcactcctgttcttggaaatcttgaagtggactgcggagaagcaggtagaaaaattccaagtgaaaattgtgaagtctcagaagaagggcaaaatattggaatcgaaatggaagaaagaaaaagagaagacaatatatcaaatataaggttcatggatcagcaaccattttacttggacagtgacattagacctaaggctgcagaaggtactgcatcagaaactattctaaaatccagagaagaggatcttaatgttcagagaactaaagtgaggaatgacataaaagaggctgaaggagaactcgagaaggaggtaaaagttgttgaagagaaagaaaaagaatgcaaaatgggaaaagagaaggaacaagataaagagagacaaagaagagagttggaagaacagaaggaacgggaaatggagcgagcaaaagataggcttgctgttcagagagctacaagagaagcacatgaaagggcattcgccgaggttcgagctaaggctgaaagaatagcattagaaaggatcacctcagcacgtcaaagagcatccgcagaagcccacgagaaagaagagaaggcaaccgctcaagcagctctggagcaggcttcaagggaagctagaatgaaagcagaacgtgcagccgttgagagagcaactgctgaagctcgggagagggcaattgaaaaggcaaaagctgctgcagatgcaaaggagcgaattgggaagttcaggtcctctttcaaggatagttttaaggcacctaatcaggacaatcaacatgaggcatcatctcagaagacggcttataataagcatggaaaaagcatggattcttgtgttgaagtcgaggttgagtcagctctacgacataaagcaaaattggaaaggcaccaacgcacagctgagcgagcggcgaaagcccttgctgaaaagaatatgcgggatatgctggtgcagagggagcatgctgagaaacatagactggctgaatttcttgatcctgaagtcaagagatggtcaaatggaaaagaaggaaatctgcgagcattgctgtccacattgcaatatatacttggttcagacagtggctggcaggcagttcccctcacagaccttatcacagctgctggtgtcaagaaggcatacaggaaggcaaccctttgtgtccatccagataaagtgcagcaaagaggtgctacaatcagacagaaatacatttgtgagaaggtgtttgatcttcttaaggaggcttggaataagtacaattctgaagagcgctagtgggataggtggttctttatcaattgtttacgggggacaggatattggctaggtatctctgtagcatttgccatactgattattttttacattggtgaaaatatgcagctgtagagggcatcttctggtcattttttatccatatcaatgcaatagtagagcatatgttgtctcttatctagcatccccaagtttacctttgctagactttagttgtgcaccttttgcgttactttgaccattcctagcaaagtttgcctacgtttggcgatcaacttgaagtagttgaatttatattttctttctgtggctgagtgactcgcagttgcgggggccttctattcgaactagtagctgcaatatgctcacggagaatttgtaccatttgtattaaagaatatcatgtgttatgttactagttggagc

SEQ ID NO: 214739 - DNA, 1186 bp, Zea Mays
cggccacacctttctccccttccctttctccatctcctctctctcgatccctccccgtctccgcgctccaagaaggtcgcttgccagttgccacaggccccactcatgcagccgagcggccgcgaaatgcagggcggcggcggaggcggcgggcaggacgacttcttggaccagatgctgtccacgctgccgcccgcgtggcccgacctcggctacggcaagtcgtcgccctgggagctccccgcggggcccgacgccgccgccgccgccgccgccgcgttcgacgagaccgcgctcctcgcctcgcgcctccgccaccaccagatcggcggcgtcgatgagaagcccctcatgctccacctcagcgacctgcacggcgtcgccgccggcggcggcgacgacgcgggtttcatgccgctgccgctcttcaccgaccgcgccgccttcaagtcccccaatgccgccggagccgaccaggcgctgtacaacgggttcggagccgctgggatgcatgccgccgccgtgcaccagccgccgttcgggcagctccggagggagaggatagcggagaggatgaaggcgttgcaggagctggtccctaacgccaacaagaccgacaaggcatcgatgcttgatgagattattgactacgtgaagttcctccagctccaagtcaaggttctcagcatgagcagacttggtggagctgcagccgtcggccctctcgtcgccagcatggcatcagagggcgacgacagagccggaaacggcacaagcgacgacggcggcgatggtgccaccaacggtgataacggtggtggcggcagcagcctgcgggtgacggagcaacaggtggccaggctgatggaggaggacatgggcactgccatgcagtacctgcagggcaaggggctgtgcctgatgccgatctccttggcctcggccatctcctcctccacgtcgtcgtcgccgccgccgtccctcctgccccgcccctccgtgggctcagtggaaggcgctagaggtcccttgcacgacgacagtggtggtgccggtggcgacgatggttctaggaccatcaacttttcttctctgctaaatttgtcgcgaagctgtcgtgtctgctctttgttaggtgaggaggaatcgaaattattggtccaaagggatcatattcatatcacat

SEQ ID NO: 214740 - DNA, 1097 bp, Zea Mays
cctttctccccttccctttctccatctcctctctctcgatccctccccgtctccgcgctccaagaaggtcgcttgccagttgccacaggccccactcatgcagccgagcggccgcgaaatgcagggcggcggcggaggcggcgggcaggacgacttcttggaccagatgctgtccacgctgccgcccgcgtggcccgacctcggctacggcaagtcgtcgccctgggagctccccgcggggcccgacgccgccgccgccgccgccgccgcgttcgacgagaccgcgctcctcgcctcgcgcctccgccaccaccagatcggcggcgtcgatgagaagcccctcatgctccacctcagcgacctgcacggcgtcgccgccggcggcggcgacgacgcgggtttcatgccgctgccgctcttcaccgaccgcgccgccttcaagtcccccaatgccgccggagccgaccaggcgctgtacaacgggttcggagccgctgggatgcatgccgccgccgtgcaccagccgccgttcgggcagagcggcgggtcaatgccggcggcgcagagcttcgggggaggcgcggacgcgggcggtggcgcgccggcaccggccgccggagcggcgtcgggcggaggcggggccgcgccgccgcggcagcagcggccgcgggccaagagggggcaggccactgaccctcacagcatcgccgaacgtctccggagggagaggatagcggagaggatgaaggcgttgcaggagctggtccctaacgccaacaagaccgacaaggcatcgatgcttgatgagattattgactacgtgaagttcctccagctccaagtcaaggttctcagcatgagcagacttggtggagctgcagccgtcggccctctcgtcgccagcatggcatcagagaggcaccaaagacccagactgatacagctaaaacttcgtgggccaaatatgatgctgaacccatacttttgacgtatttaatgcttggtattccgagcaatttaacaaccgttcggcccatcgaaaatcgtctattatgttggtccaaagttggtccccgatcaggtctatccaatagcac

SEQ ID NO: 214741 - DNA, 388 bp, Zea Mays
tgacaatgatagtatactcagtatcaaagaatatagtttttgaattgtgttttctgctaggaatcataaaagcatatggaggaaatatgtataggctacaaagaagcataagaagcattttttatagcagaagccaagtgttctgatgattttgttttttcaattgtgttttctgttattggttcagcatgcacatatattgacatgatttatggcatggcatctgtcatctttgttatatttatgacaccgttcttgattgatgtgtgcgacatgaatgatggatctttttaacatcctgaccatcattgtgtcgctcattatcgtattttgtatatcatttatgggttcacggatatgaaatgataggtttcttatttttgagatc

SEQ ID NO: 214742 - DNA, 684 bp, Zea Mays
ctgccacagttcaaccggggaaccagtgctatgcaacactatgttgcaatacgaccaatgtttattgatgtggaaatcatgaacactgatattcaagttgttctgggtgatgaggggttgcaagctgattgcgacagtattgcagatggtctctctacattgtataaggaaattgcagatactgtgaggaaagaggcagctacaataacggctgtctttccttctccgaatgaggtcatggcaattcttgtccagcgagtgctagaacaaagggtaacgaccattcttgacagaattatagtaaagccctctcttgctagtttgcctcctctcgaaggaggccttctacaatacctaagaattctggcagttgcatatgacaaaacaaaagaactggctaaggatttgcagtctattggttgtggggatttggatattgaagctgcaacaatcgttgaccttcttcgccacatggtcgggccttcttgggcggccatcaccgccgacgcccatgcaccaggcgcggttgcgtggctacccacgctccccaacgccggcgacctcctttttgttcatgctatcacggacgtcatccccggtgacacgctcctcccttccatccttggcatcaccctccttactggcgtcgcggacgacctccccgacgtcccctccctcccctag

SEQ ID NO: 214743 - DNA, 707 bp, Zea Mays
ctctcccctcgcctgggctctctccgcctggcttttgcagaagcagaaaccagcagcgattccgccctcgctagtatcgccgccctcgttcaccgcttactgccggcgggatgatcccgttcaaccctgcggtcgccgcggaggtgcgcgccctgatacagggcgtggaggactccaccttcgaccccatataccgcgagctctcccagccctggtgggtgcgttttttgcttcaagtttgtgtggatgaaattctcttaaacatcggtggcgcaaataaccaccgattgaaacatgatcttgtagccatcatcttcagatattgtgtggataaaccctacttcagcaccaatttctgtgaagcactgagggcaatgcctgacagcgatgggctccttgaaacattgtccaatgaacttgagttatctacaactgagagggttgtagttggacttgctctctcagactctgagaatccagacttgaacctggaagggagaaaatttacaatcgctcaaattaaggaataaggagttatgctcaaaccatgctcattctgtatcaaatgaatggatacaggagattgttgtgttttttctccagaccgaaggcctctcaaaaaatatggattcctttactaacatttttccctattaaatgtaaaagagggtccattctatgttcctgtcccacttcagcaacccaat

SEQ ID NO: 214744 - DNA, 822 bp, Zea Mays
atggcgaacgagaacatcgacaggaccatcgagaccgccgaggccatcctcgcgcagttcgagatcatccgccggggcgccaaaatttgcatccagtgtcacagttttggtgcatgcctcgtcggaaggtataaaggcccacggatgggttgcaacttgcaagtcaatgattctgctgaagctgtgatagtgaggggtccacgtgcggatctgaagagcttcctggaagctatggctctgctgaaaggcgtcatccacttcttttcctcaaataagaagtttacgagttgtgaaggagtactgaatcaagttaacaacctcttaaccaagtcaaagctgaagattgaggaggaattcaggcagttaatgagcacttacagcaaagctagtgagcccgcacatctatttgattgctttccaaacccgctattggcatcagaagggaactctagagcagttggagagcaactatccaaaagctttgaaagtgctacatacaggactccaacactaattcccccaagaatattaccacttctgcatgatatagctcatcagttggttcaggatggaaatcaacagctgtgctatagaatatacagagatgctcgcagctcagcattagaactgagtcttcaaaaactgggcatagaaaagctaactaaacgtagcatgcagccgtggctggcctcaggaacctggattcagattatgcacgttacagttaaagtattactggctggagaaagaaaaatttgtaatcagattttcgatggtatcactttcaacaaggatcaatgttttgctgaagtgacaggaagc

SEQ ID NO: 214745 - DNA, 2494 bp, Zea Mays
atgggcgtccacaatcgcgtggtgcacgttctgccgctctgctcacgcccgcggccgaacctcccccgcatcccgcagccgccgacgctcaccttccatcctccgcgcagccactcatcccgcagccgcgatccccgcggcgctcaccttccatcccgcagcgcgcaccttcatcctccgccttccatcctccgcacagccactcatcccgcagccgcgatccccgcggcgctcaccttccatcccgcggcgcgcaccttcatcctccgcgaccgctcgcggatctctcatcgacgtcgatgctccgcgattaaggggatccgaggccaacaaacagcatggcgctccccgcggcgggcgggcgaggaggcatgcgcggatactcggcaggatgctccggcggaagcggagccacctccccgtcggccgcccgtgttctacagctccgtgttcgcgcagatcgaagagatcgggtggaagcaactggtgagcgccacaggagagggagtgtcctgtactcctgtctcaccttccgtgtcgtgtaaggattcatgttgctgccagtcggcactaacctctttctatatgtttatattgtacgaatgtttggagaaaaaaactactgccgttcaggtggttgagcaacgctggcgcattacatactaaattttgtcagtttgatagttgtttgaaaaggttatttcagaaacctgtctttgtccgaatgcaagagagagaacagacagagcgaatcttccattgatcatcagcacacgacatgaatttttttcttatcaatttccaccaatctttgtagggtaaaaacatctctggagatgctctaacatcccattctgtctctctgctattgtctttaagcgccaaaacttattgttcatttgatctcttttcatgtacacaaactcagcacggagctcaagctttgtttttttactactactactactatcctgtactacagtagtatgaagtatcgtatcatactcatgctctgtatttatatttgctagattctggctatgcgccatcctaggaaactcgtattagcaggctgtttaactgcactaagagtcatgacagctgtatcgacttctctaggttgggttgcaccaaatctgagctgtcatgacaaaaatcatgatgcaatacaagcagaatatgcttcctgaaagataaagtaatcacaaagttgaggcagataaaatggttgagcaaaccaatcaatctgaagttagctttgtgaaggctgagcatctaaatggaggatgtctgcattgatgaaggagttcttcctgatcaaaagatttcatcagaaaagcaagtagaccaaaaagtgtctataaactttgattccagggaagagataagtgctgactctacaaaaactgcacatgagttgaaatcggaaatagttgtcctacctgtcaagtgtgatactcatgacaatattgtggaacagaactcctcatgcaaaaagcgtgatcttgaagataacaatactacagatgtatctaccgagtctaatgatgagggattaaatcccaaacaattaccatttcatgaagttgcacaagattaccagaaggttgatagtgtcatttcggagagcaatgaaaatcaggactggcttttcactggagatgcaacccatcagggacttgagaaatatgttatgacaaagttgtttaatcgagtattcgcatcagtcctagaagatgtgaagagtgatgaagaacttttttagaattaacttgtacgagaatgaaacatcctgtctggtatgagaattaacttccctcgtttttggcattttttgcttgatgtattgcatctctggcaagctgcacacatgaataggtttctggcagaaactgaaccaggattgaattgtacttgtgtcttgcgttgggttggtcttttggatctttctatgtattatgtctatactttgtagactactggccagccactccattcacgtattactcttccattgtgagtttttgctcttcactttcttatcactcacagtcactcagcttctcacatttccacacaagtagtagttaaggacacatttagtttcgaaggacagtgaactttgtatgattcattgtgaatctgctgatcttcaaattggacaacaaatgtatactccttcctattagaggtggtattgtgacaggagatgtcctcagcgtcccattccacagcgtctacggacttctggaggaggctcgccatagtagcagttctcttcctcccaatggattggttaatttggagctggtcacaaccaacaggctacaataatacgatgggcggatccaacaatgtaatggtgtaatgggcttggtcatatgcttggaggttaagaaattgacttgctggaccaatgtaaccgtatggctgatataattaatttcgtaaaccttctggatgaataaatgatctagcatcagtggcattgtcg

SEQ ID NO: 214746 - DNA, 3640 bp, Zea Mays
tcccctctctttgcgcggccggtggttaccttgggttggcttgagcaagagtcagggttcttcttcaatatgaagtacttcgaggagaaggtccatgctggggagtgggatgaggtggagagatacttgtcaggattcaccaaggtagatgacaataggtattcgatgaagatcttctttgagatcaggaagcagaagtatttggaagcgcttgataggcatgatagagcaaaggctgtagatattcttgtcaaggatcttaaagtcttctcgacattcaatgaggagttgtataaggagataacacaacttctcactcttgagaattttagggaaaatgaacagttgtctaagtatggggatactaaatcagctcgaagtattatgctggttgagctaaaaaaacttattgaagcaaacccccttttccgggaaaaacttgtcttccctactcttaaggcatcacgcctccgaactctaatcaatcaaagcttgaattggcagcatcagctttgtaagaaccctcgtccaaatccagatatcaaaactttattcaccgaccatacatgttctccacccaatggagctcgtgcatcgccggtatctgtaccactggcagctgttccaaaggctggtgctgcatatccaccactcacagctcatactccgttccaacctccacctggtccatctttagctggttggatggcaaatgcagccgcctcttcatctgttcagtctgctgttgtagcagcagcatcaatacctgttccacccaatcaagagtctgagcaactaatgaagcgcttgaggcctggtggacatggcattgatgaggccacatatcctgctcccacccctcaacctgcatggtcagtggatgatcttccaaggacagttgcttgttcattgtcacatggatctaatgtaactagcatggattttcatccaactcggcatacactgcttctagtgggatctgctaatggtgaatttacactttatgagatcggtctgcgtgaaacattactttcaaagcccttcaaaattcgggatataaatgcatgttcaccacaatttcagaatgctgttgtcaaagattcctccatatccattaatcaagttacctggagccctgatggagaaatgattggcgttgcattcacgaaacatttgatccatctgcatggataccaaccaccaaatgagacacgacaccttctagagattgaggctcattctggaggtgtaaatgatatagcattctcccgaccaaataagcaactttgtgtggtcacttgtggagatgataaactaataaaggtatgggatatgcatggacataaattattcacatttgaagggcatgaggcacctgtgtattctatatgtccgcatcacaaagagagtattcagttcatcttctcaacttcccttgatggaaaaattaaggcctggctttatgacaatatgggatctagggtggactacgatgctcctggcaagtggtgtactactatgctatatagtgctgatggaactaggttgttctcatgtggaactagcaaagagggagactcctatttggttgagtggaatgaaagtgaaggatctatcaagaggacatattctggattccgtaaaaggtcagctggtgttgctggtgtagtgcagtttgatacagctcagaatcacattctggctgctggtgaagataaccatattaaattttgggatgttgacaataataacatgctgatctgcaccgatgctgaaggaggcctcccagctcttcctcgcttgaggtttaataaagaaggcaatcttcttgctgttactacagcagacaatggttttaagatacttgcaaatgctgatggacttagaactctacgcgcattagggagccggcctccttttgaagcatttaggccgcaatacgaagcttcttctatgaaggtctcaggtgctcctgttgttgctagcatctctcctaacataggccgaatggatcacttggataggaattctcctgcaaagccatctcctatactgaatggtggggatacagcatcaaggagcatagatataaagccaagaatctcagaagaaaagcctgataaagcaaaaccttgggaactaatggaagttctaaatccccagcaatgccatgtagcaacaatgccagaaactccagaccaagccagaaaggttgtccgacttctgtacacaaattctggtgttgggttgctagcactagggtctaacgccattcaaaggctatggaaatggagtcgaaacgaacaaaatccgagtggaaaagccacagctagtgttgtgccacaccattggcagccaaatagtggtcttgtcatgacaaatgatacagcagataccaatccagaggaggcagttccatgcattgcactctcaaagaatgattcctatgtgatgtctgcttgtggtgggaaggtttctttgtttaacatgatgacattcaaggtgatgacaacattcatgccacctccaccagcatcaacatttttagcatttcaccctcaagacaataacatcatagcaataggaatggaagattcaaccatccacatatacaatgtcagggtagatgaggtaaaaactagactcaaaggacatcaaaggaggataactgggttggcattctccaccaaccttggcatacttgtttcttcaggcgctgatgcacagctctgtgtgtggaccaatgacacctgggaaaaaaagagaacagtctcgatacaaatgccagctggaaaaactccttcaggagatacacgggtccagtttagttctgatcaaagtcacttgctagtagtacatgagactcaactagccatatatgacgcatcaaaaatggagaggatctatcagtggataccccaggacacattgtcagcttccatatcgcatgcatcatactcatgtaacagccagctagtttttgctgccttcactgatggtaacttaggtgtttttgatgcggagaacttgagattaagatgtcgaattgcaccatcggtgataaacagcaatccacctgttcaccctcttgtcgtcgccgcacatccccacgagccaaaccaatttgcggtcgggctgtcagatgggtccgtcaaagtgctggagccattggagtccgaagggaaatggggagcgcccgctccggcagacaatggcatcattcccaatggcaagacgccagcttcgtcggctactagcaaccctgctgcggatcaaatccaaagatagattgtattccctaagcttttctttttctgcaaactttctaattacactgacttatttgtatgtggatgccgttaggatattatcgtcatttgttgtaaaaaggacagaataggttttatgttcaggtgtggttaactttcaggtactaccctagttatcctgttcatggaagattatgtttgcgatacggggtaatagtgtctataaagtatgtcgcctaaggttttctcaggtttagctcgatagctcaaatgatgtaagctatatatttcttcatgaatgtaaagcaatacatagtttttgctcaagatctatttttacctggttttacatagtttttgctcaagatcta

SEQ ID NO: 214747 - DNA, 4042 bp, Zea Mays
tagttaggacatgtacaattttattagatgctttttaaagagtctttagagacttaagtaaaaaaataaagaggcaaactcttcacgtatcttcacaatttttttatatttattgtcttttaattatatttatgatccagaggtttaaaactatggtatagtcacttagcatcgtgttgtattagaaaatcgttgtagtgtctctaggatgtacctgccctcatctccttcagtcggtgccgtgcgccactgttttcccactggcacgctgctgatccgagaagacgcgcgatggatgtaaactgccttcctgcagtccgcaaccaaccacgcatggaaacgcaagccagtctcgtgtcgtctcgtctcggcagccccagcaccgcccttcccctgtctcgcgaggcgatgtctcgcgcgcacgtcgccctcacaaccggacgccagctcacgaatatccatccgatttaatcccagccctttcgattccgccgcactcgacctatcatataagtacgtgcagatatcaataagcttacccacttatcaataaggacatgtgcttctcacagataagccagtgctgggtggcgtggggagagagaaaagggcgagaggtctgcaacgcatcgaagaaagcgagaccatagcttctctctctcccccaaccttctcttccacatctccgcttctctctcgcctccgcttcgcttcgcgagagacgggccgacgacggaaccctaggattcgcgcccgcctgagcggccaagccaccaggaccgcgccctccggacccgggggcgccagacaagctccggggcgcgcggatcgaccactggccggcttaccgccgccgctgccatgtcgtcgctcagccgcgagctcgtcttcctcatcctgcagttcctcgacgaggagaagttcaaggagaccgtgcacaagcttgagcaagagtcagggttcttcttcaatatgaagtacttcgaggagaaggtccatgctggggagtgggatgaggtggagagatacttgtcaggattcaccaaggtagatgacaataggtattcgatgaagatcttctttgagatcaggaagcagaagtatttggaagcgcttgataggcatgatagagcaaaggctgtagatattcttgtcaaggatcttaaagtcttctcgacattcaatgaggagttgtataaggagataacacaacttctcactcttgagaattttagggaaaatgaacagttgtctaagtatggggatactaaatcagctcgaagtattatgctggttgagctaaaaaaacttattgaagcaaacccccttttccgggaaaaacttgtcttccctactcttaaggcatcacgcctccgaactctaatcaatcaaagcttgaattggcagcatcagctttgtaagaaccctcgtccaaatccagatatcaaaactttattcaccgaccatacatgttctccacccaatggagctcgtgcatcgccggtatctgtaccactggcagctgttccaaaggctggtgctgcatatccaccactcacagctcatactccgttccaacctccacctggtccatctttagctggttggatggcaaatgcagccgcctcttcatctgttcagtctgctgttgtagcagcagcatcaatacctgttccacccaatcaagctgtctccatgttgaaacgcccagctctaacagactatcaaagtgcagagtctgagcaactaatgaagcgcttgaggcctggtggacatggcattgatgaggccacatatcctgctcccacccctcaacctgcatggtcagtggatgatcttccaaggacagttgcttgttcattgtcacatggatctaatgtaactagcatggattttcatccaactcggcatacactgcttctagtgggatctgctaatggtgaatttacactttatgagatcggtctgcgtgaaacattactttcaaagcccttcaaaattcgggatataaatgcatgttcaccacaatttcagaatgctgttgtcaaagattcctccatatccattaatcaagttacctggagccctgatggagaaatgattggcgttgcattcacgaaacatttgatccatctgcatggataccaaccaccaaatgagacacgacaccttctagagattgaggctcattctggaggtgtaaatgatatagcattctcccgaccaaataagcaactttgtgtggtcacttgtggagatgataaactaataaaggtatgggatatgcatggacataaattattcacatttgaagggcatgaggcacctgtgtattctatatgtccgcatcacaaagagagtattcagttcatcttctcaacttcccttgatggaaaaattaaggcctggctttatgacaatatgggatctagggtggactacgatgctcctggcaagtggtgtactactatgctatatagtgctgatggaactaggttgttctcatgtggaactagcaaagagggagactcctatttggttgagtggaatgaaagtgaaggatctatcaagaggacatattctggattccgtaaaaggtcagctggtgttgctggtgtagtgcagtttgatacagctcagaatcacattctggctgctggtgaagataaccatattaaattttgggatgttgacaataataacatgctgatctgcaccgatgctgaaggaggcctcccagctcttcctcgcttgaggtttaataaagaaggcaatcttcttgctgttactacagcagacaatggttttaagatacttgcaaatgctgatggacttagaactctacgcgcattagggagccggcctccttttgaagcatttaggccgcaatacgaagcttcttctatgaaggtctcaggtgctcctgttgttgctagcatctctcctaacataggccgaatggatcacttggataggaattctcctgcaaagccatctcctatactgaatggtggggatacagcatcaaggagcatagatataaagccaagaatctcagaagaaaagcctgataaagcaaaaccttgggaactaatggaagttctaaatccccagcaatgccatgtagcaacaatgccagaaactccagaccaagccagaaaggttgtccgacttctgtacacaaattctggtgttgggttgctagcactagggtctaacgccattcaaaggctatggaaatggagtcgaaacgaacaaaatccgagtggaaaagccacagctagtgttgtgccacaccattggcagccaaatagtggtcttgtcatgacaaatgatacagcagataccaatccagaggaggcagttccatgcattgcactctcaaagaatgattcctatgtgatgtctgcttgtggtgggaaggtttctttgtttaacatgatgacattcaaggtgatgacaacattcatgccacctccaccagcatcaacatttttagcatttcaccctcaagacaataacatcatagcaataggaatggaagattcaaccatccacatatacaatgtcagggtagatgaggtaaaaactagactcaaaggacatcaaaggaggataactgggttggcattctccaccaaccttggcatacttgtttcttcaggcgctgatgcacagctctgtgtgtggaccaatgacacctgggaaaaaaagagaacagtctcgatacaaatgccagctggaaaaactccttcaggagatacacgggtccagtttagttctgatcaaagtcacttgctagtagtacatgagactcaactagccatatatgacgcatcaaaaatggagaggatctatcagtggataccccaggacacattgtcagcttccatatcgcatgcatcatactcatgtaacagccagctagtttttgctgccttcactgatggtaacttaggtgtttttgatgcggagaacttgagattaagatgtcgaattgcaccatcggtgataaacagtaatgtctgtttcatgattccag

SEQ ID NO: 214748 - DNA, 3084 bp, Zea Mays
cacgaatctccacgcgcccgggaagaaaacattgccaccacctccggccgctccgctctttcctttcaaccggagcgacgagagtcgagagacacgaggtgccgcaagagaaaggggaaatcgcagttatcatcggggaatccgaccccaagcatcgaactgctttcgtgccgtcggctcgttcccggcatgtagctgctacttgtcagctttcaaaggtttctgcatctgcatgacgcctaatctacattgttaaaggttttctgatggatggtgataaggtgaaggaatcagctccggattgtgcgtccggtgcagcagagccaaccaagaagcaggataagaggaaacgtgcctatgctgaatttgatgtggtggacaagaaatctgtatctgctgaatggcagcaagaaatggatgcactgtataaatactacaaggaggtttctggtcatcagctgaacccagaggagctttcatgcaccacaaatgactctattatagcatgcttgctggaggagagcagtctttcttgtgccaagttaacagatggaatctacaagaggatgaagctgcaatatggtgtcactgagtcttcagtgcgcacctcagtactcaacattggtaggagatcttcatatgggatttctgctatggatgtcaatggtctggaggatgagtcggattcaagcctttggtgttgggagacagaagatttggcattattacccttgcatctacgtagtagtttgagcattcgacgcacagctcggaaattaatccataaaaggattctggttctttcgggcaagctggctaccaaagatgccagtaatgcttgtagcaaccagaacagccttatggaaaatgctggggaagcgctagatctagatgagattcgctctatcattgagtcaaaacacaagaatgatgatgacattaaaacggaggcacaagatttccaagccatcaggaaagccgtgaagaaacagcaaatgatggtggggcatattcaaactgagaaaaataagaaagaacgggaacttaggcatatctatgagaaaactgagagagaagcaaaacgcatcgagagagaaaataagcggctaaagaagcatcaggaagaagaagagagggcaaagaaaaagaaggagaaggaagaggctgagttgaaaaggaaggcttcgattcaaaagcaagcaaacctcatggaacgtttttttaaaagaaaggcggatagcaacataggaagttcagatagtcaccacatggagaggactacatgctcaaaatcaacaggaaacattgaagaacttgctgttgcagctacgtcagcaatggattgtacattatgtaaagaaaatcatttgagcatggaggaactccggatgatacatgttgcaaaatggaggacactctttcaacataacagattgcgccattggggtgttaggagaagtcctaagattcagttgtttcttgagctaaggctacaaaagccctctacgcctatagcttctgatagtatgtcaactccaacaaaagaacagtcatccctagagagcacaggaaaccttgatatcaccaagcttctggatgaacttgagataccatctcgttctcagaatagcacatcgtcttcagttttgcttgtgaagaagcttctgcagtttgataatagctctaggccagcatactacggtacctggagaaagaagagttctacagttagcgcaaggcaaccctttcagagggatgaagaactcaattatgatgttgagagtgatgaagaatgggaagaggtggatcctggtgatcctggtgaaagactctctgattatgaggaagatgatgagaaaaccatgaatgaacatgatgccatgattgatgcagaaaaggaaactgagaacagtttcatagtgcctaatgactatctttcagatgatgagggcatgcaatgtgagtctgtatgtgtcagatttgatggaatcagtagcctgctgagcatccctggggttacagttgaggaacttaatgctctactgcaaaggcagaaagctcttcatatcatcacggagcatgctctcaaaatagacagacctctagtcatatgtaacctggatcataggaaacttggcctgctgaatgctgaaggtatcactggaatgctgaagatggagaaaatctgtttgcaagctctttgtatgaagaaataccctggcagccccatcattgatgtgcctgtggttaatacgaccattgaggatggattttgccgatcaaacaaaaagagccctagaacacccgtatcatccaaagccatttcagaatcagacatgcctgaatttgccaaacttgttgcatcatgccctcaagggagagtcaaactggtggagttgttacatgagacatttccatatgtctccaaggcacgacttaagaacaaagttggggagattgctgagtttaccaaaaaccggtggcaggatatcttggatcggtacaatttatctctttctccagataaaggtgaaggcctgaaatgtgcagcatcgtgctgctcccagcagtgccagccacccaatgagtcaggtaatacaggcgaatcttcttctccccagtgctccctgaaatccgaaatggtcaggcaacaactcggcgcacaagggtcatcacatggcagcgcacggcacccgagcaccaagatggcaggcgggcagtaagacttgtagcactgcgcatgtacatttgcctgttaggttataaaatgtactatagtatagtaatgtagtttcagtatgtagaagcctagaaaccagcaagcagcaggggccgaagcctgtttttgtgtagctcaggcagtttgtgatgaatggttcccccctgcctcccatgtaaattcacactgcttcctggtgttgttacacacctcatatgcgtttatgtgcttgtatagcagtgcactgtgcacgaggtgttcgcgctactgcagtcatctaaaaccttcgtagatattattgctgtcacttccagaatactaatttgggcctaactcttagagagcaatctatggtcttagagttt

SEQ ID NO: 214749 - DNA, 5305 bp, Zea Mays
atggactccctggatccgccctgccgcctacccccgccgcacaactccaccgcgccctcgtccccgtctccggcgtcggttgcggggcctaggccggcggcagtgaggtccgggagcgagacccccacgacggcagtgaggtctgggagcgagacccccacggcgtccccgtccccgtctgcgtccccgtccccatccacgcccgggacgcccacggccgcggtcgcgtctcccccgccgcacaactccaccgcggcgagccagagcgatgttcctcaccagcagccggggcaacgtcgtcccatgtgcgccgtatgcacgaagcccctccgcctctgcctctgcggccgcctccgctccccgcctgtggacaacgccgtcggagtcaccgttctgcagcacgcgatggaggcccaccacccgctcaactccacgcgcgtggcacgcctcggcctccgaaacctcgtcgtcgctcaggtcaccgacgtcaaccaccgtgcctgcttcatcctcaccatgcttgatgctggcggcggcgcggcggcttcgggtcctgcaggcggtcctgtagttggtgaagacttgaattcgtccatctgcagcacacgcccaaccacagctgttagttggagttcggacattcggacgcgacgcagagcacgggaatggcgtggtcggtggtggaactggaacggaagcggctacccagctgggcgcggtgatggaggcgttgtcccagccgatgtgcgccacgtgcttcatgtcggtcggcttcctgatctgcatctccggctccttcacatcagctacacccgtgcaacacacaagattgtggattatgatgtgacgataccaagctcacctattttggttggagttgggagttttagatatgaggagcagagggtgatcgaggtgcaaattaggatgtggcagcaaggggaccctaacttttggacaattaggcccttgtctgatatgatggttcgagctgccacacatgatgtctgcttccttctcaatatctatgagaaaacgatggaaaagttaagcaaagagaggctaagaaagcgtttaggacttgaagaggctacaaagaacaaaggttttgaccttggtaacggaggaaagacacaaaatgtttcagtaccgactgttgaaggtgtagctagaggaactagctatggatgggtggatggaggtttgcggggtacaaatcttggtgctggtgtgattgatcctacaaacgtacactcagataatcttttgcacgtctggtctatgcccagcacagcaaatgttagccagcaagaagcgcctcggcctctagagaaagtcaaccttttggcagcaagaaatgaaagggaaagttttcaaattgctttacgcccaaaggtttcatgggcaacttcaggtattgcagggtctgtgctgatacaatgcaccgatctctgctcctcctcaggagacagatatgaaaattcaagcttacccgaggatcgcattggtgaattggtgaaagaaactttggctgcagtaggactaaaggttgttccgactgagtacaaatatctgtcaaagaaaatattgccaacaaatcagggttctgtcacggagtattttctttccattcgcccaactgagagggcctggccagcggtgtactttctgtatgatctctcaccaattacattcaccatcaaagaggaaagaaggaacttccttcattttataactcgtctttgtgcagttcttggtggcacatttgccatgacaggaccgcatcttagcagggagaaggataatgaggaggaagaaagtgatagagatggtttcttccgcagattactcagggatagcaaagaggaggacatggaactgacaccaagctcagatggtttgttgaagcgactttttcgtgataaggaggacaggcaaggtgaggatgatgagaaggattttttcgcaggatgttcaaggataagaacgaggagaggagagatagtaatcatgcaagacatgggaatgaggaaagactgggcaagagtgtggaagatgatgacagagaaggtttcttccgcaaaattttcaaagataagaatgaggagaggaaagatgaagggcatcaaaagccagatgagagagaaaaggcaactctttaaggagaaaaacgatgagaaaaaggaaggcagcacaccaagcaagaaagaggaagatgataaaggccataaaaatgcagatgatgataatttctttcgcaggcttttcaaggataagaatgaagaaaagaaagggattgttcatgacaggaatgaagatgacaagtgtgaggaaggttgtttagagtgcacccagaagatcctaagagtgggcacatagaaagcagtcaatctaacaatctttctgaggggagcctaggatcagaaagcttttttaagaggctattccgtgatagagaccgctcacttgaagattctgagatttttgggtcaaaaatggcaaaagaggcaaggatctggtctcataaacaccctggtactacaggaatcaatgagaagcaaagtgggaaaccaccattaccaattaatgcagtagcagagcttcgaaaaggttcttactatgcttcgttggaacttgttcaggctttatgtgatacatcttatggcctggtagacatatttcctattgaggatcgagtatgctttccgatgggaaagggcatatatcgagtggttcatatacctgaagacgagtctgttcttctgaattctagggagaaagctccttaccttatatgtgttgaagttttaaaagcagaagctcctagccactctaaaggatcatcagatgggcacaaattatcaaaagatgggataccattggctaatggagatgtgcaactaccaaaaccacctccatgggcctatcctttgtggagcagacacgaaacacaaaactatgaaacagacataatgttgaagtctacttctcaggttattgaccaagcaatggctcaactctgggagactaaagggttcctgatcgggccggtgctctactcggcgtggtcgtcgccgttcgagctggccctcgacagggcggccaccacgccggttgtcgtcgcgagcctggtcatggacgcgttcttcgccgccgatatcgccgtctccttcttcgtcgcttacttcgacagatccgccaatctcttcgtcgacgaccgcaggaagatagccaccaggtacctcaagcggccgtcgttcgcgatggacgtggcctcgacgatcccgttcaacgtgatctaccagctggtgagcggcaggagcactgggtggttcaggtacctcaaccttctccgcctgtggagactgcagcgcgtcagcaagctctttgcgaggttccaccacggcgacagggagcacacctggctcggcagccaggtgcgcgacttcgcggacggcagcgtctgggtcaactacacctacgccgtgtactggtccatcaccacgctcgccaccgtcgggtacggcgacctgcacgccgtgaaccccggcgagatggtgttcgccacctgctacatgctcttcaacatcagcctcacctcctacatcatcggcaacaccaccaacctcgtcgtccacgccgcaaccaacacattcaagatgagggacatggtgcggcgggtctcgacgttcgggagcgtcaaccggctgccgccggagctgagggagcagatgatggcgagcgcgcagctcaggttcagcacagcggaggtgatccagcagcagctgctgtccgacctgcccacggcgctccggtcccgggtcgcgcaccacctcttcagggacgcggtccagcgctgctacctgtttcagggagtctccaacgacctcgtcgtgcggctggtttcggagatgagggcagagtatttcccaccccaggcggacatcatcctccagaaggtgaccaccaccgcctgctacatcatcgtctccggctcagcgcttgtgatgaagatagggccgcatggcatggcaggggaaatgggcgtcattctgggcgtcccgcagccgttctccgttcgtagcaggaggctcacgcaggccttgtgcatcagcaacagccatctcctggggatactccgttccaacaccgcagatgccaacaccgtatgcgccaattttgttaagcaactcaaatctctcaaggaactgcaggttgcagaggatgcgccgtttttcgaggagacattttccaaaacaaacatggatgagcttcagatcggctccatctttcagcagctgcttaacgacggcgacgctgccaggaggattccaaggcagaatcagaaagccagcttcggcaccgagcaacacgaagagaccgctccctgcatgttgccgcgtcgacaaggcggactacgagtggtcattcatgatcgctttcccagcgatggcgcggagaagaaccggggccttgcagcgggaaagcttatcctccttccggattcgctgcaagagctgatgaaagtagccgaggtgaagtttgggaaggcagcgaggagggtgctcaccgtcgagggcgccgaggtcgacgacgttgcggtgctgagggatggtgaccacctggtgttgtgttcctaggactaaccactagcaagtagtacaagcacggccgattcgcttcacctaacgatggcaatggatacacgaaactcgatactagatggctaaaaccatatagatactgaagtcatataattcgtatgatgacacatcaatctgtcgaccaaatatcatctaactacatactacgacgataacacaactgtgccggcaggatttgacagacataataaagccttctatggtgctaatgatgacacacttgcctgaagaacaagagcaatccttgcagatgttttcaagctataaagatgtgcaataacgtctgaacagtatttcaaaacacaggccatgcagatcgctaagaagatgatacaagaagcactggtagtggttgaagttgtaccacacgacgttgttctgcatgacgacataccaagcacagtgcatcaaactgaataactgatcatgtagcaccagaagcagaagttgttgtcgtctcagtgtccgcaccaccattgcggacgacaaaaggcagctagaagaaactattactggctcacgaaaatgttccacccccacaactctgaaaaatatggcaaccatcaagcgcatgcatgtagttcctatttttgtacagattcaaaaaatatggcagatcatagaagtttccattgcgtgcg

SEQ ID NO: 214750 - DNA, 4172 bp, Zea Mays
ctgcagtgccggccatcagccgtaacatagcggcgagatgtccttcttgttccgtaaaagcgcgcccgtagccgcaggagatcgcgcgctccgtcaaggacccccctcgtcgccctcgacaccatgaccggcgcggcggcgcgaagttataaagttaatcatgacagtgagatgacacttggtcttacttgttcaccacatgctcttgaggatgctgagaaaaacatacttacgtttaggcatacacttgctggtgaagtggaaccaaatcaagagcaggttctgcagatagcccttgagatttgcaaggagggtgttatttccttctttgttcagaatcttccttccttgggttgggaggtatgtttttttcttcttctgaaattcaggaggactgcatatcattgcattaatagaagaaagaaagggttgggaggtatgtatattcacaaattgagtgtgacaacctttttcactgtgttattagccttattggtgccccaacggatttcttccgtgtcttgtctccacgagaatagctatattcaacgttggctcgccaagcctatcacaacccttctcttcctttactagggcttcgaacctgctatgttgagacaacgtaggcggagttatgttgctccagtatattgaaaatcattttgatcttctggatttccttgttgtttggtaaggcctgtttctgaagttatgaattggattggaacacagggaattggagcatgctgattcgtttcttggctggaaatgggaatgcaattgcagaaatatatagataactgattgcttcctatggctatttatttttaccacttatatttgcatagttgtattattttgtgtgtttgtttgtgaaatgcatttgtagtatatgcaatagttttaccacttctacttgcattattttttttcctcaaacgcacaagagagttgcacatcattatattaagagaggagaaaaggtctaaagtggaccagagtacaaagcccggagtgcagaaaaaactggacgtaagcagtaagcaccatgaacctaacacccatgcctcctctccaacaacacaagagaagaaacataagcaaaggataaggcagacccgactagtctaaactgtagcactagaagtagccaagaccctatttaaggcaactgcaagcccaagactctcaagatgcttagcacccgccttatcccagcagatcaattaatctaaaaacagtcttttgacagtgctaatggaaggattcactccatcaaaaacaaccttgttacgaagaagccataagcaccaagcccctagaattatgacactattgaagccttttatcctgctcttatgcacttttttaagagcctttccccaccgcacagcaaaagagatctcatcaatatcaaaagtgagatcacccagtcccatgagcgacaaaatatgatgcaaaaactgtctagcaaaactgcaagtgcaaaggagatattgggttgtttcttgctcttgatcacataggggacacaccaggtattgcaatcctctcatttgaagtctatcaacagtccaacacttattccttattgacaaccaaaggaaaaacttgcattttgagggagcccaagtcttccacaatcttttcgatggctcaaatgaaatggaacccatgaagaaggctgtatagcaggacttgcattatttttgtgtgtttgtctatgaactgctcctgtagtatatgccattgtaatactcctgcgcctgactgatttaactatgttttaccagctacaagaacttggaagtaaggtttggaatatttgttcaactatattttcttttcttagtggatctgcaatagcatacagtttccagcatatatgccttcgcctgacatctgtttttttagaacctctggccctttgtagttgcatgcatggacagatatagtacataatgcattcgctaaaacaagcagtcatggaaatgtactctgtagtatgcagatgttagattttgcaaaaaaaactaaagcaaacaaacaaataaatgagttagttaattttgcaaatgattatgttttcatacatttgattttatactgctctttcagatatatattggagtcaagtagcttcgagttgtttttccagtaagttgaattgccaaacttcgatattgcttctgatgctctgaacaccttcaaggatttgctaaccaaacatgaagatcaagtctctgaattcctgagctcaaattatgaacaggtcagccaaataatacctttatgtagaacgaatgaaattcataattttaatgtttattccaaataattaagaggaccaatagttttgctccaccctgtcccttgcattttgtatcttcctccgtgtcatcttttgcataggttggtttggcttttaatgaataattgttcttttgtattgctaaagttttgaagcgccgatccattgtaaacatgcgcagtttttactctacacaaagacaatcggtgaaggttagactatttaaattgcaatttcttgtagggtacaaaaatgcgatgctttaaggcacttcgctgcatgccagtttcgttcagagtttctgttagaggccccaaatgctcaatagtgaagagtttcattttcgaagttcgttacttaaacattatggtgggtcttctgaaggtattagagtataagttccctgcttatatttaaagaatcagcaatgatattgatcacccttctcatttcctctgtttcttgatttttcacttaagtagttatgacattttagtgccattatcttgtgaaaaatggcggttgttattagcacaatagatgagagatcctgctttggcttttggatatcttgccaagcaaaggtcatcctcagagactaagatatacgtgcagaactatactcttgcaattgttctttagtgactgccagagatccggccattcagatctaaatggctttctgtttatagctaaattgcatagcaccattgttcatgttgaatactaccattttatttctctgggctatttatgtattgcttgggtaccccagtcatcttgtatctaacagtgagtattcgagcagttctcatagtttctaatacaaaagtagttcaaatattccttcttaaatgaaatgacacgcaaatctcctgcgttgtttgagagaaaaaaagtagtccaaatatacacacttgccaactagccagtgctacaaattttcttcttttaagacaaatgatgaaaacaacacaggttagtcatagatagtttgttttcatcttcataactagtggccatctttttcatgctatacacattctttttttaatgcctctactaagtactacctccgttctcgaatatttgtcgtccgctagtttatttttgacctaaaacgtgacaaataaaaaagaacggagggagtactagccagtgtcttttgtaggattcaaccaaaaatatcaggatatgttccttgcacattttgaaggtatttgttgccaatccaaacaaacctcgagagattatctcaggttttggctgacaatcacagagaactgttgaagctactccacaatctccccactagcaaaggtattactactgtattgcctaattctaacattttaattatcaaagaaatcgagaagcttgcgcggatgtcagtataaaccctcaggaaattcgaacatagctccttgatgttgatgttcaggaaccctttctcacctcaaagttctgaagacatcctgtgtaatgtgctgccctgtatggagcttgtttttcatatatggaaaaggtttggccacaaactgcattctccgtgtgaaacacttagcattcgtatcggaattcattgatttatgcacttgtagcagaattcgctgcaggaataaactgcactgtggtttggtgttggtaccatcgagaaaattgggtgagggtgtgtagtattttatatgagtaagattgtcatcaagtggatccatctgttgcaatgggtgtcgaggctgattatcttattttctctctcttattcttgctcttttctctctcttattcttcctctttttttctctctcttcatcttctttcttcctttcccttccccttcttctttcttcctcttctttcc

SEQ ID NO: 214751 - DNA, 3013 bp, Zea Mays
ctgcagtgccggccatcagccgtaacatagcggcgagatgtccttcttgttccgtaaaagcgcgcccgtagccgcaggagatcgcgcgctccgtcaaggacccccctcgtcgccctcgacaccatgaccggcgcggcggcgcgaagttataaagttaatcatgacagtgagatgacacttggtcttacttgttcaccacatgctcttgaggatgctgagaaaaacatacttacgtttaggcatacacttgctggtgaagtggaaccaaatcaagagcaggttctgcagatagcccttgagatttgcaaggagggtgttatttccttctttgttcagaatcttccttccttgggttgggaggtatgtttttttcttcttctgaaattcaggaggactgcatatcattgcattaatagaagaaagaaagggttgggaggtatgtatattcacaaattgagtgtgacaacctttttcactgtgttattagccttattggtgccccaacggatttcttccgtgtcttgtctccacgagaatagctatattcaacgttggctcgccaagcctatcacaacccttctcttcctttactagggcttcgaacctgctatgttgagacaacgtaggcggagttatgttgctccagtatattgaaaatcattttgatcttctggatttccttgttgtttggtaaggcctgtttctgaagttatgaattggattggaacacagggaattggagcatgctgattcgtttcttggctggaaatgggaatgcaattgcagaaatatatagataactgattgcttcctatggctatttatttttaccacttatatttgcatagttgtattattttgtgtgtttgtttgtgaaatgcatttgtagtatatgcaatagttttaccacttctacttgcattattttttttcctcaaacgcacaagagagttgcacatcattatattaagagaggagaaaaggtctaaagtggaccagagtacaaagcccggagtgcagaaaaaactggacgtaagcagtaagcaccatgaacctaacacccatgcctcctctccaacaacacaagagaagaaacataagcaaaggataaggcagacccgactagtctaaactgtagcactagaagtagccaagaccctatttaaggcaactgcaagcccaagactctcaagatgcttagcacccgccttatcccagcagatcaattaatctaaaaacagtcttttgacagtgctaatggaaggattcactccatcaaaaacaaccttgttacgaagaagccataagcaccaagcccctagaattatgacactattgaagccttttatcctgctcttatgcacttttttaagagcctttccccaccgcacagcaaaagagatctcatcaatatcaaaagtgagatcacccagtcccatgagcgacaaaatatgatgcaaaaactgtctagcaaaactgcaagtgcaaaggagatattgggttgtttcttgctcttgatcacataggggacacaccaggtattgcaatcctctcatttgaagtctatcaacagtccaacacttattccttattgacaaccaaaggaaaaacttgcattttgagggagcccaagtcttccacaatcttttcgatggctcaaatgaaatggaacccatgaagaaggctgtatagcaggacttgcattatttttgtgtgtttgtctatgaactgctcctgtagtatatgccattgtaatactcctgcgcctgactgatttaactatgttttaccagctacaagaacttggaagtaaggtttggaatatttgttcaactatattttcttttcttagtggatctgcaatagcatacagtttccagcatatatgccttcgcctgacatctgtttttttagaacctctggccctttgtagttgcatgcatggacagatatagtacataatgcattcgctaaaacaagcagtcatggaaatgtactctgtagtatgcagatgttagattttgcaaaaaaaactaaagcaaacaaacaaataaatgagttagttaattttgcaaatgattatgttttcatacatttgattttatactgctctttcagatatatattggagtcaagtagcttcgagttgtttttccagtaagttgaattgccaaacttcgatattgcttctgatgctctgaacaccttcaaggatttgctaaccaaacatgaagatcaagtctctgaattcctgagctcaaattatgaacagggtacaaaaatgcgatgctttaaggcacttcgctgcatgccagtttcgttcagagtttctgttagaggccccaaatgctcaatagtgaagagtttcattttcgaagttcgttacttaaacattatggtgggtcttctgaaggtatttgttgccaatccaaacaaacctcgagagattatctcaggttttggctgacaatcacagagaactgttgaagctactccacaatctccccactagcaaagaaatcgagaagcttgcgcggatgtcagtataaaccctcaggaaattcgaacatagctccttgatgttgatgttcaggaaccctttctcacctcaaagttctgaagacatcctgtgtaatgtgctgccctgtatggagcttgtttttcatatatggaaaaggtttggccacaaactgcattctccgtgtgaaacacttagcattcgtatcggaattcattgatttatgcacttgtagcagaattcgctgcaggaataaactgcactgtggtttggtgttggtaccatcgagaaaattgggtgagggtgtgtagtattttatatgagtaagattgtcatcaagtggatccatctgttgcaatgggtgtcgaggctgattatcttattttctctctcttattcttgctcttttctctctcttattcttcctctttttttctctctcttcatcttctttcttcctttcccttccccttcttctttcttcctcttctttcc

SEQ ID NO: 214752 - DNA, 3481 bp, Zea Mays
ctgcagtgccggccatcagccgtaacatagcggcgagatgtccttcttgttccgtaaaagcgcgcccgtagccgcaggagatcgcgcgctccgtcaaggacccccctcgtcgccctcgacaccatgaccggcgcggcggcgcgaagttataaagttaatcatgacagtgagatgacacttggtcttacttgttcaccacatgctcttgaggatgctgagaaaaacatacttacgtttaggcatacacttgctggtgaagtggaaccaaatcaagagcaggttctgcagatagcccttgagatttgcaaggagggtgttatttccttctttgttcagaatcttccttccttgggttgggaggtatgtttttttcttcttctgaaattcaggaggactgcatatcattgcattaatagaagaaagaaagggttgggaggtatgtatattcacaaattgagtgtgacaacctttttcactgtgttattagccttattggtgccccaacggatttcttccgtgtcttgtctccacgagaatagctatattcaacgttggctcgccaagcctatcacaacccttctcttcctttactagggcttcgaacctgctatgttgagacaacgtaggcggagttatgttgctccagtatattgaaaatcattttgatcttctggatttccttgttgtttggtaaggcctgtttctgaagttatgaattggattggaacacagggaattggagcatgctgattcgtttcttggctggaaatgggaatgcaattgcagaaatatatagataactgattgcttcctatggctatttatttttaccacttatatttgcatagttgtattattttgtgtgtttgtttgtgaaatgcatttgtagtatatgcaatagttttaccacttctacttgcattattttttttcctcaaacgcacaagagagttgcacatcattatattaagagaggagaaaaggtctaaagtggaccagagtacaaagcccggagtgcagaaaaaactggacgtaagcagtaagcaccatgaacctaacacccatgcctcctctccaacaacacaagagaagaaacataagcaaaggataaggcagacccgactagtctaaactgtagcactagaagtagccaagaccctatttaaggcaactgcaagcccaagactctcaagatgcttagcacccgccttatcccagcagatcaattaatctaaaaacagtcttttgacagtgctaatggaaggattcactccatcaaaaacaaccttgttacgaagaagccataagcaccaagcccctagaattatgacactattgaagccttttatcctgctcttatgcacttttttaagagcctttccccaccgcacagcaaaagagatctcatcaatatcaaaagtgagatcacccagtcccatgagcgacaaaatatgatgcaaaaactgtctagcaaaactgcaagtgcaaaggagatattgggttgtttcttgctcttgatcacataggggacacaccaggtattgcaatcctctcatttgaagtctatcaacagtccaacacttattccttattgacaaccaaaggaaaaacttgcattttgagggagcccaagtcttccacaatcttttcgatggctcaaatgaaatggaacccatgaagaaggctgtatagcaggacttgcattatttttgtgtgtttgtctatgaactgctcctgtagtatatgccattgtaatactcctgcgcctgactgatttaactatgttttaccagctacaagaacttggaagtaaggtttggaatatttgttcaactatattttcttttcttagtggatctgcaatagcatacagtttccagcatatatgccttcgcctgacatctgtttttttagaacctctggccctttgtagttgcatgcatggacagatatagtacataatgcattcgctaaaacaagcagtcatggaaatgtactctgtagtatgcagatgttagattttgcaaaaaaaactaaagcaaacaaacaaataaatgagttagttaattttgcaaatgattatgttttcatacatttgattttatactgctctttcagatatatattggagtcaagtagcttcgagttgtttttccagtaagttgaattgccaaacttcgatattgcttctgatgctctgaacaccttcaaggtaaatataatcttgtcaatttgatctttaaaataaaaaatggatttatgtttgcttcttcaggattgatgtttgctgttgacaagatacttgcaggatttgctaaccaaacatgaagatcaagtctctgaattcctgagctcaaattatgaacaggtcagccaaataatacctttatgtagaacgaatgaaattcataattttaatgtttattccaaataattaagaggaccaatagttttgctccaccctgtcccttgcattttgtatcttcctccgtgtcatcttttgcataggttggtttggcttttaatgaataattgttcttttgtattgctaaagttttgaagcgccgatccattgtaaacatgcgcagtttttactctacacaaagacaatcggtgaaggttagactatttaaattgcaatttcttgtagggtacaaaaatgcgatgctttaaggcacttcgctgcatgccagtttcgttcagagtttctgttagaggccccaaatgctcaatagtgaagagtttcattttcgaagttcgttacttaaacattatggtgggtcttctgaaggattcaaccaaaaatatcaggatatgttccttgcacattttgaaggtatttgttgccaatccaaacaaacctcgagagattatctcaggttttggctgacaatcacagagaactgttgaagctactccacaatctccccactagcaaaggtattactactgtattgcctaattctaacattttaattatcaaagaaatcgagaagcttgcgcggatgtcagtataaaccctcaggaaattcgaacatagctccttgatgttgatgttcaggaaccctttctcacctcaaagttctgaagacatcctgtgtaatgtgctgccctgtatggagcttgtttttcatatatggaaaaggtttggccacaaactgcattctccgtgtgaaacacttagcattcgtatcggaattcattgatttatgcacttgtagcagaattcgctgcaggaataaactgcactgtggtttggtgttggtaccatcgagaaaattgggtgagggtgtgtagtattttatatgagtaagattgtcatcaagtggatccatctgttgcaatgggtgtcgaggctgattatcttattttctctctcttattcttgctcttttctctctcttattcttcctctttttttctctctcttcatcttctttcttcctttcccttccccttcttctttcttcctcttctttcc

SEQ ID NO: 214753 - DNA, 1058 bp, Zea Mays
gtgccggccatcagccgtaacatagcggcgagatgtccttcttgttccgtaaaagcgcgcccgtagccgcaggagatcgcgcgctccgtcaaggacccccctcgtcgccctcgacaccatgaccggcgcggcggcgcgaagttataaagttaatcatgacagtgagatgacacttggtcttacttgttcaccacatgctcttgaggatgctgagaaaaacatacttacgtttaggcatacacttgctggtgaagtggaaccaaatcaagagcaggttctgcagatagcccttgagatttgcaaggagggtgttatttccttctttgttcagaatcttccttccttgggttgggaggatttgctaaccaaacatgaagatcaagtctctgaattcctgagctcaaattatgaacagggtacaaaaatgcgatgctttaaggcacttcgctgcatgccagtttcgttcagagtttctgttagaggccccaaatgctcaatagtgaagagtttcattttcgaagttcgttacttaaacattatggtgggtcttctgaaggattcaaccaaaaatatcaggatatgttccttgcacattttgaaggtatttgttgccaatccaaacaaacctcgagagattatctcaggttttggctgacaatcacagagaactgttgaagctactccacaatctccccactagcaaagaaatctataagaaggattacatacttcagatgctcagtggtggacaatgtatccaatattcagccggttagtttgtattcagcatgatagtagtcggctagatatttgtaaacagttagtagtgtaatgtgttacgattattttcacttccttcgatgtggtcctttccaagtgtaatgtgttttcgattttagattagatgtggtatatatatccgcatgtgcaatgttagaaaccagcacgtatatttattttgggaatattatacaatgtagaggctaagttgttttgaagactttattctattctaattatattcaaaggtgattagaattgaaataaattttagttgc

SEQ ID NO: 214754 - DNA, 869 bp, Zea Mays
ccggccatcagccgtaacatagcggcgagatgtccttcttgttccgtaaaagcgcgcccgtagccgcaggagatcgcgcgctccgtcaaggacccccctcgtcgccctcgacaccatgaccggcgcggcggcgcgaagttataaagttaatcatgacagtgagatgacacttggtcttacttgttcaccacatgctcttgaggatgctgagaaaaacatacttacgtttaggcatacacttgctggtgaagtggaaccaaatcaagagcaggttctgcagatagcccttgagatttgcaaggagggtgttatttccttctttgttcagaatcttccttccttgggttgggaggatttgctaaccaaacatgaagatcaagtctctgaattcctgagctcaaattatgaacaggtatttgttgccaatccaaacaaacctcgagagattatctcaggttttggctgacaatcacagagaactgttgaagctactccacaatctccccactagcaaagaaatctataagaaggattacatacttcagatgctcagtggtggacaatgtatccaatattcagccggttagtttgtattcagcatgatagtagtcggctagatatttgtaaacagttagtagtgtaatgtgttacgattattttcacttccttcgatgtggtcctttccaagtgtaatgtgttttcgattttagattagatgtggtatatatatccgcatgtgcaatgttagaaaccagcacgtatatttattttgggaatattatacaatgtagaggctaagttgttttgaagactttattctattctaattatattcaaaggtgattagaattgaaataaattttagttgc

SEQ ID NO: 214755 - DNA, 1587 bp, Zea Mays
aacctcaggtcaccagcaccttctccccacacccccgagttcgagtgcaaccgaagagccaagaggagctgtccgcgtcgtttcgactcccgccgccgaaaggccgagcccgtgcccgtgctcgcaaccctaatcccctttccccgttgcctctcgccgggaagaagagggagccgcgtggcgtcgccagccagcacgcgccccctcccttcccggctccctccgcgccgtgggcgaggcgcatccaacccgatccgccctcaccgcgaggcggaggacctggaggggagggagacaggtctggtgcaccctctctcgtccgcgccggcgagcgccaagtgtcccccacagagaaagcaaggattgaggctcaggtgaaggctgctgaagcagctgcacaacaaaagtttgaggaagaaatgagggtgaagcgagagcaggaaagggaagcagcacggctggcagtacgcatatgaagaagactgttgatattgacaacagtgacttcctaaaggagctggagaacttcagcaaaacgtggcagtcgaatccacctggcaaattaatcgtggattttattgatggggacttgccaccggggttagggagccctctggagaggcttggcctgttcatgaagaacgatctcgaggatgaggtggaacaggaagtcgaggacagcgcatcaccctcgatggacgttgacatgaggaaagatttagcagggcatgaaatgcaagacagcatatcacccgtgaaggtcattggcacgaaggatgacttccagggagcggacattaacacgaggaaagatttccaggaagacgcagcagggcatgaaatgcaagactgcatatcagccgtgaaggttattggcacgaaggatgacttccagggagctgtagggcatgaaatggcgaacagcctatcaccatccactttcgttgacacaaagaaatattccgaagggacagaacatgagatggtggatagcatatcgcctttgatggatcctaacaccgaggaaggggagatcagctgctgacgttagctacacttgtcatccacatcatttgttgagttcgtgaggcagacatccttgctgggttgttggattaggcgacatcataagcagagtgacgaagaaacgctattcccctctggttgtgtcgtagaacaatgtggagaacatgtgtcagccgaactgagtagtggttttggctttgttgcggttttttttcctgtcgtggtcttgtcagtcgggcactccgctgtatgctgggttacctgagctcgtcagctggatgacctgtataaaaacatgatgaaattagggaggggttaatttagtgctagtatatattgtaggtgtaggactgtaggagcttatggtggagccggctgcagcacacaagctatagcattgttctcagatttggtcagcgcgccgtagtaccttgttactgtattcattctaaaacttgaataaaatgatgccagtcgcacaagttactgtaggagtagctatgacatgttatttgaaatactgtgttcggtttattcgatgaaagtgacgcttcctgagtt

SEQ ID NO: 214756 - DNA, 2044 bp, Zea Mays
aacctcaggtcaccagcaccttctccccacacccccgagttcgagtgcaaccgaagagccaagaggagctgtccgcgtcgtttcgactcccgccgccgaaaggccgagcccgtgcccgtgctcgcaaccctaatcccctttccccgttgcctctcgccgggaagaagagggagccgcgtggcgtcgccagccagcacgcgccccctcccttcccggctccctccgcgccgtgggcgaggcgcatccaacccgatccgccctcaccgcgaggcggaggacctggaggggagggagacaggtctggtgcaccctctctcgtccgcgccggcgagcgccaagtgtcccccacaggtaaaaatcaaattttccgtgcgcagctctgcacatacctcttccaaagatatacctgttcaaacagctggtgtcaaagaggggtcattaaaccactcttttcctaccggcaacaaagaggcatatttaaattgcacttttccttttgctaaggagaatgctaaaatttcaagtacacgagaaactgagcgcagctctggttcaactggaaatgattcatggtcttgcaatgacatttctacttcgcctatcgcctcctctgtacaaggtgaggaaagttacctttgtgatgaacctttatcaccaagcagggctcttcgtgcagcaatgctcaggagtcgttttgctgggactatagtgaaggctcaacagaaggcacttctggatcatgggaagaatatagaccctgtgaaattgcaattggaaaaggagaggctggaaaagaggcagcaagaagagaaagcaaggattgaggctcaggtgaaggctgctgaagcagctgcacaacaaaagtttgaggaagaaatgagggtgaagcgagagcaggaaagggaagcagcacggctggcagtacgcatatgaagaagactgttgatattgacaacagtgacttcctaaaggagctggagaacttcagcaaaacgtggcagtcgaatccacctggcaaattaatcgtggattttattgatggggacttgccaccggggttagggagccctctggagaggcttggcctgttcatgaagaacgatctcgaggatgaggtggaacaggaagtcgaggacagcgcatcaccctcgatggacgttgacatgaggaaagatttagcagggcatgaaatgcaagacagcatatcacccgtgaaggtcattggcacgaaggatgacttccagggagcggacattaacacgaggaaagatttccaggaagacgcagcagggcatgaaatgcaagactgcatatcagccgtgaaggttattggcacgaaggatgacttccagggagctgtagggcatgaaatggcgaacagcctatcaccatccactttcgttgacacaaagaaatattccgaagggacagaacatgagatggtggatagcatatcgcctttgatggatcctaacaccgaggaaggggagatcagctgctgacgttagctacacttgtcatccacatcatttgttgagttcgtgaggcagacatccttgctgggttgttggattaggcgacatcataagcagagtgacgaagaaacgctattcccctctggttgtgtcgtagaacaatgtggagaacatgtgtcagccgaactgagtagtggttttggctttgttgcggttttttttcctgtcgtggtcttgtcagtcgggcactccgctgtatgctgggttacctgagctcgtcagctggatgacctgtataaaaacatgatgaaattagggaggggttaatttagtgctagtatatattgtaggtgtaggactgtaggagcttatggtggagccggctgcagcacacaagctatagcattgttctcagatttggtcagcgcgccgtagtaccttgttactgtattcattctaaaacttgaataaaatgatgccagtcgcacaagttactgtaggagtagctatgacatgttatttgaaatactgtgttcggtttattcgatgaaagtgacgcttcctgagtt

SEQ ID NO: 214757 - DNA, 2801 bp, Zea Mays
aacctcaggtcaccagcaccttctccccacacccccgagttcgagtgcaaccgaagagccaagaggagctgtccgcgtcgtttcgactcccgccgccgaaaggccgagcccgtgcccgtgctcgcaaccctaatcccctttccccgttgcctctcgccgggaagaagagggagccgcgtggcgtcgccagccagcacgcgccccctcccttcccggctccctccgcgccgtgggcgaggcgcatccaacccgatccgccctcaccgcgaggcggaggacctggaggggagggagacaggtctggtgcaccctctctcgtccgcgccggcgagcgccaagtgtcccccacaggcttggctgaggaagacccgtgctctgtgggtcttggacactgcttcaccatttaccaagtcttgagttattgctccgttgttagacaagaaatcaaactctctggccaaacacaatgatggcacaagcctgtaagaagaggagaggagtttatataagcactgaattgggaggctctgatacagattctgatgttgagggaagcaaaccctctaaaaaatctggggtgacatcaatttctacatgcgagcatcagtcatcttataatctcaaggctgcaagtatgaaaagtagcaggatgataaggctgtgtggaaatattgtaaggaagctcatcgatcacaaaggtggttggcttttcaaagatcctgttgatccagatctatataagattcctgactactttgatgttatccgcaacccaatggatttgggtactgttaagaataaactcacaaaaaagaagtatgtaagcattgaggagttcgcagcagatgtgaggctaacattttcaaatgctatgaagtataatcctccaggcaatgatgtacatgctttcgctagagaattgaatgaaatatttgactcagaatgggaatcagtagaaaggaaatttagaggccgaaaccttgttcaagagcagaagacaaaggccataaaagttcgagctatcgtggattcgaagtctacagttgctagagggcaggttgcctgctcaaatcctaaatctttggctgcaagagggccagtaccttgctcaaattcgtttgcaaagaagacactgacagatgcattatcctccaaaatatacctgttcaaacagctggtgtcaaagaggggtcattaaaccactcttttcctaccggcaacaaagaggcatatttaaattgcacttttccttttgctaaggagaatgctaaaatttcaagtacacgagaaactgagcgcagctctggttcaactggaaatgattcatggtcttgcaatgacatttctacttcgcctatcgcctcctctgtacaaggtgaggaaagttacctttgtgatgaacctttatcaccaagcagggctcttcgtgcagcaatgctcaggagtcgttttgctgggactatagtgaaggctcaacagaaggcacttctggatcatgggaagaatatagaccctgtgaaattgcaattggaaaaggagaggctggaaaagaggcagcaagaagagaaagcaaggattgaggctcaggtgaaggctgctgaagcagctgcacaacaaaagtttgaggaagaaatgagggtgaagcgagagcaggaaagggaagcagcacggctggcagtacgcatgatgaagaagactgttgatattgacaacagtgacttcctaaaggagctggagaacttcagcaaaacgtggcagtcgaatccacctggcaaattaatcgtggattttattgatggggacttgccaccggggttagggagccctctggagaggcttggcctgttcatgaagaacgatctcgaggatgaggtggaacaggaagtcgaggacagcgcatcaccctcgatggacgttgacatgaggaaagatttagcagggcatgaaatgcaagacagcatatcacccgtgaaggtcattggcacgaaggatgacttccagggagcggacattaacacgaggaaagatttccaggaagacgcagcagggcatgaaatgcaagactgcatatcagccgtgaaggttattggcacgaaggatgacttccagggagctgtagggcatgaaatggcgaacagcctatcaccatccactttcgttgacacaaagaaatattccgaagggacagaacatgagatggtggatagcatatcgcctttgatggatcctaacaccgaggaaggggagatcagctgctgacgttagctacacttgtcatccacatcatttgttgagttcgtgaggcagacatccttgctgggttgttggattaggcgacatcataagcagagtgacgaagaaacgctattcccctctggttgtgtcgtagaacaatgtggagaacatgtgtcagccgaactgagtagtggttttggctttgttgcggttttttttcctgtcgtggtcttgtcagtcgggcactccgctgtatgctgggttacctgagctcgtcagctggatgacctgtataaaaacatgatgaaattagggaggggttaatttagtgctagtatatattgtaggtgtaggactgtaggagcttatggtggagccggctgcagcacacaagctatagcattgttctcagatttggtcagcgcgccgtagtaccttgttactgtattcattctaaaacttgaataaaatgatgccagtcgcacaagttactgtaggagtagctatgacatgttatttgaaatactgtgttcggtttattcgatgaaagtgacgcttcctgagtt

SEQ ID NO: 214758 - DNA, 2849 bp, Zea Mays
aacctcaggtcaccagcaccttctccccacacccccgagttcgagtgcaaccgaagagccaagaggagctgtccgcgtcgtttcgactcccgccgccgaaaggccgagcccgtgcccgtgctcgcaaccctaatcccctttccccgttgcctctcgccgggaagaagagggagccgcgtggcgtcgccagccagcacgcgccccctcccttcccggctccctccgcgccgtgggcgaggcgcatccaacccgatccgccctcaccgcgaggcggaggacctggaggggagggagacaggtctggtgcaccctctctcgtccgcgccggcgagcgccaagtgtcccccacaggcttggctgaggaagacccgtgctctgtgggtcttggacactgcttcaccatttaccaagtcttgagttattgctccgttgttagacaagaaatcaaactctctggccaaacacaatgatggcacaagcctgtaagaagaggagaggagtttatataagcactgaattgggaggctctgatacagattctgatgttgagggaagcaaaccctctaaaaaatctggggtgacatcaatttctacatgcgagcatcagtcatcttataatctcaaggctgcaagtatgaaaagtagcaggatgataaggctgtgtggaaatattgtaaggaagctcatcgatcacaaaggtggttggcttttcaaagatcctgttgatccagatctatataagattcctgactactttgatgttatccgcaacccaatggatttgggtactgttaagaataaactcacaaaaaagaagtatgtaagcattgaggagttcgcagcagatgtgaggctaacattttcaaatgctatgaagtataatcctccaggcaatgatgtacatgctttcgctagagaattgaatgaaatatttgactcagaatgggaatcagtagaaaggaaatttagaggccgaaaccttgttcaagagcagaagacaaaggccataaaagttcgagctatcgtggattcgaagtctacagttgctagagggcaggttgcctgctcaaatcctaaatctttggctgcaagagggccagtaccttgctcaaattcgtttgcaaagaagacactgacagatgcattatcctccaaagtaaaaatcaaattttccgtgcgcagctctgcacatacctcttccaaagatatacctgttcaaacagctggtgtcaaagaggggtcattaaaccactcttttcctaccggcaacaaagaggcatatttaaattgcacttttccttttgctaaggagaatgctaaaatttcaagtacacgagaaactgagcgcagctctggttcaactggaaatgattcatggtcttgcaatgacatttctacttcgcctatcgcctcctctgtacaaggtgaggaaagttacctttgtgatgaacctttatcaccaagcagggctcttcgtgcagcaatgctcaggagtcgttttgctgggactatagtgaaggctcaacagaaggcacttctggatcatgggaagaatatagaccctgtgaaattgcaattggaaaaggagaggctggaaaagaggcagcaagaagagaaagcaaggattgaggctcaggtgaaggctgctgaagcagctgcacaacaaaagtttgaggaagaaatgagggtgaagcgagagcaggaaagggaagcagcacggctggcagtacgcatatgaagaagactgttgatattgacaacagtgacttcctaaaggagctggagaacttcagcaaaacgtggcagtcgaatccacctggcaaattaatcgtggattttattgatggggacttgccaccggggttagggagccctctggagaggcttggcctgttcatgaagaacgatctcgaggatgaggtggaacaggaagtcgaggacagcgcatcaccctcgatggacgttgacatgaggaaagatttagcagggcatgaaatgcaagacagcatatcacccgtgaaggtcattggcacgaaggatgacttccagggagcggacattaacacgaggaaagatttccaggaagacgcagcagggcatgaaatgcaagactgcatatcagccgtgaaggttattggcacgaaggatgacttccagggagctgtagggcatgaaatggcgaacagcctatcaccatccactttcgttgacacaaagaaatattccgaagggacagaacatgagatggtggatagcatatcgcctttgatggatcctaacaccgaggaaggggagatcagctgctgacgttagctacacttgtcatccacatcatttgttgagttcgtgaggcagacatccttgctgggttgttggattaggcgacatcataagcagagtgacgaagaaacgctattcccctctggttgtgtcgtagaacaatgtggagaacatgtgtcagccgaactgagtagtggttttggctttgttgcggttttttttcctgtcgtggtcttgtcagtcgggcactccgctgtatgctgggttacctgagctcgtcagctggatgacctgtataaaaacatgatgaaattagggaggggttaatttagtgctagtatatattgtaggtgtaggactgtaggagcttatggtggagccggctgcagcacacaagctatagcattgttctcagatttggtcagcgcgccgtagtaccttgttactgtattcattctaaaacttgaataaaatgatgccagtcgcacaagttactgtaggagtagctatgacatgttatttgaaatactgtgttcggtttattcgatgaaagtgacgcttcctgagtt

SEQ ID NO: 214759 - DNA, 3523 bp, Zea Mays
atttcacctttttcctcaaaaaagagagggaaatcatattccagggccgcccgcgccggaaccgaccacttcgccggcagcgagccggagactacgcggagcccctatccccgcgccggcgtgggcggagggaggagaaggagcagcagcagcagcagaaggataaaggggggctttgggagcctctgagaagaagattctagaagctacctgaggcgaggcgagcgcgccgcggcacgagtgatctcggtggaataagtcgcgcggggccggcgccgtgggggatgcgcctctggatgccgacacgctccgggatttgaatggtagccagatctcgagggggaggggagcttctcgaagcggggtaaggcgcgcggtctggttggccggcggttagggtttggcgggagcgggatggtggggagctcggtggagggaggagcagacggagatgggggctgctgcggcgtcggggacacctcgcccgggaccatcgtgtgggtgcggcggaggaacgggtcctggtggcccggcaggatcctgggccctgaggaactcccaccgtcgcagatcatgtcgccgaggtccggtacgccggtcaagctcctcggccgggaagacgcaagcgtgtgtggagagtttgatgcctgtattgagaaggcagaggctacgcaagggactcttgtgaagaaaagagagaaatatgcacggagagaagatgctgttcttcatgcacttgaattggagaggaaacagtttgcatcgaagtatcagattcaaggtttcagacctggaccatctggtaatatttctgcttgcacaaaacaccgcaaagaccttggaagtactcgatacaagagtaaaaagagcaagaattgcaaagatgtatctgttcctcctgacgtaaaaaaagaagtgggacaatgtttcctacatgctggttcaaagagaaacttttcagaatctcttactcaaggaaatgttgtcagtaatcacatgggtaatttctctcatttgagccattctcatggaggtgacactttagagaacaaggagagtacaattgtgaagaaaaatagatcggatggaagtgattttgaagactctcttgtttcaaaatcagatagacgcagaccgatttctcaagtattgcagagtagtgaaaacttgcttcctcacttaaagcaaaacaatgattttggggctttgttaatcaaggagaataataatccttcacttgccacctcccggtccagaagaaataaatatacatacatggctagtgattctggtgaaactcagagtcatagtgatttaccttctataaagatgactgctactggagctgattttgagaatgaaagctatcttcggcatactggttatttttctgaggagcagacttcttctgacttcgttgagaagcaagtaactgagtcttcagagagggaatgctcagaaagtgagactgaagaggatgctgaacttctgcaaaatgcaagtgtgattctacctatagaatcacatgctcctgatccgtattctgttccaatatatgagaagttcaagcatgtggattatggtgacaatgaggtggcctattctaattatatgccccagttgaatgaatctgaggaagaggatggttcttctgagctgggtgtctctcagtggcacatgaaaggtaaacgtaacaatcgtaatgccacaaagagatcagtggacatgagagatggaaatacatggttaaaaaactacaatgggtcattaaaagggtctttgcataacacaaatgatgggaatcccagaaaagaaggtatgcacacatctggtgaaaagttttttgaggaaagcatttaccaaattaaagaggaacccagttatgatgattctgatgaaactaatgtatttgaggacacgagccattcagaggctaacttgtactatggtaaaagatgcacttcattcttgagaaccacaagagatcttagtcgaagatacagttactttaatgactatgagaatgactcttcaaatgtttctcccctaaataaggacactgaacagatgtaccatgttgatcggaatgcgtattgggatggaccttcattttaccaaacgaagttgacttcacgttttggtggcatgaggccaatgttgttcaatgttaacctcaaagttcaggctagctaccaaggagagcatgtccctcttgtctctttaatgagcagacttaatggcaaagcaattgttggacaccctatccaaattgaaatagttgaagatggttccacagatcatctgatattatgtggtgacagtggtatgcaagagagctcagctgctccacctgcttggccaacaggtagaaggactgccatgcaaagagttccccgttcaaatccatcaggagcactgttggatggcgataatgaaggtggtcttgtgtattctgattatgagatgaaaccaaccaagttgtacacttcttccaatcatcaggttaaggtgaataagaaaagcagttcaaatactaggaggtcagtagctaagtcccaaaagaagtcatccaagaaaacaaacctctcaagccagaaacgtagagttctctcttccatttccactgcaaaaaaacatcatggagaaggtggccgagcaaaggcacattggcgtaatgacatattgggtggtttaatcagatcagaaggagttcctctagtgacatgtgtcccaacgaaggttgtgttcactaggatattggaagcagttggcaggccacctctatctgtcgttcaccgtgttagaatgactagtccttcagtgcgagatcctccgtaggcttcaactgtagtgctatatatggttatatgttgccagccattgacatgcaagtttgatgtacattctgttaattgaagaggcagaccattcaatcatccggtagcacctgtgaagagtcagattgatatggttgctctaaaataacttggaacagctgagctcttattagcagtggtaacctgtaaaaatcaataacgcttgtgtatttctgactggagactgatcatgaatgcttcagagcagcttgtgtatttctgactggagacagatcatgaatgattcagagcagctgagccgttgataccatgaaggggtactctttgatgtagctaggagtctaggactggtggctgtcttttggtttcgtcacaactgtttactgtaaagtactaacttaagcattttaggtgtcaatttagttaaaacatttgtgtcatcatatatagcaataggtcataggttttctaatgacatgtataatcccccaattatatcctgatgtatctgttatttgttgtcgagatgtagttgattcagctgtatgtttagaagcatgtgtatctagtcgatgtaatatatcagagcaagtactccaacatccaaatggtgtaacaacctagtcatccatgtgaagattcctccatagacattgtgaacaaaaagatcattccataaaatgctg

SEQ ID NO: 214760 - DNA, 3590 bp, Zea Mays
cccaaagaaaagaaaacctttttatttcacctttttcctcaaaaaagagagggaaatcatattccagggccgcccgcgccggaaccgaccacttcgccggcagcgagccggagactacgcggagcccctatccccgcgccggcgtgggcggagggaggagaaggagcagcagcagcagcagaaggataaaggggggctttgggagcctctgagaagaagattctagaagctacctgaggcgaggcgagcgcgccgcggcacgagtgatctcggtggaataagtcgcgcggggccggcgccgtgggggatgcgcctctggatgccgacacgctccgggatttgaatggtagccagatctcgagggggaggggagcttctcgaagcggggtaaggcgcgcggtctggttggccggcggttagggtttggcgggagcgggatggtggggagctcggtggagggaggagcagacggagatgggggctgctgcggcgtcggggacacctcgcccgggaccatcgtgtgggtgcggcggaggaacgggtcctggtggcccggcaggatcctgggccctgaggaactcccaccgtcgcagatcatgtcgccgaggtccggtacgccggtcaagctcctcggccgggaagacgcaagcgggattggtacaaccttgagaaatcaaaacgtgttaaagcattcaggtgtggagagtttgatgcctgtattgagaaggcagaggctacgcaagggactcttgtgaagaaaagagagaaatatgcacggagagaagatgctgttcttcatgcacttgaattggagaggaaacagtttgcatcgaagtatcagattcaaggtttcagacctggaccatctggtaatatttctgcttgcacaaaacaccgcaaagaccttggaagtactcgatacaagagtaaaaagagcaagaattgcaaagatgtatctgttcctcctgacgtaaaaaaagaagtgggacaatgtttcctacatgctggttcaaagagaaacttttcagaatctcttactcaaggaaatgttgtcagtaatcacatgggtaatttctctcatttgagccattctcatggaggtgacactttagagaacaaggagagtacaattgtgaagaaaaatagatcggatggaagtgattttgaagactctcttgtttcaaaatcagatagacgcagaccgatttctcaagtattgcagagtagtgaaaacttgcttcctcacttaaagcaaaacaatgattttggggctttgttaatcaaggagaataataatccttcacttgccacctcccggtccagaagaaataaatatacatacatggctagtgattctggtgaaactcagagtcatagtgatttaccttctataaagatgactgctactggagctgattttgagaatgaaagctatcttcggcatactggttatttttctgaggagcagacttcttctgacttcgttgagaagcaagtaactgagtcttcagagagggaatgctcagaaagtgagactgaagaggatgctgaacttctgcaaaatgcaagtgtgattctacctatagaatcacatgctcctgatccgtattctgttccaatatatgagaagttcaagcatgtggattatggtgacaatgaggtggcctattctaattatatgccccagttgaatgaatctgaggaagaggatggttcttctgagctgggtgtctctcagtggcacatgaaaggtaaacgtaacaatcgtaatgccacaaagagatcagtggacatgagagatggaaatacatggttaaaaaactacaatgggtcattaaaagggtctttgcataacacaaatgatgggaatcccagaaaagaaggtatgcacacatctggtgaaaagttttttgaggaaagcatttaccaaattaaagaggaacccagttatgatgattctgatgaaactaatgtatttgaggacacgagccattcagaggctaacttgtactatggtaaaagatgcacttcattcttgagaaccacaagagatcttagtcgaagatacagttactttaatgactatgagaatgactcttcaaatgtttctcccctaaataaggacactgaacagatgtaccatgttgatcggaatgcgtattgggatggaccttcattttaccaaacgaagttgacttcacgttttggtggcatgaggccaatgttgttcaatgttaacctcaaagttcaggctagctaccaaggagagcatgtccctcttgtctctttaatgagcagacttaatggcaaagcaattgttggacaccctatccaaattgaaatagttgaagatggttccacagatcatctgatattatgtggtgacagtggtatgcaagagagctcagctgctccacctgcttggccaacaggtagaaggactgccatgcaaagagttccccgttcaaatccatcaggagcactgttggatggcgataatgaaggtggtcttgtgtattctgattatgagatgaaaccaaccaagttgtacacttcttccaatcatcaggttaaggtgaataagaaaagcagttcaaatactaggaggtcagtagctaagtcccaaaagaagtcatccaagaaaacaaacctctcaagccagaaacgtagagttctctcttccatttccactgcaaaaaaacatcatggagaaggtggccgagcaaaggcacattggcgtaatgacatattgggtggtttaatcagatcagaaggagttcctctagtgacatgtgtcccaacgaaggttgtgttcactaggatattggaagcagttggcaggccacctctatctgtcgttcaccgtgttagaatgactagtccttcagtgcgagatcctccgtaggcttcaactgtagtgctatatatggttatatgttgccagccattgacatgcaagtttgatgtacattctgttaattgaagaggcagaccattcaatcatccggtagcacctgtgaagagtcagattgatatggttgctctaaaataacttggaacagctgagctcttattagcagtggtaacctgtaaaaatcaataacgcttgtgtatttctgactggagactgatcatgaatgcttcagagcagcttgtgtatttctgactggagacagatcatgaatgattcagagcagctgagccgttgataccatgaaggggtactctttgatgtagctaggagtctaggactggtggctgtcttttggtttcgtcacaactgtttactgtaaagtactaacttaagcattttaggtgtcaatttagttaaaacatttgtgtcatcatatatagcaataggtcataggttttctaatgacatgtataatcccccaattatatcctgatgtatctgttatttgttgtcgagatgtagttgattcagctgtatgtttagaagcatgtgtatctagtcgatgtaatatatcagagcaagtactccaacatccaaatggtgtaacaacctagtcatccatgtgaagattcctccatagacattgtgaacaaaaagatcattccataaaatgctg

SEQ ID NO: 214761 - DNA, 4184 bp, Zea Mays
caggacacagccgccgccgtttcttcttctcccatcatctccctcgcagcgccggcgctccatcttccgctccctccctttactcgcgctcggtaagcaggcgacggcggcggtgctcaggtttgggctctcagcgacggtgtcagcggcttcccttcccgcctctcgctggtcgcctcgcgccctcgcctccggtcctccgcgcaccggccggtgaccctacgtgcgtgcctctctctctttctcctctcgcctctggtggatcgtcaatggctcccggccgcggcggctgcgccacacgccgcgcgcggcctgagggcagcgggagccagcagccgctactccaccaaggcggtcgcgccgctttgggggcgcttatgccccaaagcgaagcgttacccgtccgcttagtgcttcagcgcgctggggcgtgctcctagtgctgccttttggaaccctggttcttgagctccttgtaatttgaggcgtaaaaaaagattgtgcaacatacatgttcacacaaataaaatgccatatacatacaataactgcattgctgaagctaaggccttgctttgcatgtacattccacttgtcatgcttgttcgtcgtgttaagcaaaagtatactgtttgttaggaaactacgaggtacgacttattggcttactttaaaagttctagcggttaaacaagtggtgatctccatgcttttgtgggattcaataacagtaatcattggaaaatgtttgcatatgttaagacatttaaatttgttttctcccaagtttcatacttagcctcgtgtttcttatcttaaacatgttctatgtgtttcagttgaatagagggctattaattgtttggaatctacttttgtagttgattccaagcatggaaactctaccaaatggctcagtaaataatgctgagcttaaccaggaaaatgagaagtccatgtatgctagtgagtctgaagaagcacgggatatttttgtttacagagaagatgttgtgagcttgaagtccaaggaggatgtccgtggtgtagtattggaggtagctggggaatatgattatgatggtagcatcactgatgatgacattgatactgaggaacatgaagataaaactgcttatggagctgaaaatggtgttgccgatggtggcttgcagtgcagtttggggcccggggagcccggtgcctccacatttgttcttgtggcttacgattatatcgaaagcggaggagcttttggggatccatacaaactctacggtgtctcacagagtcagaaactattaccaaacaaaacagaagatgatagcatgtcgatacaactagaaacgaagggagatcagcaatctgttcctctagaggagcagaacccagaggaccttactcttttgtctcgtttctcatatacaaactggcaattaactgactggtgtctttctcagcgatacacttcatgtactaacgataccatgattgattctgataagcatacatggcagatatgtacatgctcagaaaactcagttccactgtctggtattccagaatctcaagctgatgctcagattgatacagatacaggtcacaggcagacagatgttgattctactgcagatgtattgagtatgtcggatggagataattcatgcatagccaaagaatcagaaacaggaactagtgcatcaagcatctcaaatgagggtccacaggacaatgcaacatctagaaaaaagtttaggaaagatgggacaaaggaatgtggagtagccgcaacagcattgatccctatccacagtccaaatgaacatgaattcttcccggagcagtatgttgtggataaagtcacaaatgatgttggtgttgatgattcttctgaaccaaggcgtgtgggtcttgttagaggtgttaatgctaaggaccgaacagcaactgtgtcatggtttaagcctcctctacatccagaggagccaaaggagatcgcatgtaacgaaattgtgagtgtatatgaactggatgtccatccagattatgattattgctatggagatattgttgtccgcttgccgcctgttaaaccggtaattgagtcaaccaatagcaaggaacaaatggaactggataagacgttagattcctcggaaggatttgctgcttcatattctgcaccccctgatactagtgcagacgaacagctttcacagaaggaatcctgcttgcagtttacaagcctctcttgggctggaaatatagttggctttcaagacggtgagattgaagtcatttggggtgatggatcgatttctaaggttggtcctcatgaaatatatgttgttggtcgtgaagatgatggtgcctcactagatgatggaacagcctctgatggttctagctgggagactgttgatgacaacgaaatggatgtacttcatgattctgcaaagggtgattcgcaaaatgtacctgagaatagcattggaagggaaaatggttcattcagctcccaggatggaagttctgttgcaactggtcccctttcagttgcttttgagtttgtgacccgactggcgagtgatctctttgctcgaggtagaaggcatttagatggatcatcagatgctatggatgaagttgagtctcactggtctaatgagatttcagaaattggtgatgacattgataagtgtaataagaatcatgtggaatcaccagagcatgctgcagtcatagaaaatgattcttctgtcgagaagtctgtagatgtggttatggctgataatcctgtacattctgaatgtttcaaacactttgatgttctgcaatgtcctctagaccaccactaccttgaaaacacaacccagggtacaggtggaaaaaagtgggtcaaaaaggtacaacaggaatggagcatacttgagaagaacctaccagactatatttatgtcagggtatttgaggatcgcatggatctcttgagagccgtgattgttggagcaagtggaacaccctaccaagatggccttttcttctttgatttccaccttccacttgagtatccgctagtccctccgtcagcatactatcattctggtggtttgcgtgtaaatccaaacctgtatgtggacgggaaggtttgcttgagtctcttaaatacctggactggcagagggaacgaagtttgggatccatcatcatcaagtattctccaagtactagtttcacttcagggattggttctcaatgaaaaaccctattttaatgaggctgggtatgagaagcaagttggtactgttgaaggggagaagaatgcagtgccgtataatgagaatacgtacctgctgagcgtgaaatccatgctgtatatattgagacggcctcctttgcattttgaggattttgtgaagagccacttccgcaagcgtggtcactacatccttaaagcttgccacgcctatttgcaaggaaatgttgttggcactctcaccgacgacgcgtgcaccaccgacagaagcaaagagcactcgagctctgttggcttcaagcttgtactagcaaagattttaccacggttgattacagccctgaaggacactggagctgactgcgaccaatacgagcacctcgggagaacagaaaccgttacagaaagctgatcattgagtgatttgtacttgattcttttgctttttctctgttttttggggtttcagaaagatggtgacttcaccaccaggctgttttcctataaatgtacattcaaagtttgttgtttcagtcaaacatttggaaaatttggcccaaatgatttagggggggggggggggggggtttgaagtcactagagataatagttagttagctaaaaattgttagtgttattagctagctaactattaccaaatttgctaaaagtatctaatatctaaactattagttagactgtttggatgtcttggctaattttagcagctaactaatagttttagtgcatttaaacacctcttattcgttacatggaactgaactacactgtacagctgatgtttggttaaacttgtaccagcgaagagttggcaatactggaaccaggcctagagattcctggaacagagatttgatgtccatgtatttacgggtggtattggtttcacgaatatacactcgcgggg

SEQ ID NO: 214762 - DNA, 3389 bp, Zea Mays
cggtgtcagcggcttcccttcccgcctctcgctggtcgcctcgcgccctcgcctccggtcctccgcgcaccggccggtgaccctacttgattccaagcatggaaactctaccaaatggctcagtaaataatgctgagcttaaccaggaaaatgagaagtccatgtatgctagtgagtctgaagaagcacgggatatttttgtttacagagaagatgttgtgagcttgaagtccaaggaggatgtccgtggtgtagtattggaggtagctggggaatatgattatgatggtagcatcactgatgatgacattgatactgaggaacatgaagataaaactgcttatggagctgaaaatggtgttgccgatggtggcttgcagtgcagtttggggcccggggagcccggtgcctccacatttgttcttgtggcttacgattatatcgaaagcggaggagcttttggggatccatacaaactctacggtgtctcacagagtcagaaactattaccaaacaaaacagaagatgatagcatgtcgatacaactagaaacgaagggagatcagcaatctgttcctctagaggagcagaacccagaggaccttactcttttgtctcgtttctcatatacaaactggcaattaactgactggtgtctttctcagcgatacacttcatgtactaacgataccatgattgattctgataagcatacatggcagatatgtacatgctcagaaaactcagttccactgtctggtattccagaatctcaagctgatgctcagattgatacagatacaggtcacaggcagacagatgttgattctactgcagatgtattgagtatgtcggatggagataattcatgcatagccaaagaatcagaaacaggaactagtgcatcaagcatctcaaatgagggtccacaggacaatgcaacatctagaaaaaagtttaggaaagatgggacaaaggaatgtggagtagccgcaacagcattgatccctatccacagtccaaatgaacatgaattcttcccggagcagtatgttgtggataaagtcacaaatgatgttggtgttgatgattcttctgaaccaaggcgtgtgggtcttgttagaggtgttaatgctaaggaccgaacagcaactgtgtcatggtttaagcctcctctacatccagaggagccaaaggagatcgcatgtaacgaaattgtgagtgtatatgaactggatgtccatccagattatgattattgctatggagatattgttgtccgcttgccgcctgttaaaccggtaattgagtcaaccaatagcaaggaacaaatggaactggataagacgttagattcctcggaaggatttgctgcttcatattctgcaccccctgatactagtgcagacgaacagctttcacagaaggaatcctgcttgcagtttacaagcctctcttgggctggaaatatagttggctttcaagacggtgagattgaagtcatttggggtgatggatcgatttctaaggttggtcctcatgaaatatatgttgttggtcgtgaagatgatggtgcctcactagatgatggaacagcctctgatggttctagctgggagactgttgatgacaacgaaatggatgtacttcatgattctgcaaagggtgattcgcaaaatgtacctgagaatagcattggaagggaaaatggttcattcagctcccaggatggaagttctgttgcaactggtcccctttcagttgcttttgagtttgtgacccgactggcgagtgatctctttgctcgaggtagaaggcatttagatggatcatcagatgctatggatgaagttgagtctcactggtctaatgagatttcagaaattggtgatgacattgataagtgtaataagaatcatgtggaatcaccagagcatgctgcagtcatagaaaatgattcttctgtcgagaagtctgtagatgtggttatggctgataatcctgtacattctgaatgtttcaaacactttgatgttctgcaatgtcctctagaccaccactaccttgaaaacacaacccagggtacaggtggaaaaaagtgggtcaaaaaggtacaacaggaatggagcatacttgagaagaacctaccagactatatttatgtcagggtatttgaggatcgcatggatctcttgagagccgtgattgttggagcaagtggaacaccctaccaagatggccttttcttctttgatttccaccttccacttgagtatccgctagtccctccgtcagcatactatcattctggtggtttgcgtgtaaatccaaacctgtatgtggacgggaaggtttgcttgagtctcttaaatacctggactggcagagggaacgaagtttgggatccatcatcatcaagtattctccaagtactagtttcacttcagggattggttctcaatgaaaaaccctattttaatgaggctgggtatgagaagcaagttggtactgttgaaggggagaagaatgcagtgccgtataatgagaatacgtacctgctgagcgtgaaatccatgctgtatatattgagacggcctcctttgcattttgaggattttgtgaagagccacttccgcaagcgtggtcactacatccttaaagcttgccacgcctatttgcaaggaaatgttgttggcactctcaccgacgacgcgtgcaccaccgacagaagcaaagagcactcgagctctgttggcttcaagcttgtactagcaaagattttaccacggttgattacagccctgaaggacactggagctgactgcgaccaatacgagcacctcgggagaacagaaaccgttacagaaagctgatcattgagtgatttgtacttgattcttttgctttttctctgttttttggggtttcagaaagatggtgacttcaccaccaggctgttttcctataaatgtacattcaaagtttgttgtttcagtcaaacatttggaaaatttggcccaaatgatttagggggggggggggggggggtttgaagtcactagagataatagttagttagctaaaaattgttagtgttattagctagctaactattaccaaatttgctaaaagtatctaatatctaaactattagttagactgtttggatgtcttggctaattttagcagctaactaatagttttagtgcatttaaacacctcttattcgttacatggaactgaactacactgtacagctgatgtttggttaaacttgtaccagcgaagagttggcaatactggaaccaggcctagagattcctggaacagagatttgatgtccatgtatttacgggtggtattggtttcacgaatatacactcgcgggg

SEQ ID NO: 214763 - DNA, 3431 bp, Zea Mays
cggtgtcagcggcttcccttcccgcctctcgctggtcgcctcgcgccctcgcctccggtcctccgcgcaccggccggtgaccctacttgaatagagggctattaattgtttggaatctacttttgtagttgattccaagcatggaaactctaccaaatggctcagtaaataatgctgagcttaaccaggaaaatgagaagtccatgtatgctagtgagtctgaagaagcacgggatatttttgtttacagagaagatgttgtgagcttgaagtccaaggaggatgtccgtggtgtagtattggaggtagctggggaatatgattatgatggtagcatcactgatgatgacattgatactgaggaacatgaagataaaactgcttatggagctgaaaatggtgttgccgatggtggcttgcagtgcagtttggggcccggggagcccggtgcctccacatttgttcttgtggcttacgattatatcgaaagcggaggagcttttggggatccatacaaactctacggtgtctcacagagtcagaaactattaccaaacaaaacagaagatgatagcatgtcgatacaactagaaacgaagggagatcagcaatctgttcctctagaggagcagaacccagaggaccttactcttttgtctcgtttctcatatacaaactggcaattaactgactggtgtctttctcagcgatacacttcatgtactaacgataccatgattgattctgataagcatacatggcagatatgtacatgctcagaaaactcagttccactgtctggtattccagaatctcaagctgatgctcagattgatacagatacaggtcacaggcagacagatgttgattctactgcagatgtattgagtatgtcggatggagataattcatgcatagccaaagaatcagaaacaggaactagtgcatcaagcatctcaaatgagggtccacaggacaatgcaacatctagaaaaaagtttaggaaagatgggacaaaggaatgtggagtagccgcaacagcattgatccctatccacagtccaaatgaacatgaattcttcccggagcagtatgttgtggataaagtcacaaatgatgttggtgttgatgattcttctgaaccaaggcgtgtgggtcttgttagaggtgttaatgctaaggaccgaacagcaactgtgtcatggtttaagcctcctctacatccagaggagccaaaggagatcgcatgtaacgaaattgtgagtgtatatgaactggatgtccatccagattatgattattgctatggagatattgttgtccgcttgccgcctgttaaaccggtaattgagtcaaccaatagcaaggaacaaatggaactggataagacgttagattcctcggaaggatttgctgcttcatattctgcaccccctgatactagtgcagacgaacagctttcacagaaggaatcctgcttgcagtttacaagcctctcttgggctggaaatatagttggctttcaagacggtgagattgaagtcatttggggtgatggatcgatttctaaggttggtcctcatgaaatatatgttgttggtcgtgaagatgatggtgcctcactagatgatggaacagcctctgatggttctagctgggagactgttgatgacaacgaaatggatgtacttcatgattctgcaaagggtgattcgcaaaatgtacctgagaatagcattggaagggaaaatggttcattcagctcccaggatggaagttctgttgcaactggtcccctttcagttgcttttgagtttgtgacccgactggcgagtgatctctttgctcgaggtagaaggcatttagatggatcatcagatgctatggatgaagttgagtctcactggtctaatgagatttcagaaattggtgatgacattgataagtgtaataagaatcatgtggaatcaccagagcatgctgcagtcatagaaaatgattcttctgtcgagaagtctgtagatgtggttatggctgataatcctgtacattctgaatgtttcaaacactttgatgttctgcaatgtcctctagaccaccactaccttgaaaacacaacccagggtacaggtggaaaaaagtgggtcaaaaaggtacaacaggaatggagcatacttgagaagaacctaccagactatatttatgtcagggtatttgaggatcgcatggatctcttgagagccgtgattgttggagcaagtggaacaccctaccaagatggccttttcttctttgatttccaccttccacttgagtatccgctagtccctccgtcagcatactatcattctggtggtttgcgtgtaaatccaaacctgtatgtggacgggaaggtttgcttgagtctcttaaatacctggactggcagagggaacgaagtttgggatccatcatcatcaagtattctccaagtactagtttcacttcagggattggttctcaatgaaaaaccctattttaatgaggctgggtatgagaagcaagttggtactgttgaaggggagaagaatgcagtgccgtataatgagaatacgtacctgctgagcgtgaaatccatgctgtatatattgagacggcctcctttgcattttgaggattttgtgaagagccacttccgcaagcgtggtcactacatccttaaagcttgccacgcctatttgcaaggaaatgttgttggcactctcaccgacgacgcgtgcaccaccgacagaagcaaagagcactcgagctctgttggcttcaagcttgtactagcaaagattttaccacggttgattacagccctgaaggacactggagctgactgcgaccaatacgagcacctcgggagaacagaaaccgttacagaaagctgatcattgagtgatttgtacttgattcttttgctttttctctgttttttggggtttcagaaagatggtgacttcaccaccaggctgttttcctataaatgtacattcaaagtttgttgtttcagtcaaacatttggaaaatttggcccaaatgatttagggggggggggggggggggtttgaagtcactagagataatagttagttagctaaaaattgttagtgttattagctagctaactattaccaaatttgctaaaagtatctaatatctaaactattagttagactgtttggatgtcttggctaattttagcagctaactaatagttttagtgcatttaaacacctcttattcgttacatggaactgaactacactgtacagctgatgtttggttaaacttgtaccagcgaagagttggcaatactggaaccaggcctagagattcctggaacagagatttgatgtccatgtatttacgggtggtattggtttcacgaatatacactcgcgggg

SEQ ID NO: 214764 - DNA, 3087 bp, Zea Mays
tcgtttgatgatggctctgtctgtaaagtcaatagggcagatcctaagtgcttaaagccagcagctggcccaattcatccagatacagcttgtcctttttatccaggacagcgtgtcaaggcatcatcatcatctgttttcaaaacatgcagatggcttaacggattttggagagcaagtcgtcttgaaggtactatcacaaaagtggaaagtgttgctgttttagtctattggattgcatctgcacactttgctacagatcagcaatctgttcctctagaggagcagaacccagaggaccttactcttttgtctcgtttctcatatacaaactggcaattaactgactggtgtctttctcagcgatacacttcatgtactaacgataccatgattgattctgataagcatacatggcagatatgtacatgctcagaaaactcagttccactgtctggtattccagaatctcaagctgatgctcagattgatacagatacaggtcacaggcagacagatgttgattctactgcagatgtattgagtatgtcggatggagataattcatgcatagccaaagaatcagaaacaggaactagtgcatcaagcatctcaaatgagggtccacaggacaatgcaacatctagaaaaaagtttaggaaagatgggacaaaggaatgtggagtagccgcaacagcattgatccctatccacagtccaaatgaacatgaattcttcccggagcagtatgttgtggataaagtcacaaatgatgttggtgttgatgattcttctgaaccaaggcgtgtgggtcttgttagaggtgttaatgctaaggaccgaacagcaactgtgtcatggtttaagcctcctctacatccagaggagccaaaggagatcgcatgtaacgaaattgtgagtgtatatgaactggatgtccatccagattatgattattgctatggagatattgttgtccgcttgccgcctgttaaaccggtaattgagtcaaccaatagcaaggaacaaatggaactggataagacgttagattcctcggaaggatttgctgcttcatattctgcaccccctgatactagtgcagacgaacagctttcacagaaggaatcctgcttgcagtttacaagcctctcttgggctggaaatatagttggctttcaagacggtgagattgaagtcatttggggtgatggatcgatttctaaggttggtcctcatgaaatatatgttgttggtcgtgaagatgatggtgcctcactagatgatggaacagcctctgatggttctagctgggagactgttgatgacaacgaaatggatgtacttcatgattctgcaaagggtgattcgcaaaatgtacctgagaatagcattggaagggaaaatggttcattcagctcccaggatggaagttctgttgcaactggtcccctttcagttgcttttgagtttgtgacccgactggcgagtgatctctttgctcgaggtagaaggcatttagatggatcatcagatgctatggatgaagttgagtctcactggtctaatgagatttcagaaattggtgatgacattgataagtgtaataagaatcatgtggaatcaccagagcatgctgcagtcatagaaaatgattcttctgtcgagaagtctgtagatgtggttatggctgataatcctgtacattctgaatgtttcaaacactttgatgttctgcaatgtcctctagaccaccactaccttgaaaacacaacccagggtacaggtggaaaaaagtgggtcaaaaaggtacaacaggaatggagcatacttgagaagaacctaccagactatatttatgtcagggtatttgaggatcgcatggatctcttgagagccgtgattgttggagcaagtggaacaccctaccaagatggccttttcttctttgatttccaccttccacttgagtatccgctagtccctccgtcagcatactatcattctggtggtttgcgtgtaaatccaaacctgtatgtggacgggaaggtttgcttgagtctcttaaatacctggactggcagagggaacgaagtttgggatccatcatcatcaagtattctccaagtactagtttcacttcagggattggttctcaatgaaaaaccctattttaatgaggctgggtatgagaagcaagttggtactgttgaaggggagaagaatgcagtgccgtataatgagaatacgtacctgctgagcgtgaaatccatgctgtatatattgagacggcctcctttgcattttgaggattttgtgaagagccacttccgcaagcgtggtcactacatccttaaagcttgccacgcctatttgcaaggaaatgttgttggcactctcaccgacgacgcgtgcaccaccgacagaagcaaagagcactcgagctctgttggcttcaagcttgtactagcaaagattttaccacggttgattacagccctgaaggacactggagctgactgcgaccaatacgagcacctcgggagaacagaaaccgttacagaaagctgatcattgagtgatttgtacttgattcttttgctttttctctgttttttggggtttcagaaagatggtgacttcaccaccaggctgttttcctataaatgtacattcaaagtttgttgtttcagtcaaacatttggaaaatttggcccaaatgatttagggggggggggggggggggtttgaagtcactagagataatagttagttagctaaaaattgttagtgttattagctagctaactattaccaaatttgctaaaagtatctaatatctaaactattagttagactgtttggatgtcttggctaattttagcagctaactaatagttttagtgcatttaaacacctcttattcgttacatggaactgaactacactgtacagctgatgtttggttaaacttgtaccagcgaagagttggcaatactggaaccaggcctagagattcctggaacagagatttgatgtccatgtatttacgggtggtattggtttcacgaatatacactcgcgggg

SEQ ID NO: 214765 - DNA, 3180 bp, Zea Mays
gtttgatgatggctctgtctgtaaagtcaatagggcagatcctaagtgcttaaagccagcagctggcccaattcatccagatacagcttgtcctttttatccaggacagcgtgtcaaggcatcatcatcatctgttttcaaaacatgcagatggcttaacggattttggagagcaagtcgtcttgaaggtactatcacaaaagtggaaagtgttgctgttttagtctattggattgcatctgcacactttgctacagatcagcaatctgttcctctagaggagcagaacccagaggaccttactcttttgtctcgtttctcatatacaaactggcaattaactgactggtgtctttctcagcgatacacttcatgtactaacgataccatgattgattctgataagcatacatggcagatatgtacatgctcagaaaactcagttccactgtctggtattccagaatctcaagctgatgctcagattgatacagatacaggtcacaggcagacagatgttgattctactgcagatgtattgagtatgtcggatggagataattcatgcatagccaaagaatcagaaacaggaactagtgcatcaagcatctcaaatgagggtccacaggacaatgcaacatctagaaaaaagtttaggaaagtattttttaaaaaagacaaaagaacaaaaaaaagagatgacaactttgagcgagctctactcattgcgaatacttgtaccaaagtcgatgtaatctggcaggatgggacaaaggaatgtggagtagccgcaacagcattgatccctatccacagtccaaatgaacatgaattcttcccggagcagtatgttgtggataaagtcacaaatgatgttggtgttgatgattcttctgaaccaaggcgtgtgggtcttgttagaggtgttaatgctaaggaccgaacagcaactgtgtcatggtttaagcctcctctacatccagaggagccaaaggagatcgcatgtaacgaaattgtgagtgtatatgaactggatgtccatccagattatgattattgctatggagatattgttgtccgcttgccgcctgttaaaccggtaattgagtcaaccaatagcaaggaacaaatggaactggataagacgttagattcctcggaaggatttgctgcttcatattctgcaccccctgatactagtgcagacgaacagctttcacagaaggaatcctgcttgcagtttacaagcctctcttgggctggaaatatagttggctttcaagacggtgagattgaagtcatttggggtgatggatcgatttctaaggttggtcctcatgaaatatatgttgttggtcgtgaagatgatggtgcctcactagatgatggaacagcctctgatggttctagctgggagactgttgatgacaacgaaatggatgtacttcatgattctgcaaagggtgattcgcaaaatgtacctgagaatagcattggaagggaaaatggttcattcagctcccaggatggaagttctgttgcaactggtcccctttcagttgcttttgagtttgtgacccgactggcgagtgatctctttgctcgaggtagaaggcatttagatggatcatcagatgctatggatgaagttgagtctcactggtctaatgagatttcagaaattggtgatgacattgataagtgtaataagaatcatgtggaatcaccagagcatgctgcagtcatagaaaatgattcttctgtcgagaagtctgtagatgtggttatggctgataatcctgtacattctgaatgtttcaaacactttgatgttctgcaatgtcctctagaccaccactaccttgaaaacacaacccaggtggaaaaaagtgggtcaaaaaggtacaacaggaatggagcatacttgagaagaacctaccagactatatttatgtcagggtatttgaggatcgcatggatctcttgagagccgtgattgttggagcaagtggaacaccctaccaagatggccttttcttctttgatttccaccttccacttgagtatccgctagtccctccgtcagcatactatcattctggtggtttgcgtgtaaatccaaacctgtatgtggacgggaaggtttgcttgagtctcttaaatacctggactggcagagggaacgaagtttgggatccatcatcatcaagtattctccaagtactagtttcacttcagggattggttctcaatgaaaaaccctattttaatgaggctgggtatgagaagcaagttggtactgttgaaggggagaagaatgcagtgccgtataatgagaatacgtacctgctgagcgtgaaatccatgctgtatatattgagacggcctcctttgcattttgaggattttgtgaagagccacttccgcaagcgtggtcactacatccttaaagcttgccacgcctatttgcaaggaaatgttgttggcactctcaccgacgacgcgtgcaccaccgacagaagcaaagagcactcgagctctgttggcttcaagcttgtactagcaaagattttaccacggttgattacagccctgaaggacactggagctgactgcgaccaatacgagcacctcgggagaacagaaaccgttacagaaagctgatcattgagtgatttgtacttgattcttttgctttttctctgttttttggggtttcagaaagatggtgacttcaccaccaggctgttttcctataaatgtacattcaaagtttgttgtttcagtcaaacatttggaaaatttggcccaaatgatttagggggggggggggggggggtttgaagtcactagagataatagttagttagctaaaaattgttagtgttattagctagctaactattaccaaatttgctaaaagtatctaatatctaaactattagttagactgtttggatgtcttggctaattttagcagctaactaatagttttagtgcatttaaacacctcttattcgttacatggaactgaactacactgtacagctgatgtttggttaaacttgtaccagcgaagagttggcaatactggaaccaggcctagagattcctggaacagagatttgatgtccatgtatttacgggtggtattggtttcacgaatatacactcgcgggg

SEQ ID NO: 214766 - DNA, 559 bp, Zea Mays
cttggctccgtacttcctgatgagcttacacaagcttgaaatgtcacaccagccacttatgttgcgacccacaggactgatccgccacccaatcaagtgataacaacggagtcgaggaacatcctgctgaggcacttctaccagaaatccgagaagctgaggcccaagagacctgccccggacaacctcgctccggagaacaacaacagcaacaacaagcagcccaggggaccggtcggcgacgtcggtgggcagtcgtcgagcgcgagaagctgaagccacagctggtggccgtccactcctccccctgcctgcttgtttctcatctctgggtttcgtcatgcagaggcagaggcagatgcagccctgtgttgtcctcttcgctcctcacgtctgtacgtacgacccaaagagctactaacctaatctgaagttagggttacatacatggatatcggatagatgggtgtacataagcacctgagagcagtgttgtgttatcctaaatgctaaacggtaaacagtcgttcaacatcctctgtgtttagcgtataatcgg

SEQ ID NO: 214767 - DNA, 2524 bp, Zea Mays
cgggccggaccggcccaatcgaagttttacgagccaaaacgtgaaagtgtcgtccagccagccacgtggctccggcagggcagagcgtttatccaactcggctctcagcgactgcccaccaccaccactgaggattcctcttccggcggcggcggcggcggcagcgatgctcctcctgcgcgccaacgcgctcgccgccgtaccggtgtccttctccataacgccggcggcctcctatagctgcttcccctggccgtcttcatccaccactgccgcgagctgctccgtcggctcctctgccaggctcgacgccgccgtgcagtacgacccgctccgccccggctccgatgcgtgggcccatcccgacggcatggtcaccgcggagggtgacgaggagaaacagcgctatgacacggagggggagtccaacgactgggaaggggaagggccccaaggatcatcagaccccgagggcatcaacgtgccgcgccagcgctacatcgccgtccccaaggaggccctcctcgatgctgtcctctcgcagttcgcgtccgacgacgacgacgccgcggacttcaagcgctgcgccagatgcttggacgccatccttcacgccgagcacaagaggatgctcgaggagatgcgcacctcctacatgctcacgcaacgccaccgggacgaggaagaggagcaggatgacactgacaccgcctcgggctcggactacgtcaacggcaaagccggctccggatttttcggcatcacccaactggatggcacgttgttccttactagaagcgtggacttgagaactctgctcggattgaccccagaccccgattcccagaccaggcgtggatacgcgactgagaggcagaaaggcctcctgttggttgagaaacttgattacttgcaatcaaaactcttgcagaatgtctttttcagcctctccaaacccttgaaaaagccagggaaatggcttaatgaggctttgaaaagatcaacagataaccagggatttcagatctggatagacaaactgagactatggcttaaagagcaaacttatgcagataattcactgctgttgatagaaagctcttcatgggacaagcttagttctgatcagttacctgatgcagatgttcctatttggatcgctgcacaaagggcagtctctcgttatgaaggaattttgtcacctgttggtcctcgtggaagactgttaagaagattgcttaaatggactggactaataccttctctgccagaagcaacgataaaatccaacaatgaaactaaacatcttgaaggacatgtgaggccaaactttctaccaagaattacccttgctaatatatgggaacctgcaagcagagaatcttgcaataacaatatctgggagatggtgaaagcttcttttcgtattctgtttgggaggtctactcttcaggaaccagcattccaggagttaatactactttacactgatgaagttgttccaagtgaaacgaaggacgagatggttccgctgcaactgaaaatttatgagaggattccgatcccagatttgccagtagttttcccccacaagaaattgtccttccgcatcctagatacagtaaggctagatattgctactgtaataggtctattggcatatgtggtgaactacaaatttgagagtttagcctcatctccgtcagctttttcttcttgatatagttgctggtactgcactcgtcatacttgttttccgtgtagcactgggctacaaacagacccgggataggtaccagcttctggtgaataaaaccctctatgagaagacattggcaagtgggttcggctcggtttacttccttctcgatgcttctgagcaacagcagtacaaagaagcacttttggcatatgccatgttgctctgcagaaagaagtatgaggtctcatctcgtgcaagcataagagatgcatgcgagcagtttatgcacgagaaattcgaggcaaaggtgaaagatgacggatacattattgtttccgttctcatgattgagatgccgatcgacaaggcaatggagacactgctgcggttggggctggtgattgagcttcccactgatggtgggtcgagcgtgattggtctcccatgctcggaggcatacaggatcctgaaaagccgttgggacggcttgctggaacaagatacagaacaaggctgattagaacgagacatgtacgttggtggcttggagtggagtgggatgggatgccgtgctggtacatactcgacgcgtcggcaaagctcactcttgtttgtatgtatacgtaccagttgttgcagcaagtgtatatgtgctagctacgtgcatgtataatcgtgatctagtttgttgtacacaaacgattgcagtgtatgtatatgggagcacatgtttttttcggaagactagccatgtgtctgtaagtttttctatttgtaagttggtttccatttataaatatagagcataaacactgttctgtt

SEQ ID NO: 214768 - DNA, 2469 bp, Zea Mays
cgggccggaccggcccaatcgaagttttacgagccaaaacgtgaaagtgtcgtccagccagccacgtggctccggcagggcagagcgtttatccaactcggctctcagcgactgcccaccaccaccactgaggattcctcttccggcggcggcggcggcggcagcgatgctcctcctgcgcgccaacgcgctcgccgccgtaccggtgtccttctccataacgccggcggcctcctatagctgcttcccctggccgtcttcatccaccactgccgcgagctgctccgtcggctcctctgccaggctcgacgccgccgtgcagtacgacccgctccgccccggctccgatgcgtgggcccatcccgacggcatggtcaccgcggagggtgacgaggagaaacagcgctatgacacggagggggagtccaacgactgggaaggggaagggccccaaggatcatcagaccccgagggcatcaacgtgccgcgccagcgctacatcgccgtccccaaggaggccctcctcgatgctgtcctctcgcagttcgcgtccgacgacgacgacgccgcggacttcaagcgctgcgccagatgcttggacgccatccttcacgccgagcacaagaggatgctcgaggagatgcgcacctcctacatgctcacgcaacgccaccgggacgaggaagaggagcaggatgacactgacaccgcctcgggctcggactacgtcaacggcaaagccggctccggatttttcggcatcacccaactggatggcacgttgttccttactagaagcgtggacttgagaactctgctcggattgaccccagaccccgattcccagaccaggcgtggatacgcgactgagaggcagaaaggcctcctgttggttgagaaacttgattacttgcaatcaaaactcttgcagaatgtctttttcagcctctccaaacccttgaaaaagccagggaaatggcttaatgaggctttgaaaagatcaacagataaccagggatttcagatctggatagacaaactgagactatggcttaaagagcaaacttatgcagataattcactgctgttgatagaaagctcttcatgggacaagcttagttctgatcagttacctgatgcagatgttcctatttggatcgctgcacaaagggcagtctctcgttatgaaggaattttgtcacctgttggtcctcgtggaagactgttaagaagattgcttaaatggactggactaataccttctctgccagaagcaacgataaaatccaacaatgaaactaaacatcttgaaggacatgtgaggccaaactttctaccaagaattacccttgctaatatatgggaacctgcaagcagagaatcttgcaataacaatatctgggagatggtgaaagcttcttttcgtattctgtttgggaggtctactcttcaggaaccagcattccaggagttaatactactttacactgatgaagttgttccaagtgaaacgaaggacgagatggttccgctgcaactgaaaatttatgagaggattccgatcccagatttgccagtaaggctagatattgctactgtaataggtcagctttttcttcttgatatagttgctggtactgcactcgtcatacttgttttccgtgtagcactgggctacaaacagacccgggataggtaccagcttctggtgaataaaaccctctatgagaagacattggcaagtgggttcggctcggtttacttccttctcgatgcttctgagcaacagcagtacaaagaagcacttttggcatatgccatgttgctctgcagaaagaagtatgaggtatggggcatgttcacctttgatagataccgtagctgccacattactgactactccactacctctgtggcccttttgtaggtctcatctcgtgcaagcataagagatgcatgcgagcagtttatgcacgagaaattcgaggcaaagattgagatgccgatcgacaaggcaatggagacactgctgcggttggggctggtgattgagcttcccactgatggtgggtcgagcgtgattggtctcccatgctcggaggcatacaggatcctgaaaagccgttgggacggcttgctggaacaagatacagaacaaggctgattagaacgagacatgtacgttggtggcttggagtggagtgggatgggatgccgtgctggtacatactcgacgcgtcggcaaagctcactcttgtttgtatgtatacgtaccagttgttgcagcaagtgtatatgtgctagctacgtgcatgtataatcgtgatctagtttgttgtacacaaacgattgcagtgtatgtatatgggagcacatgtttttttcggaagactagccatgtgtctgtaagtttttctatttgtaagttggtttccatttataaatatagagcataaacactgttctgtt

SEQ ID NO: 214769 - DNA, 2495 bp, Zea Mays
cgggccggaccggcccaatcgaagttttacgagccaaaacgtgaaagtgtcgtccagccagccacgtggctccggcagggcagagcgtttatccaactcggctctcagcgactgcccaccaccaccactgaggattcctcttccggcggcggcggcggcggcagcgatgctcctcctgcgcgccaacgcgctcgccgccgtaccggtgtccttctccataacgccggcggcctcctatagctgcttcccctggccgtcttcatccaccactgccgcgagctgctccgtcggctcctctgccaggctcgacgccgccgtgcagtacgacccgctccgccccggctccgatgcgtgggcccatcccgacggcatggtcaccgcggagggtgacgaggagaaacagcgctatgacacggagggggagtccaacgactgggaaggggaagggccccaaggatcatcagaccccgagggcatcaacgtgccgcgccagcgctacatcgccgtccccaaggaggccctcctcgatgctgtcctctcgcagttcgcgtccgacgacgacgacgccgcggacttcaagcgctgcgccagatgcttggacgccatccttcacgccgagcacaagaggatgctcgaggagatgcgcacctcctacatgctcacgcaacgccaccgggacgaggaagaggagcaggatgacactgacaccgcctcgggctcggactacgtcaacggcaaagccggctccggatttttcggcatcacccaactggatggcacgttgttccttactagaagcgtggacttgagaactctgctcggattgaccccagaccccgattcccagaccaggcgtggatacgcgactgagaggcagaaaggcctcctgttggttgagaaacttgattacttgcaatcaaaactcttgcagaatgtctttttcagcctctccaaacccttgaaaaagccagggaaatggcttaatgagttcctggcaggctttgaaaagatcaacagataaccagggatttcagatctggatagacaaactgagactatggcttaaagagcaaacttatgcagataattcactgctgttgatagaaagctcttcatgggacaagcttagttctgatcagttacctgatgcagatgttcctatttggatcgctgcacaaagggcagtctctcgttatgaaggaattttgtcacctgttggtcctcgtggaagactgttaagaagattgcttaaatggactggactaataccttctctgccagaagcaacgataaaatccaacaatgaaactaaacatcttgaaggacatgtgaggccaaactttctaccaagaattacccttgctaatatatgggaacctgcaagcagagaatcttgcaataacaatatctgggagatggtgaaagcttcttttcgtattctgtttgggaggtctactcttcaggaaccagcattccaggagttaatactactttacactgatgaagttgttccaagtgaaacgaaggacgagatggttccgctgcaactgaaaatttatgagaggattccgatcccagatttgccagtagttttcccccacaagaaattgtccttccgcatcctagatacagtaaggctagatattgctactgtaataggtctattggcatatgtggtgaactacaaatttgagagtttagcctcatctccgtcagctttttcttcttgatatagttgctggtactgcactcgtcatacttgttttccgtgtagcactgggctacaaacagacccgggataggtaccagcttctggtgaataaaaccctctatgagaagacattggcaagtgggttcggctcggtttacttccttctcgatgcttctgagcaacagcagtacaaagaagcacttttggcatatgccatgttgctctgcagaaagaagtatgaggtctcatctcgtgcaagcataagagatgcatgcgagcagtttatgcacgagaaattcgaggcaaagattgagatgccgatcgacaaggcaatggagacactgctgcggttggggctggtgattgagcttcccactgatggtgggtcgagcgtgattggtctcccatgctcggaggcatacaggatcctgaaaagccgttgggacggcttgctggaacaagatacagaacaaggctgattagaacgagacatgtacgttggtggcttggagtggagtgggatgggatgccgtgctggtacatactcgacgcgtcggcaaagctcactcttgtttgtatgtatacgtaccagttgttgcagcaagtgtatatgtgctagctacgtgcatgtataatcgtgatctagtttgttgtacacaaacgattgcagtgtatgtatatgggagcacatgtttttttcggaagactagccatgtgtctgtaagtttttctatttgtaagttggtttccatttataaatatagagcataaacactgttctgtt

SEQ ID NO: 214770 - DNA, 2675 bp, Zea Mays
cgggccggaccggcccaatcgaagttttacgagccaaaacgtgaaagtgtcgtccagccagccacgtggctccggcagggcagagcgtttatccaactcggctctcagcgactgcccaccaccaccactgaggattcctcttccggcggcggcggcggcggcagcgatgctcctcctgcgcgccaacgcgctcgccgccgtaccggtgtccttctccataacgccggcggcctcctatagctgcttcccctggccgtcttcatccaccactgccgcgagctgctccgtcggctcctctgccaggctcgacgccgccgtgcagtacgacccgctccgccccggctccgatgcgtgggcccatcccgacggcatggtcaccgcggagggtgacgaggagaaacagcgctatgacacggagggggagtccaacgactgggaaggggaagggccccaaggatcatcagaccccgagggcatcaacgtgccgcgccagcgctacatcgccgtccccaaggaggccctcctcgatgctgtcctctcgcagttcgcgtccgacgacgacgacgccgcggacttcaagcgctgcgccagatgcttggacgccatccttcacgccgagcacaagaggatgctcgaggagatgcgcacctcctacatgctcacgcaacgccaccgggacgaggaagaggagcaggatgacactgacaccgcctcgggctcggactacgtcaacggcaaagccggctccggatttttcggcatcacccaactggatggcacgttgttccttactagaagcgtggacttgagaactctgctcggattgaccccagaccccgattcccagaccagagttgcttttgcaactcaatttcagcgctcattcatgaccctactacgcaatgctcagtttgaagaactctccgcacaagatctgctcttgacatatgccctaaataacgattacctgctcacgctgcccatttatgtcgactggaagaaggctgctcaatctaatgcaataatattcaggcgtggatacgcgactgagaggcagaaaggcctcctgttggttgagaaacttgattacttgcaatcaaaactcttgcagaatgtctttttcagcctctccaaacccttgaaaaagccagggaaatggcttaatgagttcctggcaggctttgaaaagatcaacagataaccagggatttcagatctggatagacaaactgagactatggcttaaagagcaaacttatgcagataattcactgctgttgatagaaagctcttcatgggacaagcttagttctgatcagttacctgatgcagatgttcctatttggatcgctgcacaaagggcagtctctcgttatgaaggaattttgtcacctgttggtcctcgtggaagactgttaagaagattgcttaaatggactggactaataccttctctgccagaagcaacgataaaatccaacaatgaaactaaacatcttgaaggacatgtgaggccaaactttctaccaagaattacccttgctaatatatgggaacctgcaagcagagaatcttgcaataacaatatctgggagatggtgaaagcttcttttcgtattctgtttgggaggtctactcttcaggaaccagcattccaggagttaatactactttacactgatgaagttgttccaagtgaaacgaaggacgagatggttccgctgcaactgaaaatttatgagaggattccgatcccagatttgccagtagttttcccccacaagaaattgtccttccgcatcctagatacagtaaggctagatattgctactgtaataggtctattggcatatgtggtgaactacaaatttgagagtttagcctcatctccgtcagctttttcttcttgatatagttgctggtactgcactcgtcatacttgttttccgtgtagcactgggctacaaacagacccgggataggtaccagcttctggtgaataaaaccctctatgagaagacattggcaagtgggttcggctcggtttacttccttctcgatgcttctgagcaacagcagtacaaagaagcacttttggcatatgccatgttgctctgcagaaagaagtatgaggtctcatctcgtgcaagcataagagatgcatgcgagcagtttatgcacgagaaattcgaggcaaagattgagatgccgatcgacaaggcaatggagacactgctgcggttggggctggtgattgagcttcccactgatggtgggtcgagcgtgattggtctcccatgctcggaggcatacaggatcctgaaaagccgttgggacggcttgctggaacaagatacagaacaaggctgattagaacgagacatgtacgttggtggcttggagtggagtgggatgggatgccgtgctggtacatactcgacgcgtcggcaaagctcactcttgtttgtatgtatacgtaccagttgttgcagcaagtgtatatgtgctagctacgtgcatgtataatcgtgatctagtttgttgtacacaaacgattgcagtgtatgtatatgggagcacatgtttttttcggaagactagccatgtgtctgtaagtttttctatttgtaagttggtttccatttataaatatagagcataaacactgttctgtt

SEQ ID NO: 214771 - DNA, 2665 bp, Zea Mays
cgggccggaccggcccaatcgaagttttacgagccaaaacgtgaaagtgtcgtccagccagccacgtggctccggcagggcagagcgtttatccaactcggctctcagcgactgcccaccaccaccactgaggattcctcttccggcggcggcggcggcggcagcgatgctcctcctgcgcgccaacgcgctcgccgccgtaccggtgtccttctccataacgccggcggcctcctatagctgcttcccctggccgtcttcatccaccactgccgcgagctgctccgtcggctcctctgccaggctcgacgccgccgtgcagtacgacccgctccgccccggctccgatgcgtgggcccatcccgacggcatggtcaccgcggagggtgacgaggagaaacagcgctatgacacggagggggagtccaacgactgggaaggggaagggccccaaggatcatcagaccccgagggcatcaacgtgccgcgccagcgctacatcgccgtccccaaggaggccctcctcgatgctgtcctctcgcagttcgcgtccgacgacgacgacgccgcggacttcaagcgctgcgccagatgcttggacgccatccttcacgccgagcacaagaggatgctcgaggagatgcgcacctcctacatgctcacgcaacgccaccgggacgaggaagaggagcaggatgacactgacaccgcctcgggctcggactacgtcaacggcaaagccggctccggatttttcggcatcacccaactggatggcacgttgttccttactagaagcgtggacttgagaactctgctcggattgaccccagaccccgattcccagaccagagttgcttttgcaactcaatttcagcgctcattcatgaccctactacgcaatgctcagtttgaagaactctccgcacaagatctgctcttgacatatgccctaaataacgattacctgctcacgctgcccatttatgtcgactggaagaaggctgctcaatctaatgcaataatattcaggcgtggatacgcgactgagaggcagaaaggcctcctgttggttgagaaacttgattacttgcaatcaaaactcttgcagaatgtctttttcagcctctccaaacccttgaaaaagccagggaaatggcttaatgaggctttgaaaagatcaacagataaccagggatttcagatctggatagacaaactgagactatggcttaaagagcaaacttatgcagataattcactgctgttgatagaaagctcttcatgggacaagcttagttctgatcagttacctgatgcagatgttcctatttggatcgctgcacaaagggcagtctctcgttatgaaggaattttgtcacctgttggtcctcgtggaagactgttaagaagattgcttaaatggactggactaataccttctctgccagaagcaacgataaaatccaacaatgaaactaaacatcttgaaggacatgtgaggccaaactttctaccaagaattacccttgctaatatatgggaacctgcaagcagagaatcttgcaataacaatatctgggagatggtgaaagcttcttttcgtattctgtttgggaggtctactcttcaggaaccagcattccaggagttaatactactttacactgatgaagttgttccaagtgaaacgaaggacgagatggttccgctgcaactgaaaatttatgagaggattccgatcccagatttgccagtagttttcccccacaagaaattgtccttccgcatcctagatacagtaaggctagatattgctactgtaataggtctattggcatatgtggtgaactacaaatttgagagtttagcctcatctccgtcagctttttcttcttgatatagttgctggtactgcactcgtcatacttgttttccgtgtagcactgggctacaaacagacccgggataggtaccagcttctggtgaataaaaccctctatgagaagacattggcaagtgggttcggctcggtttacttccttctcgatgcttctgagcaacagcagtacaaagaagcacttttggcatatgccatgttgctctgcagaaagaagtatgaggtctcatctcgtgcaagcataagagatgcatgcgagcagtttatgcacgagaaattcgaggcaaagattgagatgccgatcgacaaggcaatggagacactgctgcggttggggctggtgattgagcttcccactgatggtgggtcgagcgtgattggtctcccatgctcggaggcatacaggatcctgaaaagccgttgggacggcttgctggaacaagatacagaacaaggctgattagaacgagacatgtacgttggtggcttggagtggagtgggatgggatgccgtgctggtacatactcgacgcgtcggcaaagctcactcttgtttgtatgtatacgtaccagttgttgcagcaagtgtatatgtgctagctacgtgcatgtataatcgtgatctagtttgttgtacacaaacgattgcagtgtatgtatatgggagcacatgtttttttcggaagactagccatgtgtctgtaagtttttctatttgtaagttggtttccatttataaatatagagcataaacactgttctgtt

SEQ ID NO: 214772 - DNA, 2623 bp, Zea Mays
cgggccggaccggcccaatcgaagttttacgagccaaaacgtgaaagtgtcgtccagccagccacgtggctccggcagggcagagcgtttatccaactcggctctcagcgactgcccaccaccaccactgaggattcctcttccggcggcggcggcggcggcagcgatgctcctcctgcgcgccaacgcgctcgccgccgtaccggtgtccttctccataacgccggcggcctcctatagctgcttcccctggccgtcttcatccaccactgccgcgagctgctccgtcggctcctctgccaggctcgacgccgccgtgcagtacgacccgctccgccccggctccgatgcgtgggcccatcccgacggcatggtcaccgcggagggtgacgaggagaaacagcgctatgacacggagggggagtccaacgactgggaaggggaagggccccaaggatcatcagaccccgagggcatcaacgtgccgcgccagcgctacatcgccgtccccaaggaggccctcctcgatgctgtcctctcgcagttcgcgtccgacgacgacgacgccgcggacttcaagcgctgcgccagatgcttggacgccatccttcacgccgagcacaagaggatgctcgaggagatgcgcacctcctacatgctcacgcaacgccaccgggacgaggaagaggagcaggatgacactgacaccgcctcgggctcggactacgtcaacggcaaagccggctccggatttttcggcatcacccaactggatggcacgttgttccttactagaagcgtggacttgagaactctgctcggattgaccccagaccccgattcccagaccagagttgcttttgcaactcaatttcagcgctcattcatgaccctactacgcaatgctcagtttgaagaactctccgcacaagatctgctcttgacatatgccctaaataacgattacctgctcacgctgcccatttatgtcgactggaagaaggctgctcaatctaatgcaataatattcaggcgtggatacgcgactgagaggcagaaaggcctcctgttggttgagaaacttgattacttgcaatcaaaactcttgcagaatgtctttttcagcctctccaaacccttgaaaaagccagggaaatggcttaatgagttcctggcaggctttgaaaagatcaacagataaccagggatttcagatctggatagacaaactgagactatggcttaaagagcaaacttatgcagataattcactgctgttgatagaaagctcttcatgggacaagcttagttctgatcagttacctgatgcagatgttcctatttggatcgctgcacaaagggcagtctctcgttatgaaggaattttgtcacctgttggtcctcgtggaagactgttaagaagattgcttaaatggactggactaataccttctctgccagaagcaacgataaaatccaacaatgaaactaaacatcttgaaggacatgtgaggccaaactttctaccaagaattacccttgctaatatatgggaacctgcaagcagagaatcttgcaataacaatatctgggagatggtgaaagcttcttttcgtattctgtttgggaggtctactcttcaggaaccagcattccaggagttaatactactttacactgatgaagttgttccaagtgaaacgaaggacgagatggttccgctgcaactgaaaatttatgagaggattccgatcccagatttgccagtagttttcccccacaagaaattgtccttccgcatcctagatacagtaaggctagatattgctactgtaataggtcagctttttcttcttgatatagttgctggtactgcactcgtcatacttgttttccgtgtagcactgggctacaaacagacccgggataggtaccagcttctggtgaataaaaccctctatgagaagacattggcaagtgggttcggctcggtttacttccttctcgatgcttctgagcaacagcagtacaaagaagcacttttggcatatgccatgttgctctgcagaaagaagtatgaggtctcatctcgtgcaagcataagagatgcatgcgagcagtttatgcacgagaaattcgaggcaaagattgagatgccgatcgacaaggcaatggagacactgctgcggttggggctggtgattgagcttcccactgatggtgggtcgagcgtgattggtctcccatgctcggaggcatacaggatcctgaaaagccgttgggacggcttgctggaacaagatacagaacaaggctgattagaacgagacatgtacgttggtggcttggagtggagtgggatgggatgccgtgctggtacatactcgacgcgtcggcaaagctcactcttgtttgtatgtatacgtaccagttgttgcagcaagtgtatatgtgctagctacgtgcatgtataatcgtgatctagtttgttgtacacaaacgattgcagtgtatgtatatgggagcacatgtttttttcggaagactagccatgtgtctgtaagtttttctatttgtaagttggtttccatttataaatatagagcataaacactgttctgtt

SEQ ID NO: 214773 - DNA, 2613 bp, Zea Mays
cgggccggaccggcccaatcgaagttttacgagccaaaacgtgaaagtgtcgtccagccagccacgtggctccggcagggcagagcgtttatccaactcggctctcagcgactgcccaccaccaccactgaggattcctcttccggcggcggcggcggcggcagcgatgctcctcctgcgcgccaacgcgctcgccgccgtaccggtgtccttctccataacgccggcggcctcctatagctgcttcccctggccgtcttcatccaccactgccgcgagctgctccgtcggctcctctgccaggctcgacgccgccgtgcagtacgacccgctccgccccggctccgatgcgtgggcccatcccgacggcatggtcaccgcggagggtgacgaggagaaacagcgctatgacacggagggggagtccaacgactgggaaggggaagggccccaaggatcatcagaccccgagggcatcaacgtgccgcgccagcgctacatcgccgtccccaaggaggccctcctcgatgctgtcctctcgcagttcgcgtccgacgacgacgacgccgcggacttcaagcgctgcgccagatgcttggacgccatccttcacgccgagcacaagaggatgctcgaggagatgcgcacctcctacatgctcacgcaacgccaccgggacgaggaagaggagcaggatgacactgacaccgcctcgggctcggactacgtcaacggcaaagccggctccggatttttcggcatcacccaactggatggcacgttgttccttactagaagcgtggacttgagaactctgctcggattgaccccagaccccgattcccagaccagagttgcttttgcaactcaatttcagcgctcattcatgaccctactacgcaatgctcagtttgaagaactctccgcacaagatctgctcttgacatatgccctaaataacgattacctgctcacgctgcccatttatgtcgactggaagaaggctgctcaatctaatgcaataatattcaggcgtggatacgcgactgagaggcagaaaggcctcctgttggttgagaaacttgattacttgcaatcaaaactcttgcagaatgtctttttcagcctctccaaacccttgaaaaagccagggaaatggcttaatgaggctttgaaaagatcaacagataaccagggatttcagatctggatagacaaactgagactatggcttaaagagcaaacttatgcagataattcactgctgttgatagaaagctcttcatgggacaagcttagttctgatcagttacctgatgcagatgttcctatttggatcgctgcacaaagggcagtctctcgttatgaaggaattttgtcacctgttggtcctcgtggaagactgttaagaagattgcttaaatggactggactaataccttctctgccagaagcaacgataaaatccaacaatgaaactaaacatcttgaaggacatgtgaggccaaactttctaccaagaattacccttgctaatatatgggaacctgcaagcagagaatcttgcaataacaatatctgggagatggtgaaagcttcttttcgtattctgtttgggaggtctactcttcaggaaccagcattccaggagttaatactactttacactgatgaagttgttccaagtgaaacgaaggacgagatggttccgctgcaactgaaaatttatgagaggattccgatcccagatttgccagtagttttcccccacaagaaattgtccttccgcatcctagatacagtaaggctagatattgctactgtaataggtcagctttttcttcttgatatagttgctggtactgcactcgtcatacttgttttccgtgtagcactgggctacaaacagacccgggataggtaccagcttctggtgaataaaaccctctatgagaagacattggcaagtgggttcggctcggtttacttccttctcgatgcttctgagcaacagcagtacaaagaagcacttttggcatatgccatgttgctctgcagaaagaagtatgaggtctcatctcgtgcaagcataagagatgcatgcgagcagtttatgcacgagaaattcgaggcaaagattgagatgccgatcgacaaggcaatggagacactgctgcggttggggctggtgattgagcttcccactgatggtgggtcgagcgtgattggtctcccatgctcggaggcatacaggatcctgaaaagccgttgggacggcttgctggaacaagatacagaacaaggctgattagaacgagacatgtacgttggtggcttggagtggagtgggatgggatgccgtgctggtacatactcgacgcgtcggcaaagctcactcttgtttgtatgtatacgtaccagttgttgcagcaagtgtatatgtgctagctacgtgcatgtataatcgtgatctagtttgttgtacacaaacgattgcagtgtatgtatatgggagcacatgtttttttcggaagactagccatgtgtctgtaagtttttctatttgtaagttggtttccatttataaatatagagcataaacactgttctgtt

SEQ ID NO: 214774 - DNA, 2485 bp, Zea Mays
cgggccggaccggcccaatcgaagttttacgagccaaaacgtgaaagtgtcgtccagccagccacgtggctccggcagggcagagcgtttatccaactcggctctcagcgactgcccaccaccaccactgaggattcctcttccggcggcggcggcggcggcagcgatgctcctcctgcgcgccaacgcgctcgccgccgtaccggtgtccttctccataacgccggcggcctcctatagctgcttcccctggccgtcttcatccaccactgccgcgagctgctccgtcggctcctctgccaggctcgacgccgccgtgcagtacgacccgctccgccccggctccgatgcgtgggcccatcccgacggcatggtcaccgcggagggtgacgaggagaaacagcgctatgacacggagggggagtccaacgactgggaaggggaagggccccaaggatcatcagaccccgagggcatcaacgtgccgcgccagcgctacatcgccgtccccaaggaggccctcctcgatgctgtcctctcgcagttcgcgtccgacgacgacgacgccgcggacttcaagcgctgcgccagatgcttggacgccatccttcacgccgagcacaagaggatgctcgaggagatgcgcacctcctacatgctcacgcaacgccaccgggacgaggaagaggagcaggatgacactgacaccgcctcgggctcggactacgtcaacggcaaagccggctccggatttttcggcatcacccaactggatggcacgttgttccttactagaagcgtggacttgagaactctgctcggattgaccccagaccccgattcccagaccaggcgtggatacgcgactgagaggcagaaaggcctcctgttggttgagaaacttgattacttgcaatcaaaactcttgcagaatgtctttttcagcctctccaaacccttgaaaaagccagggaaatggcttaatgaggctttgaaaagatcaacagataaccagggatttcagatctggatagacaaactgagactatggcttaaagagcaaacttatgcagataattcactgctgttgatagaaagctcttcatgggacaagcttagttctgatcagttacctgatgcagatgttcctatttggatcgctgcacaaagggcagtctctcgttatgaaggaattttgtcacctgttggtcctcgtggaagactgttaagaagattgcttaaatggactggactaataccttctctgccagaagcaacgataaaatccaacaatgaaactaaacatcttgaaggacatgtgaggccaaactttctaccaagaattacccttgctaatatatgggaacctgcaagcagagaatcttgcaataacaatatctgggagatggtgaaagcttcttttcgtattctgtttgggaggtctactcttcaggaaccagcattccaggagttaatactactttacactgatgaagttgttccaagtgaaacgaaggacgagatggttccgctgcaactgaaaatttatgagaggattccgatcccagatttgccagtagttttcccccacaagaaattgtccttccgcatcctagatacagtaaggctagatattgctactgtaataggtctattggcatatgtggtgaactacaaatttgagagtttagcctcatctccgtcagctttttcttcttgatatagttgctggtactgcactcgtcatacttgttttccgtgtagcactgggctacaaacagacccgggataggtaccagcttctggtgaataaaaccctctatgagaagacattggcaagtgggttcggctcggtttacttccttctcgatgcttctgagcaacagcagtacaaagaagcacttttggcatatgccatgttgctctgcagaaagaagtatgaggtctcatctcgtgcaagcataagagatgcatgcgagcagtttatgcacgagaaattcgaggcaaagattgagatgccgatcgacaaggcaatggagacactgctgcggttggggctggtgattgagcttcccactgatggtgggtcgagcgtgattggtctcccatgctcggaggcatacaggatcctgaaaagccgttgggacggcttgctggaacaagatacagaacaaggctgattagaacgagacatgtacgttggtggcttggagtggagtgggatgggatgccgtgctggtacatactcgacgcgtcggcaaagctcactcttgtttgtatgtatacgtaccagttgttgcagcaagtgtatatgtgctagctacgtgcatgtataatcgtgatctagtttgttgtacacaaacgattgcagtgtatgtatatgggagcacatgtttttttcggaagactagccatgtgtctgtaagtttttctatttgtaagttggtttccatttataaatatagagcataaacactgttctgtt

SEQ ID NO: 214775 - DNA, 1892 bp, Zea Mays
aaaggcaaccaagcgaaccagaccctcccaacggtcacctcacctcgcccgccgcgccgtgtagccagatcgccttcaggttccacgacctgaccacaacccctcggcgctcatcgtcatccaccgccgcccgcgaggtccccctccagccttcactgggcgaaggagaaggagaaggtgaagggaaactccgcgcgattgccgccattaactccctccccccacccttctcgcaagcgccaccggatccggtccctccccacccgccctttctccccacctcacggaaccccgcccgcccttttaatagtttcgccccacatgcgtggcgcgagtgccgccgccttccgacgcagcagccgcggccgggatgtcgcgtatccgtagcggggtggaggtggtcgccagtagggggtgcgcgcggatggtgatccccgggatgcatcacaacccctcatccgccgcatccgtctcctcctccgcggcatcgcgcgcggcccccgccgccggttccgggccggcggcgcatgccgatgggcccttcgcaggcctcgtcatctgcgtcactgggctgtccaaagaggcgagagttcaggtgaaggaggcgacggagcggctcgggggcgagtacagcgggagcttgcaccccaagtgcacgcacctcgtggttcagagctttgccggacgcaagttcgagcatgcactgaagcatggtccgaggaatgggctattcctcgttacgctgggttggtttgtggactgcgtgaggaggaacatgaggttggatgaatccttgtatgccatcaagagcattggggagaatggtgtgccgcccggggagttcagccgccttgttggagttcctgttaacgagaagtcttgccttccaccgttgatatttcaggacaaggcatgctcagatatgacccagaagcattcgctccagactcctgggaacggtggtggtcatgatgggttggtttttatgaatgacacaatctacattgaccctgggatatctgatgagatgaggaaaaagatttctgacgctgttactagagaaggtggaaagttgctggagcactggtttattggttgccctacaacttatattgtctgtgaggatgtttgcgttaagagatatgtaggccactcagaaaacattgttactccgctttggatcttgaaaacagtgaaggaaaaaaacttgcagcgtcttgtccatttgtcttccgacctagctaggcatgttgccatggttctggaaaatgttcagacatctgaagaggaaacttggaagtgtaccttctataaacacaagctcatgtggtcgtccatcaaccaaagaggagatcaatgaagtccatcaagcgaagcaaaagtttgttgaaggagcaaagaaagaagtccgagaccgccgtgcccgtcgtatgcagccagtcatgtgaagtaaccattcatccaatcacaccggccacacttctggattcaatctgctggacaatctctgagccaacttcatctgcgtcaatttatatggactcttcgtggtccgatgatgccaatgagcagcaaagcaccacttactttgatgcaaatggggacgtgagggatccagatcaacctaatgacaatttttcccgtccactgaaagaaagtgagcgaagtgagctgatcttcaagaatcacttccttaccatactcttccctgttgatcgttttggagaacttggaccttcctcaaagacgttctataacaatggtggctttacgtgtatacaagtactgaatcacatttacaacttctaccaggtatataactactgcacactcatcgctcaagtttggactctttttgtcttgtaaaacattgatggcagtaaaactattct

SEQ ID NO: 214776 - DNA, 2143 bp, Zea Mays
cgatactgtattttcttcccttgccaggctggatttggcagatcaggcaggaaccatctccttctcgttctgaaagaaaaaaagaaagaatgggagcgtgggggcctgttctcgtggttgagctgtccctgcgcatggggcgcgtacgtcatgcgggccccgccacgacagtaggtacacaagatcttcctcctccttcctttgttctccacttctcctcctctctacctgctaccagattaggtgaactagattaagagatgggagctatattataatgccaaatggcagagccagccagtcggtgggtaggtgccatgcagtgcaacggtgacatgctgccatatgcagtgcagcaggatcgagctggctcccatgtcggtctctctcacactctcaccccgcaacagcaacgaaggggttttgtcgctttggcttcaaatgacaggaaggaatcagaatccagtcatatcatcaaatacgagagttcctagcttcatttcagtgtgtgctgtgctggtgtggttgcccagtcggtggaagtgtccatgcatgtgtgatgtgtgcagggcagggctgcatgcaggtaagctaggctgctaggtctggataccttgtgatggacatggacaggatagtggtcatcgggcatcatgcgttcatgcatgtatagtataggtgtgtgtgtcgctgtcagcaaccacagtcacacatgtcttcccgtttagaagctggtacggtctacagtgtgtgtgtcagtgtgtgtgagcactactgatctgactgccaaaaagggaggacaaaaaatggtggtggcgcaagtgagatttgcgatgggccgtgctattagcagcatcgtgggcctggcactggcaagcccactagtaacggcccattttccatgcctcggaaaataatgattgcgcgcgtctttgtaagtgtgtccaattaatcttctctgctcttttctttcttgccttcatcatgcctgcctgcctgcctgcctccctccctccctccatgtctatatatttttttatatatgtatatattatacatgcgcgcacacacacacaaactagagtaagagtaaccccttgagctttgtcaaaagaaggcagagctcagaaagcctaaagcctcgcttatttagcctccagtagcacccctctttctttgtgtgctccaacaaagctctcactcactctcatacacacacgcaccctacactccatttccattgcctgcattcttggttgggcaagaacaagcaggcagagaggtgagaggaggaggagaagaagaagaagcagatgatcatggggctgccggaggtgaagcagaagaagaagaagcggctcgtgcatagcacgcgaggggaagatcgtcacgggcaccaccaccaagacggcagcgaggcctgggtgctgggcctgtccggcgccgggatcgccgccctgccgctgcaccagctcaagcccgtacgcgtcgaggtcaaggccggccgccgacggcacgcggcggccaccgaggacggcgaggaggaggaagagcccgtgacgccgaggggggaagggtggaggataccggcggaggcggtggcgtgcccgcccgctcccaagaagcccaggacggcggtgttcatcgtcagagacaacgccgccgccggcggccgccggtgcaactacgacggcggcgacgtggtcgacgagttcttccgcgtgccggcggatttggaggccgtcttcgtcgcccgcgcagccaaggccaactagctagctagctgcattgtgggcaccaaggggaggactgccagtgtgtgtgtatgtgatgcttgagctgctccaggcaggctggctcaagcagagtgtgatgcatcggctgctgctgctgctgagtgagtgtgatagagtgagtgcacttgtacaaattgtcttctagtgcatgttaatgcaattcctaattacgtgaaatggaattgcgttgaaatggaaaaactgtcattattgtttatcctttgtggactgtgatctttctttcttcttttttggtgcgggaggggtagagggggtggcatcattttgggcataatggatagacctttttttaataaaacataaaaatatatgtatttaatctaacc

SEQ ID NO: 214777 - DNA, 4857 bp, Zea Mays
aaagccctccctccctcactggcacacgctaaccgaagagcgagcgcaccaggcgtaggagtatggttgtttggtagctagacaaagaattgagggggtggccagaaccgccagatgctgcgaaggcgcagagcccggagcacccagcagcgacctgttccgttggcgttggctcaccacccgaccaccgtgcgcgcgagcaaagagagcccctgcccccctgctgctctccgcgcccactgttccctcttcatccaggcacaggtgacacgggcacctgttcacctttgcagggccctgagcccctgcggccggcctgtagccctgaactgatgaacctgcagttgcagctcattttgcaagacacggacagctctctccttttcgtgctccctttgctcccttttctttcagtcgcttcacactccacggactcgagctttggctttgtggcgcctgtgaatctgccaacaaagaaaggactgaagggggagggaggagagggctgatccaagtgctttcacccatctgcttgtttctccatttgttggcctgcaatggcggggagcttcgacctgaggacgccaaccagaggcgtcgagcaggctatcgttgctctgaagaaaggcgcacatctcctgaaatgtggcaagagggggaagcctaaattctgcgccttcagaatatcatctgatgagacaacattaatatggtactcaaaagggagggaaaaacacttgagcttaagctccgtgtcagctgtggttcttggccagaagacgataaaatttctgcgacagcgttgtccagagaaggaaccccattccttttcacttatatacaaaaacggagagcgctcacttgacttgatctgcagcgatagagatcaagctgaaaactggtatctgggcttgagggccctattaccaactccttgtaatccatgttcatcaattgaatcaaggagcagtaggcagatcgacagttgtacaaatactcccagcagctatattcagcttaagagtaagttactaagtgtgcatggcacaccaaggcacatacaggttagttcaggaagttacattgtagcatctgaatgataacacttgtatagctcgctttggcatttttctctggtatttcatgtagcaacatttgttttttttctcgggaaaggggattcacgtggcaactacagggcagggactgtctgaatttgaaattcaggaggccaattgataaacacaacattcttaagttgtaccaacttatatcaatctcagcaaaccacacatctatgaattatgattgcaagggtactagtaaatgagatcaacattgaaatgattttgactttatgaacccaacaatttgtgtagtttaatcttgtccatatgtaagtaggcataccttactgatgcgcttttctgtttctaaacacttaattctcttggttaaattacagtcttctgtttgggtctaacaattcgtctaatgcacttcatgttaaggtatgttcatcgcaaaggaagcccaagaaggcacacggaacattttttggtggtagcgctgattgttcagaatcattattttacacaaggcagcgaacattctctgacataggtacctacttggaaaatcttacacgcaagatgtcaaatccagaaatacatgatttgaaggatgttatggttggtaaccaagaaaaggagcagaaaattacccaaacacctaaactgaaaacctttgaaggaccccgtgcagcatgtaggttagattctctgaaggatgtttttttctggggtgatgcttttggaagtattttagagtgtggtgatacctcaaaaccccttccaatgttagtggactcaacgaacatgcttgatgtacaaagcattgcttgcggagagactcatgcggccataatcactaagcaaggagaggtctactcctggggaaatgagagcagtggcagaattggaaatcaagtaaatatcaaagtctcccggcccaaggtcgttcaatctcttgcctctttacatgtgaaggatgtggcctatggatcaaagcacacttgtgcagtaactgtttctggtgaacttattgaatggggagaaggaccctatatgggccagttggacagctatgcgaggaatcaatggtttccgcataaattgtttagtccactggacggcatatctgttgtgaagattgcttgtggtccttggcacacagcaataataacgtcttctggtcagttatacacatatggggatggaacatttggtgttcttggtcatggagatacacaaggaactacccggcctaaagaagtagagtctttgaaaggctcaagagtgaaatgtgtggcatgtgggccatggcacacagctgccattgtggaagtgatcagtgatttcaagagcaattcaccaagaagcaagctgttcacatggggcgatgcagatcgggggaagctgggtcatgctgacaaaaagatgaagcttataccaacatgtgttgattcactcacagactatgattttattcaggtgtcctgcgggacggcactcactgttgctctctctgttactggtgtggtctttactagtggcagttcgatgcatgggcaattagggaacccccatgcagatggtaaaactgtttctgctgttgaaggactacttaagagcgagtttgtcagacatatatcatcaggttcttcccatgtagcagtggtgactacaaatgggaaagtgtttacatggggtaaaggcaaggaagggcagcttggtttaggtgacttccttaataggagcactccaactttagtagatgcattggaaggtaggcatgtggaaagcctatcttgtggttacaactacactgcagcagtatgtctgcataaagtaatctcaaggaaggacctctctgtatgtagtggttgcaagatggcttttggtttcactagaaagaagcacaactgttaccattgtggatccatgttctgtaattcctgtagtagtaacaaggttgccaaggcagcacttgcaccagataagagcagaaggtatcgtgtgtgtgatgggtgtttcagtcagctactgaaagttgtggattctggtaaggtaaagtctgaactaaataccagcaaaggagctgaaattataaggtcatacacaccaaagttgtctcgtatattcagggatgtaaacttacctgtggaaaaggaaaaggtggctttagtacaacgctccaatcagagaaatgaggtcctgtacactccagtccaagcgaaatctcagagatgggggcaagttgagtgcccagctcaatttctatctgcagaagacagttctcattatcaatctatatcgaagaatcacatgtatagtgcctctgtttccgagagaatgcatgaccccacagtgctgaagtctggcagatctttgcaacagcctaatgatgaccagaggaaagatcttaacagcatagaagaaaccttgctcactgaagaagtaaagcagcttcgttcacagatgacacttctcatggagcaataccatcagaaagctcttcaggttgaactgtataaacaaaaactcgatgagacatggctaattgttaggaatgaggctgcaaaatgcaaagctgccaaagatatcataaaggttctaactgatcagtgtaaggccttgtcagagaaacttttggtcggtcagcaatatgagaaccttgagacaaaatctaatatcagccaaggacaaacattttcagcagatttgcaacatcatcccagtgaaaaatttgccacaggcaaattcggacaactcgacaacaccaaaaatcaccagaccagcagccaaggagacgaagaatatacaccttcttcaagttctgatgtgcaggtagaaggattgtgtggtcatttgaatggttcaagaacatttgacagtaatggccgtattacagaagggaattccattgttgctcgcgtcacctccaatggtgtgatcgagcaaatcgagcgtggggtgtatgtcacatttgctgtatcaccttgtggcaagaaagacataaaacgtgtacgattcagtcggaagcattttggcgagaaggaagctcaacactggtgggaagagaataagggcagcgtctatgcaaagtacagcactgaaaaagcgcaacatcagctagaggttacaatcaagagtgtacaagagtaaccacaagttggattgggttacctactgctgagcaagatgaaaaaatgacatggagcaaataagatgatattaacggaacagataactgaccgtcctttttcaatgaaaataggcagtttaacttattgtagatacgaatgtacagataagaatgagtgaatgacggctggatgcctcctttcttttctccatttcctcctgattcagttggcatgatctagtctgatgaacaatgcagtgctgaattgaaccagtatcagtcgtaattttctggcagaaagtagaatttgttcagtattagttgtttcccttgattcttcagagcaactaaacctgcaacaatggaagtttcagacacaaagctaatagttgtcagcgttcatattctgacggagaaagcatccaactgaaaacagttctaacactcggcgccaataggaaggcaaggcttatcctttcgagtctccaccataccaccaccaacaatggcgagcattcacgccggctttgcctccaccatcgttgcttgcagaagctttagcttcactatcgtggcatgcccctccccctcgcccgcgcattgtacggcctcctcttccagtggggtccgcaaccagcggcgcaaatccac

SEQ ID NO: 214778 - DNA, 4057 bp, Zea Mays
cagctctctccttttcgtgctccctttgctcccttttctttcagtcgcttcacactccacggactcgagctttggctttgtggcgcctgtgaatctgccaacaaagaaaggactgaagggggagggaggagagggctgatccaagtgctttcacccatctgcttgtttctccatttgttggcctgcaatggcggggagcttcgacctgaggacgccaaccagaggcgtcgagcaggctatcgttgctctgaagaaaggcgcacatctcctgaaatgtggcaagagggggaagcctaaattctgcgccttcagaatatcatctgatgagacaacattaatatggtactcaaaagggagggaaaaacacttgagcttaagctccgtgtcagctgtggttcttggccagaagacgatttcagaattttgcagataaaatttctgcgacagcgttgtccagagaaggaaccccattccttttcacttatatacaaaaacggagagcgctcacttgacttgatctgcagcgatagagatcaagctgaaaactggtatctgggcttgagggccctattaccaactccttgtaatccatgttcatcaattgaatcaaggagcagtaggcagatcgacagttgtacaaatactcccagcagctatattcagcttaagagtaagttactaagtgtgcatggcacaccaaggcacatacaggtatgttcatcgcaaaggaagcccaagaaggcacacggaacattttttggtggtagcgctgattgttcagaatcattattttacacaaggcagcgaacattctctgacataggtacctacttggaaaatcttacacgcaagatgtcaaatccagaaatacatgatttgaaggatgttatggttggtaaccaagaaaaggagcagaaaattacccaaacacctaaactgaaaacctttgaaggaccccgtgcagcatgtaggttagattctctgaaggatgtttttttctggggtgatgcttttggaagtattttagagtgtggtgatacctcaaaaccccttccaatgttagtggactcaacgaacatgcttgatgtacaaagcattgcttgcggagagactcatgcggccataatcactaagcaaggagaggtctactcctggggaaatgagagcagtggcagaattggaaatcaagtaaatatcaaagtctcccggcccaaggtcgttcaatctcttgcctctttacatgtgaaggatgtggcctatggatcaaagcacacttgtgcagtaactgtttctggtgaacttattgaatggggagaaggaccctatatgggccagttggacagctatgcgaggaatcaatggtttccgcataaattgtttagtccactggacggcatatctgttgtgaagattgcttgtggtccttggcacacagcaataataacgtcttctggtcagttatacacatatggggatggaacatttggtgttcttggtcatggagatacacaaggaactacccggcctaaagaagtagagtctttgaaaggctcaagagtgaaatgtgtggcatgtgggccatggcacacagctgccattgtggaagtgatcagtgatttcaagagcaattcaccaagaagcaagctgttcacatggggcgatgcagatcgggggaagctgggtcatgctgacaaaaagatgaagcttataccaacatgtgttgattcactcacagactatgattttattcaggtgtcctgcgggacggcactcactgttgctctctctgttactggtgtggtctttactagtggcagttcgatgcatgggcaattagggaacccccatgcagatggtaaaactgtttctgctgttgaaggactacttaagagcgagtttgtcagacatatatcatcaggttcttcccatgtagcagtggtgactacaaatgggaaagtgtttacatggggtaaaggcaaggaagggcagcttggtttaggtgacttccttaataggagcactccaactttagtagatgcattggaaggtaggcatgtggaaagcctatcttgtggttacaactacactgcagcagtatgtctgcataaagtaatctcaaggaaggacctctctgtatgtagtggttgcaagatggcttttggtttcactagaaagaagcacaactgttaccattgtggatccatgttctgtaattcctgtagtagtaacaaggttgccaaggcagcacttgcaccagataagagcagaaggtatcgtgtgtgtgatgggtgtttcagtcagctactgaaagttgtggattctggtaaggtaaagtctgaactaaataccagcaaaggagctgaaattataaggtcatacacaccaaagttgtctcgtatattcagggatgtaaacttacctgtggaaaaggaaaaggtggctttagtacaacgctccaatcagagaaatgaggtcctgtacactccagtccaagcgaaatctcagagatgggggcaagttgagtgcccagctcaatttctatctgcagaagacagttctcattatcaatctatatcgaagaatcacatgtatagtgcctctgtttccgagagaatgcatgaccccacagtgctgaagtctggcagatctttgcaacagcctaatgatgaccagaggaaagatcttaacagcatagaagaaaccttgctcactgaagaagtaaagcagcttcgttcacagatgacacttctcatggagcaataccatcagaaagctcttcaggttgaactgtataaacaaaaactcgatgagacatggctaattgttaggaatgaggctgcaaaatgcaaagctgccaaagatatcataaaggttctaactgatcagtgtaaggccttgtcagagaaacttttggtcggtcagcaatatgagaaccttgagacaaaatctaatatcagccaaggacaaacattttcagcagatttgcaacatcatcccagtgaaaaatttgccacaggcaaattcggacaactcgacaacaccaaaaatcaccagaccagcagccaaggagacgaagaatatacaccttcttcaagttctgatgtgcaggtagaaggattgtgtggtcatttgaatggttcaagaacatttgacagtaatggccgtattacagaagggaattccattgttgctcgcgtcacctccaatggtgtgatcgagcaaatcgagcgtggggtgtatgtcacatttgctgtatcaccttgtggcaagaaagacataaaacgtgtacgattcagtcggaagcattttggcgagaaggaagctcaacactggtgggaagagaataagggcagcgtctatgcaaagtacagcactgaaaaagcgcaacatcagctagaggttacaatcaagagtgtacaagagtaaccacaagttggattgggttacctactgctgagcaagatgaaaaaatgacatggagcaaataagatgatattaacggaacagataactgaccgtcctttttcaatgaaaataggcagtttaacttattgtagatacgaatgtacagataagaatgagtgaatgacggctggatgcctcctttcttttctccatttcctcctgattcagttggcatgatctagtctgatgaacaatgcagtgctgaattgaaccagtatcagtcgtaattttctggcagaaagtagaatttgttcagtattagttgtttcccttgattcttcagagcaactaaacctgcaacaatggaagtttcagacacaaagctaatagttgtcagcgttcatattctgacggagaaagcatccaactgaaaacagttctaacactcggcgccaataggaaggcaaggcttatcctttcgagtctccaccataccaccaccaacaatggcgagcattcacgccggctttgcctccaccatcgttgcttgcagaagctttagcttcactatcgtggcatgcccctccccctcgcccgcgcattgtacggcctcctcttccagtggggtccgcaaccagcggcgcaaatccac

SEQ ID NO: 214779 - DNA, 4004 bp, Zea Mays
gcttcacactccacggactcgagctttggctttgtggcgcctgtgaatctgccaacaaagaaaggactgaagggggagggaggagagggctgatccaagtgctttcacccatctgcttgtttctccatttgttggcctgcaatggcggggagcttcgacctgaggacgccaaccagaggcgtcgagcaggctatcgttgctctgaagaaaggcgcacatctcctgaaatgtggcaagagggggaagcctaaattctgcgccttcagaatatcatctgatgagacaacattaatatggtactcaaaagggagggaaaaacacttgagcttaagctccgtgtcagctgtggttcttggccagaagacgaattttgcagataaaatttctgcgacagcgttgtccagagaaggaaccccattccttttcacttatatacaaaaacggagagcgctcacttgacttgatctgcagcgatagagatcaagctgaaaactggtatctgggcttgagggccctattaccaactccttgtaatccatgttcatcaattgaatcaaggagcagtaggcagatcgacagttgtacaaatactcccagcagctatattcagcttaagagtaagttactaagtgtgcatggcacaccaaggcacatacaggtatgttcatcgcaaaggaagcccaagaaggcacacggaacattttttggtggtagcgctgattgttcagaatcattattttacacaaggcagcgaacattctctgacataggtacctacttggaaaatcttacacgcaagatgtcaaatccagaaatacatgatttgaaggatgttatggttggtaaccaagaaaaggagcagaaaattacccaaacacctaaactgaaaacctttgaaggaccccgtgcagcatgtaggttagattctctgaaggatgtttttttctggggtgatgcttttggaagtattttagagtgtggtgatacctcaaaaccccttccaatgttagtggactcaacgaacatgcttgatgtacaaagcattgcttgcggagagactcatgcggccataatcactaagcaaggagaggtctactcctggggaaatgagagcagtggcagaattggaaatcaagtaaatatcaaagtctcccggcccaaggtcgttcaatctcttgcctctttacatgtgaaggatgtggcctatggatcaaagcacacttgtgcagtaactgtttctggtgaacttattgaatggggagaaggaccctatatgggccagttggacagctatgcgaggaatcaatggtttccgcataaattgtttagtccactggacggcatatctgttgtgaagattgcttgtggtccttggcacacagcaataataacgtcttctggtcagttatacacatatggggatggaacatttggtgttcttggtcatggagatacacaaggaactacccggcctaaagaagtagagtctttgaaaggctcaagagtgaaatgtgtggcatgtgggccatggcacacagctgccattgtggaagtgatcagtgatttcaagagcaattcaccaagaagcaagctgttcacatggggcgatgcagatcgggggaagctgggtcatgctgacaaaaagatgaagcttataccaacatgtgttgattcactcacagactatgattttattcaggtgtcctgcgggacggcactcactgttgctctctctgttactggtgtggtctttactagtggcagttcgatgcatgggcaattagggaacccccatgcagatggtaaaactgtttctgctgttgaaggactacttaagagcgagtttgtcagacatatatcatcaggttcttcccatgtagcagtggtgactacaaatgggaaagtgtttacatggggtaaaggcaaggaagggcagcttggtttaggtgacttccttaataggagcactccaactttagtagatgcattggaaggtaggcatgtggaaagcctatcttgtggttacaactacactgcagcagtatgtctgcataaagtaatctcaaggaaggacctctctgtatgtagtggttgcaagatggcttttggtttcactagaaagaagcacaactgttaccattgtggatccatgttctgtaattcctgtagtagtaacaaggttgccaaggcagcacttgcaccagataagagcagaaggtatcgtgtgtgtgatgggtgtttcagtcagctactgaaagttgtggattctggtaaggtaaagtctgaactaaataccagcaaaggagctgaaattataaggtcatacacaccaaagttgtctcgtatattcagggatgtaaacttacctgtggaaaaggaaaaggtggctttagtacaacgctccaatcagagaaatgaggtcctgtacactccagtccaagcgaaatctcagagatgggggcaagttgagtgcccagctcaatttctatctgcagaagacagttctcattatcaatctatatcgaagaatcacatgtatagtgcctctgtttccgagagaatgcatgaccccacagtgctgaagtctggcagatctttgcaacagcctaatgatgaccagaggaaagatcttaacagcatagaagaaaccttgctcactgaagaagtaaagcagcttcgttcacagatgacacttctcatggagcaataccatcagaaagctcttcaggttgaactgtataaacaaaaactcgatgagacatggctaattgttaggaatgaggctgcaaaatgcaaagctgccaaagatatcataaaggttctaactgatcagtgtaaggccttgtcagagaaacttttggtcggtcagcaatatgagaaccttgagacaaaatctaatatcagccaaggacaaacattttcagcagatttgcaacatcatcccagtgaaaaatttgccacaggcaaattcggacaactcgacaacaccaaaaatcaccagaccagcagccaaggagacgaagaatatacaccttcttcaagttctgatgtgcaggtagaaggattgtgtggtcatttgaatggttcaagaacatttgacagtaatggccgtattacagaagggaattccattgttgctcgcgtcacctccaatggtgtgatcgagcaaatcgagcgtggggtgtatgtcacatttgctgtatcaccttgtggcaagaaagacataaaacgtgtacgattcagtcggaagcattttggcgagaaggaagctcaacactggtgggaagagaataagggcagcgtctatgcaaagtacagcactgaaaaagcgcaacatcagctagaggttacaatcaagagtgtacaagagtaaccacaagttggattgggttacctactgctgagcaagatgaaaaaatgacatggagcaaataagatgatattaacggaacagataactgaccgtcctttttcaatgaaaataggcagtttaacttattgtagatacgaatgtacagataagaatgagtgaatgacggctggatgcctcctttcttttctccatttcctcctgattcagttggcatgatctagtctgatgaacaatgcagtgctgaattgaaccagtatcagtcgtaattttctggcagaaagtagaatttgttcagtattagttgtttcccttgattcttcagagcaactaaacctgcaacaatggaagtttcagacacaaagctaatagttgtcagcgttcatattctgacggagaaagcatccaactgaaaacagttctaacactcggcgccaataggaaggcaaggcttatcctttcgagtctccaccataccaccaccaacaatggcgagcattcacgccggctttgcctccaccatcgttgcttgcagaagctttagcttcactatcgtggcatgcccctccccctcgcccgcgcattgtacggcctcctcttccagtggggtccgcaaccagcggcgcaaatccac

SEQ ID NO: 214780 - DNA, 1065 bp, Zea Mays
cattgccgttcaatgcccatgcatgctgcttgcttgttctttcatcagcaacaaaggcttctggcgtgaagaggaaagcagcagctgcgatttccgcaacaacgactgaacaacaaccaacgggagtacaagacccgagttccgggcaatggagctgcgcaatctgccaggtgagcgcgaccagcgaggccaacctgaacgagcacctccaagggaaaaagcacagggcaaagctggcccgatgcggagcgaccaaggcgacgacggatcctcctcctaacagaagcggcgatggcgcagtagcagtagcagcaggcccgagcgacgcgccgaagaggatccagatcctggtcgacggggaggcgcaccaggtcgtccagaggagcagctgcgtgtggtgcgagcgctgcagggtcggctgcaccaacgccgccgccatggtcgaccatctgcggggcaagaggcacagcctgtcgaacaaggtctggacggcgataaaggccgtgaggaggagcagctaatacggcgataaaggccgtgaccgtgaggaggaggcacaatcttgtcgaatacggttgagcagggcctgtgttgagctttggaaagaaagggcacagacactagttgtttgacaactaatgaagtgtgggttttcatagaccctcttaatttagcagcggaaagaaagacggtatattccttgcttgttatcacttatcagacaatcacttattccctaatcccgaacctcgcgtgtgggggctaatcgttgggagtgtgtgtgtgtgtttttggatgggctttttccttgtgatgtttatgcggcagggtgtgttcctcctgctcatgtagctttcaggtctgatgctttttatggttttggatggctgcgggagtggtagcttgtggcatgcatctcttgcgtgctcgctgcctcaagatctttcagacctgaaaacaaaacaaaaacaaaacccagatgagcccacgcgtcggtctgttctgttggtcttctcgagtctaaggctagcttgggcgacggagagcgtagctagctaggagtcg

SEQ ID NO: 214781 - DNA, 2068 bp, Zea Mays
ccaaagggcaaaggcccaaaaacccagccggccagagccagtcccccaccccccagcagccatggagttcggcttccgcgcaggaaacagcacgcagcgccgcccttcccccgatcgacgcgtcacagcacagcaagccggacccttccacggcgaccacccgccgccctcgccgttgcagtgggaggctgcggcccggcgcgagcggatcaaacgcgaggtggagcgccggctcatcgaggaggaggtccgcctggagctcgcccttgagcgcgcccgcctccacggtggttttggccccgccccgttcctcgggaccgacggctccgtcgtgccggtgccgcctccacctccacctccaggccggttctccagggccgacggcccatcgatgacgccggcaatgtcgtgggacagccctcggcggctcgcgagatttgagcaaccgatgctcctcagtgagacgggaacgtggtccctgctgccgaagccgaggcatacgctccggctgcgcgagatcgcgcccagcgagagctccgaggtcagggagcaccattgccgttcaatgcccatgcatgctgcttgcttgttcgtattcttcttcgacattttggttgttcatattcttttcggcatttggcattaaaggcgcctagcgctactgcattaccacttttcaaatttctttccttttttttggtttgatctcttattgcacttccgttttactctcgatcgctttagaagcgcaagcgcttgcttttttcttgtcatttaaaggccaatggtagtagtcactttctgtaataactgattacaatctagaaggaaacgttgcccatagatcaaatgggagcttgaacgctgaagccaaataacagatctgatctggtgaacttgtatggaggaccagagaagaccgagtaaactattccatgtggtgatgtggatttcagtttctagttatgcagtaacttccttgtcgccttgatctttttcttcctgcccgacttgactaactcttccttctgtttccaggttctttcatcagcaacaaaggcttctggcgtgaagaggaaagcagcagctgcgatttccgcaacaacgactgaacaacaaccaacgggagtacaagacccgagttccgggcaatggagctgcgcaatctgccaggtgagcgcgaccagcgaggccaacctgaacgagcacctccaagggaaaaagcacagggcaaagctggcccgatgcggagcgaccaaggcgacgacggatcctcctcctaacagaagcggcgatggcgcagtagcagtagcagcaggcccgagcgacgcgccgaagaggatccagatcctggtcgacggggaggcgcaccaggtcgtccagaggagcagctgcgtgtggtgcgagcgctgcagggtcggctgcaccaacgccgccgccatggtcgaccatctgcggggcaagaggcacagcctgtcgaacaaggtctggacggcgataaaggccgtgaggaggagcagctaatacggcgataaaggccgtgaccgtgaggaggaggcacaatcttgtcgaatacggttgagcagggcctgtgttgagctttggaaagaaagggcacagacactagttgtttgacaactaatgaagtgtgggttttcatagaccctcttaatttagcagcggaaagaaagacggtatattccttgcttgttatcacttatcagacaatcacttattccctaatcccgaacctcgcgtgtgggggctaatcgttgggagtgtgtgtgtgtgtttttggatgggctttttccttgtgatgtttatgcggcagggtgtgttcctcctgctcatgtagctttcaggtctgatgctttttatggttttggatggctgcgggagtggtagcttgtggcatgcatctcttgcgtgctcgctgcctcaagatctttcagacctgaaaacaaaacaaaaacaaaacccagatgagcccacgcgtcggtctgttctgttggtcttctcgagtctaaggctagcttgggcgacggagagcgtagctagctaggagtcg

SEQ ID NO: 214782 - DNA, 1449 bp, Zea Mays
cctatttcagttcgtgtggattggacacttcaaagaaagcccccccagcccccgctgctgctggagaaaagagaagggtgggtgggtgggagaagcgaacaaaaactcaagtagctagagagagaaagcaaaggcagcaggctcagctagctccgtgtgagtgagtgagtgaggtatagagagagagagagagtgaggaagggaagccattgttgcagttgcacaggaaagaaagaaggaaggaaggaacgagcgggagtggaaaagttggtggaggaggaggaggaggatgatggaggagagagcgggcgagccgtcggaggtggaggagcagggctgcgcagcgaggccagccaaaagtagattcggcgccgtgggcccgccgtcctccagctgaggaggaaaggcagctatcggcgaggaagggtggtggactggtggtgctagcggtggtggtggtggtggtggtggaggatcccctctcacgtcaagcgctgtgtggaaagcataaaggcgggaggaggaggagagggcgaaggcgcagagcttccccgccgcacaaagcgaaaaggcttcagaaagaagaaagcttccgccttgggagggagagcgaggcatcctgcgtgtgagcgtgcgataaatagcggctccaggtccaggctgagggagagcgcgtctctggtgctctcgcaaccaccgtgcgcttgctttcctcctgctctactccgttgcacacttgtactaggcctggaggtcctgtagctcgcctggtgctgtgtcggagacggtggcaatggcattgcaggagcaggaggcggacggcgacgagggcggggaggaagacgacgaaggcgaggatgagcggatgacgggatacggtgtgggggagctgatatctgcttgtcccgaggcgtgctgtccgcttgcggcggtgtaggagtaagatattggcgcaataggctcaatcatttttttttttgcttctctctttctctttttcccttttcttccttgtttgatgtggcgtgcttgtttttttttttgttgcctttttttgtttctgattgatgagaccaatgttgattatatgatgaagagttgattggtaagaacgctaaggggcctctaagatggacaatataaggtataaaggctcgttaacatagatttatatacgcgctaggtttgagaggcttaacctcgtggcgttttatcgaacacgccttgttgattcggcaaggaacacgggtgggacgctgctgtttgctgatgtggtgttggtcggccaagaaatgtgatgaacacgggtaagacgccgctgtagcattgactgaaacacagacgaacatgtcgaggacatgctactattttgttacgatcttagtatactgtatacccgtttttctgtatccaattcgacgttacaatacaagactactctcactcccg

SEQ ID NO: 214783 - DNA, 1581 bp, Zea Mays
cctatttcagttcgtgtggattggacacttcaaagaaagcccccccagcccccgctgctgctggagaaaagagaagggtgggtgggtgggagaagcgaacaaaaactcaagtagctagagagagaaagcaaaggcagcaggctcagctagctccgtgtgagtgagtgagtgaggtatagagagagagagagagtgaggaagggaagccattgttgcagttgcacaggaaagaaagaaggaaggaaggaacgagcgggagtggaaaagttggtgagtgaaacttacccactgctgcagctagctgctcccacttcctcgctgcgtcgtcctccctcacgcacctcgcctcgtctcccgcctcctggctccggcacgcgtaccatctcctctcggtctaaagcggtggaggaggaggaggaggatgatggaggagagagcgggcgagccgtcggaggtggaggagcagggctgcgcagcgaggccagccaaaagtagattcggcgccgtgggcccgccgtcctccagctgaggaggaaaggcagctatcggcgaggaagggtggtggactggtggtgctagcggtggtggtggtggtggtggtggaggatcccctctcacgtcaagcgctgtgtggaaagcataaaggcgggaggaggaggagagggcgaaggcgcagagcttccccgccgcacaaagcgaaaaggcttcagaaagaagaaagcttccgccttgggagggagagcgaggcatcctgcgtgtgagcgtgcgataaatagcggctccaggtccaggctgagggagagcgcgtctctggtgctctcgcaaccaccgtgcgcttgctttcctcctgctctactccgttgcacacttgtactaggcctggaggtcctgtagctcgcctggtgctgtgtcggagacggtggcaatggcattgcaggagcaggaggcggacggcgacgagggcggggaggaagacgacgaaggcgaggatgagcggatgacgggatacggtgtgggggagctgatatctgcttgtcccgaggcgtgctgtccgcttgcggcggtgtaggagtaagatattggcgcaataggctcaatcatttttttttttgcttctctctttctctttttcccttttcttccttgtttgatgtggcgtgcttgtttttttttttgttgcctttttttgtttctgattgatgagaccaatgttgattatatgatgaagagttgattggtaagaacgctaaggggcctctaagatggacaatataaggtataaaggctcgttaacatagatttatatacgcgctaggtttgagaggcttaacctcgtggcgttttatcgaacacgccttgttgattcggcaaggaacacgggtgggacgctgctgtttgctgatgtggtgttggtcggccaagaaatgtgatgaacacgggtaagacgccgctgtagcattgactgaaacacagacgaacatgtcgaggacatgctactattttgttacgatcttagtatactgtatacccgtttttctgtatccaattcgacgttacaatacaagactactctcactcccg

SEQ ID NO: 214784 - DNA, 2675 bp, Zea Mays
aaaagactaatcacttttttaagtgggacagggagcaaccgccatcatccctgttcgtcatctctcccaccatcaacaccaacatgggcagcaacacggaaagggccaggaaggcgttgggcgccatgaagctgatcggtttctctaagaagcaggccatcccagtactcaaggaactcctcaaaatcttcaacaacaactgggagcccattgaggatgagagctaccgtgccctcgcagatgccatcctcgataggcaagacagcaagcaaacccctccctcccaacagggcacccaagcagcccatgcggacttggagcctcttagatcaacaagggacgatcggcaacaatatctttctgctagccttgatgacacatgtgaagatgataatgaaacacccctggtcaagaggcccaggatgggcaccgctaatttcagaccagagctgcagccaccacagcaatccagtgtttcaacccaaggtgctctgcctgcttcaccacaaacgagtcgtcggcaaactcggtccttgactgtagagccacacgctgctggccatgaatatcctttagctgtcaacgatgctctagttgtgaaagaacccaaaccagaaccacaaattgatagagcagaagattttgtggctggtcctaatgccacacaactcaatgatggatcttcagaacaaacttcgggttttggtgcaagaggcaacatagttcaccaagctcaaagtcttggcaggagcctgcaagcagccgcagtgtgcaagaatggggtagggtctacagttcaaaatactcatgagacttcgattgtggaggtggacgttgcttcctcagccaatggtgaggtgaagatgtcattgaaatgcagcttgggttcttcaaatttcagcattagtatggaggaggttttcaaaatggtggaggagaagtgccttcactcatacaagatgctaccttcagatctttctattggcaagctgctgagtgaggtatgccaatctgttgtgcagttgggcactatgcattctgaggttaatagggacagtggcagcttgcataatgaagtagttgttccatttgtgaagccaatctcttgtgaggctgctgtgggcataagtgatgatgtggctggtgggtcatcagtccttgaatcctcagaaccttgtttgcagaattcacttgttgcttggaatcctgagttggctcactgtaatcaaaagacaacccatgatactactgatatatccaaaggcgaagagcgggtaagaatacctgtagtaaatgaatttggcagcgagacctgtcctccatccttttattacataccaagaaatcttgtcttccaaaacgcttatgttaacatctcgatttctcgaatttgtgatgaagattgttgtgctgattgttctggcaactgtttatcagcgccagttccatgttcttgtgcaagaataacagggggcgagttctcctatacacttgagggcctgcttaagacagcattccttgatgaatgtacctcagtgaatcatttcctacaagagcaccataggttctactgtccagtttgccctcttgaaagatctaagaacgaaggctcacctggtccatgtaaaggtcatattgtcagaaaattcattaaagaatgctggagtaaatgtggatgtggcatgcagtgtggaaaccgtgtgattcagcgtggtataacatgcaaattacaggtgttctttacacgtgagggtaaaggctggggagtacgcacagtggaagatctcccaagaggtgcctttgtctgtgaatatgttggagagatactaacaagtgctgaattgcatgaaagagcaattgagaatgcaagaaatggtaagcatatgcatcaagtgctcctggacgctggttggggttcaggtgtagtattgagggatgaggacgcttgtagccttgatggttcattttatgggaatgtcgggcggtttatcaaccaccgatgctacaatgcaaatttagttcagatccctgtagaagttgagacgcccgatcatcattatcaccatctggcatttttcacgaacaagaaagtggaggcatttgaagagttaacttgggattatggcatcgattttgatgacatggaagggcccagtaaaccgttcagatgcatgtgtggaagtagatactgccgcgatccgaacaatccaaggaggatgggtagagcagctgctaagcgaaagtaggcagggagcgcggacttggttggagttgagcacaccaacttttgctgtgggggggtctggtttcgtgtttgatgtggagtaatgcagtaccatcacctcagctagtattaagtgtagataggtgtggatgattttggtgaatggtgttatggacggaaatgctgcaggctgagcgacctagtaacctatgccatgtagtggcatctaaattagcctgggattgtgtatgcgtaaaaagaacgcctaagacttaaccatgttattatgtcagcttggtacatggtgataaaaagaatctgaccatttcatgtcagccacaattcttgggacggtcggagagtgaactagtatgtcgctggtgcgttgcaggcctgtttggttgtatgcatattgtctaaaattagttgctcaaattgttgtcacatctta

SEQ ID NO: 214785 - DNA, 2641 bp, Zea Mays
tcgtctaggcacttgtttccaatactagttcttgtgggacagggagcaaccgccatcatccctgttcgtcatctctcccaccatcaacaccaacatgggcagcaacacggaaagggccaggaaggcgttgggcgccatgaagctgatcggtttctctaagaagcaggccatcccagtactcaaggaactcctcaaaatcttcaacaacaactgggagcccattgaggatgagagctaccgtgccctcgcagatgccatcctcgataggcaagacagcaagcaaacccctccctcccaacagggcacccaagcagcccatgcggacttggagcctcttagatcaacaagggacgatcggcaacaatatctttctgctagccttgatgacacatgtgaagatgataatgaaacacccctggtcaagaggcccaggatgggcaccgctaatttcagaccagagctgcagccaccacagcaatccagtgtttcaacccaaggtgctctgcctgcttcaccacaaacgagtcgtcggcaaactcggtccttgactgtagagccacacgctgctggccatgaatatcctttagctgtcaacgatgctctagttgtgaaagaacccaaaccagaaccacaaattgatagagcagaagattttgtggctggtcctaatgccacacaactcaatgatggatcttcagaacaaacttcgggttttggtgcaagaggcaacatagttcaccaagctcaaagtcttggcaggagcctgcaagcagccgcagtgtgcaagaatggggtagggtctacagttcaaaatactcatgagacttcgattgtggaggtggacgttgcttcctcagccaatggtgaggtgaagatgtcattgaaatgcagcttgggttcttcaaatttcagcattagtatggaggaggttttcaaaatggtggaggagaagtgccttcactcatacaagatgctaccttcagatctttctattggcaagctgctgagtgaggtatgccaatctgttgtgcagttgggcactatgcattctgaggttaatagggacagtggcagcttgcataatgaagtagttgttccatttgtgaagccaatctcttgtgaggctgctgtgggcataagtgatgatgtggctggtgggtcatcagtccttgaatcctcagaaccttgtttgcagaattcacttgttgcttggaatcctgagttggctcactgtaatcaaaagacaacccatgatactactgatatatccaaaggcgaagagcggcgccagttccatgttcttgtgcaagaataacagggggcgagttctcctatacacttgagggcctgcttaagacagcattccttgatgaatgtacctcagtgaatcatttcctacaagagcaccataggttctactgtccagtttgccctcttgaaagatctaagaacgaaggctcacctggtccatgtaaaggtcatattgtcagaaaattcattaaagaatgctggagtaaatgtggatgtggcatgcagtgtggaaaccgtgtgattcagcgtggtataacatgcaaattacaggtgttctttacacgtgagggtaaaggctggggagtacgcacagtggaagatctcccaagaggtgcctttgtctgtgaatatgttggagagatactaacaagtgctgaattgcatgaaagagcaattgagaatgcaagaaatggtaagcatatgcatcaagtgctcctggacgctggttggggttcaggtgtagtattgagggatgaggacgcttgtagccttgatggttcattttatgggaatgtcgggcggtttatcaaccaccggtatgtaggttacttgctcgtttttttttgctgtaaatatcttgccataatttgtgtattacagtcttttgtctgctactccgctatgtttttggtaacgaacatatgctatgactagatgctacaatgcaaatttagttcagatccctgtagaagttgagacgcccgatcatcattatcaccatctggcatttttcacgaacaagaaagtggaggcatttgaagagttaacttgggattatggcatcgattttgatgacatggaagggcccagtaaaccgttcagatgcatgtgtggaagtagatactgccgcgatccgaacaatccaaggaggatgggtagagcagctgctaagcgaaagtaggcagggagcgcggacttggttggagttgagcacaccaacttttgctgtgggggggtctggtttcgtgtttgatgtggagtaatgcagtaccatcacctcagctagtattaagtgtagataggtgtggatgattttggtgaatggtgttatggacggaaatgctgcaggctgagcgacctagtaacctatgccatgtagtggcatctaaattagcctgggattgtgtatgcgtaaaaagaacgcctaagacttaaccatgttattatgtcagcttggtacatggtgataaaaagaatctgaccatttcatgtcagccacaattcttgggacggtcggagagtgaactagtatgtcgctggtgcgttgcaggcctgtttggttgtatgcatattgtctaaaattagttgctcaaattgttgtcacatctta

SEQ ID NO: 214786 - DNA, 2539 bp, Zea Mays
ctagagtgtagacggactgagggagagccctcctcgtctcctccgcccctcctccaggtttgcgtgagatcggcgagcgaatcacgcacacagctgtaggatggagtggggatttgctgtctctccctcttgattgcagtttaatcctttccatttcatccgtccgttcctcgtccacccgagtccgttgaccgttgaagtacagtgggacagggagcaaccgccatcatccctgttcgtcatctctcccaccatcaacaccaacatgggcagcaacacggaaagggccaggaaggcgttgggcgccatgaagctgatcggtttctctaagaagcaggccatcccagtactcaaggaactcctcaaaatcttcaacaacaactgggagcccattgaggatgagagctaccgtgccctcgcagatgccatcctcgataggcaagacagcaagcaaacccctccctcccaacagggcacccaagcagcccatgcggacttggagcctcttagatcaacaagggacgatcggcaacaatatctttctgctagccttgatgacacatgtgaagatgataatgaaacacccctggtcaagaggcccaggatgggcaccgctaatttcagaccagagctgcagccaccacagcaatccagtgtttcaacccaaggtgctctgcctgcttcaccacaaacgagtcgtcggcaaactcggtccttgactgtagagccacacgctgctggccatgaatatcctttagctgtcaacgatgctctagttgtgaaagaacccaaaccagaaccacaaattgatagagcagaagattttgtggctggtcctaatgccacacaactcaatgatggatcttcagaacaaacttcgggttttggtgcaagaggcaacatagttcaccaagctcaaagtcttggcaggagcctgcaagcagccgcagtgtgcaagaatggggtagggtctacagttcaaaatactcatgagacttcgattgtggaggtggacgttgcttcctcagccaatggtgaggtgaagatgtcattgaaatgcagcttgggttcttcaaatttcagcattagtatggaggaggttttcaaaatggtggaggagaagtgccttcactcatacaagatgctaccttcagatctttctattggcaagctgctgagtgagcgccagttccatgttcttgtgcaagaataacagggggcgagttctcctatacacttgagggcctgcttaagacagcattccttgatgaatgtacctcagtgaatcatttcctacaagagcaccataggttctactgtccagtttgccctcttgaaagatctaagaacgaaggctcacctggtccatgtaaaggtcatattgtcagaaaattcattaaagaatgctggagtaaatgtggatgtggcatgcagtgtggaaaccgtgtgattcagcgtggtataacatgcaaattacaggtgttctttacacgtgagggtaaaggctggggagtacgcacagtggaagatctcccaagaggtgcctttgtctgtgaatatgttggagagatactaacaagtgctgaattgcatgaaagagcaattgagaatgcaagaaatggtaagcatatgcatcaagtgctcctggacgctggttggggttcaggtgtagtattgagggatgaggacgcttgtagccttgatggttcattttatgggaatgtcgggcggtttatcaaccaccggtatgtaggttacttgctcgtttttttttgctgtaaatatcttgccataatttgtgtattacagtcttttgtctgctactccgctatgtttttggtaacgaacatatgctatgactagatgctacaatgcaaatttagttcagatccctgtagaagttgagacgcccgatcatcattatcaccatctggcatttttcacgaacaagaaagtggaggcatttgaagagttaacttgggattatggcatcgattttgatgacatggaagggcccagtaaaccgttcagatgcatgtgtggaagtagatactgccgcgatccgaacaatccaaggaggatgggtagagcagctgctaagcgaaagtaggcagggagcgcggacttggttggagttgagcacaccaacttttgctgtgggggggtctggtttcgtgtttgatgtggagtaatgcagtaccatcacctcagctagtattaagtgtagataggtgtggatgattttggtgaatggtgttatggacggaaatgctgcaggctgagcgacctagtaacctatgccatgtagtggcatctaaattagcctgggattgtgtatgcgtaaaaagaacgcctaagacttaaccatgttattatgtcagcttggtacatggtgataaaaagaatctgaccatttcatgtcagccacaattcttgggacggtcggagagtgaactagtatgtcgctggtgcgttgcaggcctgtttggttgtatgcatattgtctaaaattagttgctcaaattgttgtcacatctta

SEQ ID NO: 214787 - DNA, 2598 bp, Zea Mays
ctagagtgtagacggactgagggagagccctcctcgtctcctccgcccctcctccaggtttgcgtgagatcggcgagcgaatcacgcacacagctgtaggatggagtggggatttgctgtctctccctcttgattgcagtttaatcctttccatttcatccgtccgttcctcgtccacccgagtccgttgaccgttgaagtacagtgggacagggagcaaccgccatcatccctgttcgtcatctctcccaccatcaacaccaacatgggcagcaacacggaaagggccaggaaggcgttgggcgccatgaagctgatcggtttctctaagaagcaggccatcccagtactcaaggaactcctcaaaatcttcaacaacaactgggagcccattgaggatgagagctaccgtgccctcgcagatgccatcctcgataggcaagacagcaagcaaacccctccctcccaacagggcacccaagcagcccatgcggacttggagcctcttagatcaacaagggacgatcggcaacaatatctttctgctagccttgatgacacatgtgaagatgataatgaaacacccctggtcaagaggcccaggatgggcaccgctaatttcagaccagagctgcagccaccacagcaatccagtgtttcaacccaaggtgctctgcctgcttcaccacaaacgagtcgtcggcaaactcggtccttgactgtagagccacacgctgctggccatgaatatcctttagctgtcaacgatgctctagttgtgaaagaacccaaaccagaaccacaaattgatagagcagaagattttgtggctggtcctaatgccacacaactcaatgatggatcttcagaacaaacttcgggttttggtgcaagaggcaacatagttcaccaagctcaaagtcttggcaggagcctgcaagcagccgcagtgtgcaagaatggggtagggtctacagttcaaaatactcatgagacttcgattgtggaggtggacgttgcttcctcagccaatggtgaggtgaagatgtcattgaaatgcagcttgggttcttcaaatttcagcattagtatggaggaggttttcaaaatggtggaggagaagtgccttcactcatacaagatgctaccttcagatctttctattggcaagctgctgagtgagccaatctcttgtgaggctgctgtgggcataagtgatgatgtggctggtgggtcatcagtccttgaatcctcagaaccttgtttgcagaattcacttgttgcttggaatcctgagttggctcactgtaatcaaaagacaacccatgatactactgatatatccaaaggcgaagagcggcgccagttccatgttcttgtgcaagaataacagggggcgagttctcctatacacttgagggcctgcttaagacagcattccttgatgaatgtacctcagtgaatcatttcctacaagagcaccataggttctactgtccagtttgccctcttgaaagatctaagaacgaaggctcacctggtccatgtaaaggtcatattgtcagaaaattcattaaagaatgctggagtaaatgtggatgtggcatgcagtgtggaaaccgtgtgattcagcgtggtataacatgcaaattacaggtgttctttacacgtgagggtaaaggctggggagtacgcacagtggaagatctcccaagaggtgcctttgtctgtgaatatgttggagagatactaacaagtgctgaattgcatgaaagagcaattgagaatgcaagaaatggtaagcatatgcatcaagtgctcctggacgctggttggggttcaggtgtagtattgagggatgaggacgcttgtagccttgatggttcattttatgggaatgtcgggcggtttatcaaccaccgatgctacaatgcaaatttagttcagatccctgtagaagttgagacgcccgatcatcattatcaccatctggcatttttcacgaacaagaaagtggaggcatttgaagagttaacttgggattatggcatcgattttgatgacatggaagggcccagtaaaccgttcagatgcatgtgtggaagtagatactgccgcgatccgaacaatccaaggaggatgggtagagcagctgctaagcgaaagtaggcagggagcgcggacttggttggagttgagcacaccaacttttgctgtgggggggtctggtttcgtgtttgatgtggagtaatgcagtaccatcacctcagctagtattaagtgtagataggtgtggatgattttggtgaatggtgttatggacggaaatgctgcaggctgagcgacctagtaacctatgccatgtagtggcatctaaattagcctgggattgtgtatgcgtaaaaagaacgcctaagacttaaccatgttattatgtcagcttggtacatggtgataaaaagaatctgaccatttcatgtcagccacaattcttgggacggtcggagagtgaactagtatgtcgctggtgcgttgcaggcctgtttggttgtatgcatattgtctaaaattagttgctcaaattgttgtcacatctta

SEQ ID NO: 214788 - DNA, 3548 bp, Zea Mays
tgctgcagcttctgggccgaccgggggggggggggggggggtgcgtttgacttccctttccttcctgcggtaggggcccacctcgttgccccgctaggccgctacccttctctcttcccccgcctccgtctcttcgactccagacacctccccttcccgctcgccggcgctcggcggcgatccggaaccggcagcggcgcgcatggcgggcccgtgggacacgcacgcgtcgacgagccgggcgcccgcgggccccgacggggaggcggagggcgcgtcgccggactcgctgcggaacacgccctccaacatcgcgcggctggaggacgcgatcgggcactgcgcggcgcgccgcaagtacctcgcgcacaccaagagcccctccgacggcgaggacgtccgctggtacttctgcaagcttcccctcgccgacaaagtgctctcttcttcggtaccacggacagagatagtcgggaaaggagactatttccggttcagcgagagggactctctggcactggaggcatctttcttggagagggaggaagagctgcttgcgtactggtggagggagtacgctgaatgcagtgcaggaccaagaggatccttggttgaaagtgatgattctgcatatctttataaggttgaggaagagcgggttggggttcctgtgaaaggtggactatatgaggttgatttgatgaggcggcattgcttccctgtgtactggaatggggaaaaccggcgtgtcttgagaggccactggtttgctcgcaaaggtggcgtcgactggattcccgtgcgcgaggatgtctctgaacaacttgagttagcgtataattgtcaggtctggcatcgtcggaaatttcaaccttcaggcctatttgcagcaagggttgaccttcaaggaagtacaccggatttgcatgctctttttactggagaggatgatacttgggaagcttggcttgtctttgatacaggtcctaagtttggtagcaacacaatcaaattaagacgcggatatttctgttctgaatctgcaagtacaaagccttcacaggatgaattgcgtcagaaaaaagaagaggaaatggatgattactgctctcaggttccagttggtcatctggtattcatggttcatggcattggacagaggctggagaaagctaatcttgttgatgatgttgttgatttccgtcgtgtaactgctaacctagctgaaagatacttaacttcgtatcaaagaagtacccagagggttctatttataccctgtcagtggaggaagggcttgaagctcagtggtgaaagtactgttgagaaactcactttggatggagttaagggccttcgagtcgcattaggtgccacagttcatgatgttttatattatatgagtcctatctactgtcagcatattattgactcggtctcgaaccagttgaacaaactgtacatgaaatttctaaagagaaatcctggttacagtggaaaggtttcattgtatggccactcgttaggaagtgttttgtcgtatgatatactttgtcatcaagaatccctttgggccccatttccaacagagtatctgaacatggaaacatctgatcgaaatcaaggagcaaaatcagccaatgaagctgatctgcatgattcaggcgcaaaggatcatgatacttctagtctagggtattcttgtgctgataatgaaaacagtgtcattgatgaagatagcaccagaactgacgtgtcatgtatggacagcatcctcccatcatgtgtgcttgaggattcaccaaataaccatgacactgtcgtgcctcgtggtgcggttgttgctgatcaaaatggagaagaaaagaaggttgagaattatcagtcggtgtatgctgaggaaggaacaacttcaggtgtaatcacaaaaaaggctgaaggatcaagcatttcaagatctgctaaggaagtccatgaagaggtcctcgacaaagaaaaattgatggtccttgccaaagacaaattgatcctttcactagaagaagaggtgaaatgtcttaaagctaaactagatcagcttgaacaacataatcatctagtgactgaaaacaccagtggtgttgagtatcatgaagggcaaaattataatcatgccttgaactctggcaaacttttcgtggcacaagaaagtacaaaccagtcctactcaccgcaaatcaaatacacgaaactaaactttaaggttgatacattctttgctgttggatctcccttgggtgtcttcctttccctgcgtaatgtccgtattggtattggcaaaggacaagactattggcaagataagaacgtaattgaagagatgccatgctgccggcagatgttcaatatttttcatccttttgaccctgtagcatacagaattgaaccacttgtatgtgaagattatctaaagaagcgtcctgtaattgttccctaccatagaggcggaaagaggatacatgttggagtgcagagaagatatttctgcacgttctcaagcaattgcccgtcaattgaagtcactgaaggtcaaagcagtagctgctatactagcattgagcagaaatgacacagaagaggatggtgagagtgctaatgagaaagaaaaatcatatggttccattatgatggaaaggttgaccagttcaccgaatggtcgaattgatcatgtgcttcaggagaaaacatttcagcatccatatctatctgctttgggagctcataccaactattggcgagatcatgatactgctctcttcattctcaaacatttgtatcgtgatatacccgaggatcctccaagcgatgtcattgaaaggatgcctattaaactattttatgagagagatccagttgaggaagaaacgcctgtgacgttttcagatcatgcagcaattaaggaattctgcagaaaggtgaaagcttactcaagaaaaatggaggatgatgccaactgccaagcctcgtgatggatttttagtctctcgttacggcctcacacgttcctgggcaagcagaagcaagatgcagacatgggaaggaagaacgaatcgtgatcccaagaaaagaatccacgagatgcagttccacgcttcacgccagaatcagagcacttggagaatgttgtacggagtagagtcggttgccttgctcgttcctacatttataatgcagtgttgtacatagaacgtccgactgtagttttgtgcatcttgaacgtaatgttatgctgcctgctttaaatgctacagaatatatttttgcttttgcatccctagtgtgcgtcaattgcaaagtggttagctcctacttatttagcatgtcttttcattatgtctatcatgggcaaaagtactacataaaaaaggactcgcttagggcccggttgattttttttttttgaaagtttaggtattacaaagacctagttttatagctaaagcgatgcaaaaccaccgtgatttcaaaagaacgaggttgagtagagttttcaggagtccaacaaagaa

SEQ ID NO: 214789 - DNA, 3422 bp, Zea Mays
tgctgcagcttctgggccgaccgggggggggggggggggggtgcgtttgacttccctttccttcctgcggtaggggcccacctcgttgccccgctaggccgctacccttctctcttcccccgcctccgtctcttcgactccagacacctccccttcccgctcgccggcgctcggcggcgatccggaaccggcagcggcgcgcatggcgggcccgtgggacacgcacgcgtcgacgagccgggcgcccgcgggccccgacggggaggcggagggcgcgtcgccggactcgctgcggaacacgccctccaacatcgcgcggctggaggacgcgatcgggcactgcgcggcgcgccgcaagtacctcgcgcacaccaagagcccctccgacggcgaggacgtccgctggtacttctgcaagcttcccctcgccgacaaagtgctctcttcttcggtaccacggacagagatagtcgggaaaggagactatttccggttcagcgagagggactctctggcactggaggcatctttcttggagagggaggaagagctgcttgcgtactggtggagggagtacgctgaatgcagtgcaggaccaagaggatccttggttgaaagtgatgattctgcatatctttataaggttgaggaagagcgggttggggttcctgtgaaaggtggactatatgaggttgatttgatgaggcggcattgcttccctgtgtactggaatggggaaaaccggcgtgtcttgagaggccactggtttgctcgcaaaggtggcgtcgactggattcccgtgcgcgaggatgtctctgaacaacttgagttagcgtataattgtcaggtctggcatcgtcggaaatttcaaccttcaggcctatttgcagcaagggttgaccttcaaggaagtacaccggatttgcatgctctttttactggagaggatgatacttgggaagcttggcttgtctttgatacaggtcctaagtttggtagcaacacaatcaaattaagacgcggatatttctgttctgaatctgcaagtacaaagccttcacaggatgaattgcgtcagaaaaaagaagaggaaatggatgattactgctctcaggttccagttggtcatctggtattcatggttcatggcattggacagaggctggagaaagctaatcttgttgatgatgttgttgatttccgtcgtgtaactgctaacctagctgaaagatacttaacttcgtatcaaagaagtacccagagggttctatttataccctgtcaggtctcgaaccagttgaacaaactgtacatgaaatttctaaagagaaatcctggttacagtggaaaggtttcattgtatggccactcgttaggaagtgttttgtcgtatgatatactttgtcatcaagaatccctttgggccccatttccaacagagtatctgaacatggaaacatctgatcgaaatcaaggagcaaaatcagccaatgaagctgatctgcatgattcaggcgcaaaggatcatgatacttctagtctagggtattcttgtgctgataatgaaaacagtgtcattgatgaagatagcaccagaactgacgtgtcatgtatggacagcatcctcccatcatgtgtgcttgaggattcaccaaataaccatgacactgtcgtgcctcgtggtgcggttgttgctgatcaaaatggagaagaaaagaaggttgagaattatcagtcggtgtatgctgaggaaggaacaacttcaggtgtaatcacaaaaaaggctgaaggatcaagcatttcaagatctgctaaggaagtccatgaagaggtcctcgacaaagaaaaattgatggtccttgccaaagacaaattgatcctttcactagaagaagaggtgaaatgtcttaaagctaaactagatcagcttgaacaacataatcatctagtgactgaaaacaccagtggtgttgagtatcatgaagggcaaaattataatcatgccttgaactctggcaaacttttcgtggcacaagaaagtacaaaccagtcctactcaccgcaaatcaaatacacgaaactaaactttaaggttgatacattctttgctgttggatctcccttgggtgtcttcctttccctgcgtaatgtccgtattggtattggcaaaggacaagactattggcaagataagaacgtaattgaagagatgccatgctgccggcagatgttcaatatttttcatccttttgaccctgtagcatacaggtgggcttttatacagaattgaaccacttgtatgtgaagattatctaaagaagcgtcctgtaattgttccctaccatagaggcggaaagaggatacatgttggagtgcaggagttcagagaagatatttctgcacgttctcaagcaattgcccgtcaattgaagtcactgaaggtcaaagcagtagctgctatactagcattgagcagaaatgacacagaagaggatggtgagagtgctaatgagaaagaaaaatcatatggttccattatgatggaaaggttgaccagttcaccgaatggtcgaattgatcatgtgcttcaggagaaaacatttcagcatccatatctatctgctttgggagctcataccaactattggcgagatcatgatactgctctcttcattctcaaacatttgtatcgtgatatacccgaggatcctccaagcgatgtcattgaaaggatgcctattaaactattttatgagagagatccagttgaggaagaaacgcctgtgacgttttcagatcatgcagcaattaaggaattctgcagaaaggtgaaagcttactcaagaaaaatggaggatgatgccaactgccaagcctcgtgatggatttttagtctctcgttacggcctcacacgttcctgggcaagcagaagcaagatgcagacatgggaaggaagaacgaatcgtgatcccaagaaaagaatccacgagatgcagttccacgcttcacgccagaatcagagcacttggagaatgttgtacggagtagagtcggttgccttgctcgttcctacatttataatgcagtgttgtacatagaacgtccgactgtagttttgtgcatcttgaacgtaatgttatgctgcctgctttaaatgctacagaatatatttttgcttttgcatccctagtgtgcgtcaattgcaaagtggttagctcctacttatttagcatgtcttttcattatgtctatcatgggcaaaagtactacataaaaaaggactcgcttagggcccggttgattttttttttttgaaagtttaggtattacaaagacctagttttatagctaaagcgatgcaaaaccaccgtgatttcaaaagaacgaggttgagtagagttttcaggagtccaacaaagaa

SEQ ID NO: 214790 - DNA, 2484 bp, Zea Mays
atgaattgcgtcagaaaaaagaagaggaaatggatgattactgctctcaggatgaattgcgtcagaaaaaagaagaggaaatggatgattactgctctcaggttccagttggtcatctggtattcatggttcatggcattggacagaggctggagaaagctaatcttgttgatgatgttgttgatttccgtcgtgtaactgctaacctagctgaaagatacttaacttcgtatcaaagaagtacccagagggttctatttataccctgtcagtggaggaagggcttgaagctcagtggtgaaagtactgttgagaaactcactttggatggagttaagggccttcgagtcgcattaggtgccacagttcatgatgttttatattatatgagtcctatctactgtcagcatattattgactcggtctcgaaccagttgaacaaactgtacatgaaatttctaaagagaaatcctggttacagtggaaaggtttcattgtatggccactcgttaggaagtgttttgtcgtatgatatactttgtcatcaagaatccctttgggccccatttccaacagagtatctgaacatggaaacatctgatcgaaatcaaggagcaaaatcagccaatgaagctgatctgcatgattcaggcgcaaaggatcatgatacttctagtctaggcatcctcccatcatgtgtgcttgaggattcaccaaataaccatgacactgtcgtgcctcgtggtgcggttgttgctgatcaaaatggagaagaaaagaaggttgagaattatcagtcggtgtatgctgaggaaggaacaacttcaggtgtaatcacaaaaaaggctgaaggatcaagcatttcaagatctgctaaggaagtccatgaagaggtcctcgacaaagaaaaattgatggtccttgccaaagacaaattgatcctttcactagaagaagaggtgaaatgtcttaaagctaaactagatcagcttgaacaacataatcatctagtgactgaaaacaccagtggtgttgagtatcatgaagggcaaaattataatcatgccttgaactctggcaaacttttcgtggcacaagaaagtacaaaccagtcctactcaccgcaaatcaaatacacgaaactaaactttaaggttgatacattctttgctgttggatctcccttgggtgtcttcctttccctgcgtaatgtccgtattggtattggcaaaggacaagactattggcaagataagaacgtaattgaagagatgccatgctgccggcagatgttcaatatttttcatccttttgaccctgtagcatacaggtgggcttttatacagaattgaaccacttgtatgtgaagattatctaaagaagcgtcctgtaattgttccctaccatagaggcggaaagaggatacatgttggagtgcaggagttcagagaagatatttctgcacgttctcaagcaattgcccgtcaattgaagtcactgaaggtcaaagcagtagctgctatactagcattgagcagaaatgacacagaagaggatggtgagagtgctaatgagaaagaaaaatcatatggttccattatgatggaaaggttgaccagttcaccgaatggtcgaattgatcatgtgcttcaggagaaaacatttcagcatccatatctatctgctttgggagctcataccaactattggcgagatcatgatactgctctcttcattctcaaacatttgtatcgtgatatacccgaggatcctccaagcgatgtcattgaaaggatgcctattaaactattttatgagagagatccagttgaggaagaaacgcctgtgacgttttcagatcatgcagcaattaaggaattctgcagaaaggtgaaagcttactcaagaaaaatggaggatgatgccaactgccaagcctcgtgatggatttttagtctctcgttacggcctcacacgttcctgggcaagcagaagcaagatgcagacatgggaaggaagaacgaatcgtgatcccaagaaaagaatccacgagatgcagttccacgcttcacgccagaatcagagcacttggagaatgttgtacggagtagagtcggttgccttgctcgttcctacatttataatgcagtgttgtacatagaacgtccgactgtagttttgtgcatcttgaacgtaatgttatgctgcctgctttaaatgctacagaatatatttttgcttttgcatccctagtgtgcgtcaattgcaaagtggttagctcctacttatttagcatgtcttttcattatgtctatcatgggcaaaagtactacataaaaaaggactcgcttagggcccggttgattttttttttttgaaagtttaggtattacaaagacctagttttatagctaaagcgatgcaaaaccaccgtgatttcaaaagaacgaggttgagtagagttttcaggagtccaacaaagaa

SEQ ID NO: 214791 - DNA, 2341 bp, Zea Mays
gcgtcagaaaaaagaagaggaaatggatgattactgctctcaggatgaattgcgtcagaaaaaagaagaggaaatggatgattactgctctcaggttccagttggtcatctggtattcatggttcatggcattggacagaggctggagaaagctaatcttgttgatgatgttgttgatttccgtcgtgtaactgctaacctagctgaaagatacttaacttcgtatcaaagaagtacccagagggttctatttataccctgtcagtggaggaagggcttgaagctcagtggtgaaagtactgttgagaaactcactttggatggagttaagggccttcgagtcgcattaggtgccacagttcatgatgttttatattatatgagtcctatctactgtcagcatattattgactcggtctcgaaccagttgaacaaactgtacatgaaatttctaaagagaaatcctggttacagtggaaaggtttcattgtatggccactcgttaggaagtgttttgtcgtatgatatactttgtcatcaagaatccctttgggccccatttccaacagagtatctgaacatggaaacatctgatcgaaatcaaggagcaaaatcagccaatgaagctgatctgcatgattcaggcgcaaaggatcatgatacttctagtctagggtattcttgtgctgataatgaaaacagtgtcattgatgaagatagcaccagaactgacgtgtcatgtatggacagcatcctcccatcatgtgtgcttgaggattcaccaaataaccatgacactgtcgtgcctcgtggtgcggttgttgctgatcaaaatggagaagaaaagaaggttgagaattatcagtcggtgtatgctgaggaaggaacaacttcaggtgtaatcacaaaaaaggctgaaggatcaagcatttcaagatctgctaaggaagtccatgaagaggtcctcgacaaagaaaaattgatggtccttgccaaagacaaattgatcctttcactagaagaagaggttgatacattctttgctgttggatctcccttgggtgtcttcctttccctgcgtaatgtccgtattggtattggcaaaggacaagactattggcaagataagaacgtaattgaagagatgccatgctgccggcagatgttcaatatttttcatccttttgaccctgtagcatacagaattgaaccacttgtatgtgaagattatctaaagaagcgtcctgtaattgttccctaccatagaggcggaaagaggatacatgttggagtgcaggagttcagagaagatatttctgcacgttctcaagcaattgcccgtcaattgaagtcactgaaggtcaaagcagtagctgctatactagcattgagcagaaatgacacagaagaggatggtgagagtgctaatgagaaagaaaaatcatatggttccattatgatggaaaggttgaccagttcaccgaatggtcgaattgatcatgtgcttcaggagaaaacatttcagcatccatatctatctgctttgggagctcataccaactattggcgagatcatgatactgctctcttcattctcaaacatttgtatcgtgatatacccgaggatcctccaagcgatgtcattgaaaggatgcctattaaactattttatgagagagatccagttgaggaagaaacgcctgtgacgttttcagatcatgcagcaattaaggaattctgcagaaaggtgaaagcttactcaagaaaaatggaggatgatgccaactgccaagcctcgtgatggatttttagtctctcgttacggcctcacacgttcctgggcaagcagaagcaagatgcagacatgggaaggaagaacgaatcgtgatcccaagaaaagaatccacgagatgcagttccacgcttcacgccagaatcagagcacttggagaatgttgtacggagtagagtcggttgccttgctcgttcctacatttataatgcagtgttgtacatagaacgtccgactgtagttttgtgcatcttgaacgtaatgttatgctgcctgctttaaatgctacagaatatatttttgcttttgcatccctagtgtgcgtcaattgcaaagtggttagctcctacttatttagcatgtcttttcattatgtctatcatgggcaaaagtactacataaaaaaggactcgcttagggcccggttgattttttttttttgaaagtttaggtattacaaagacctagttttatagctaaagcgatgcaaaaccaccgtgatttcaaaagaacgaggttgagtagagttttcaggagtccaacaaagaa

SEQ ID NO: 214792 - DNA, 2536 bp, Zea Mays
gcgtcagaaaaaagaagaggaaatggatgattactgctctcaggatgaattgcgtcagaaaaaagaagaggaaatggatgattactgctctcaggttccagttggtcatctggtattcatggttcatggcattggacagaggctggagaaagctaatcttgttgatgatgttgttgatttccgtcgtgtaactgctaacctagctgaaagatacttaacttcgtatcaaagaagtacccagagggttctatttataccctgtcagtggaggaagggcttgaagctcagtggtgaaagtactgttgagaaactcactttggatggagttaagggccttcgagtcgcattaggtgccacagttcatgatgttttatattatatgagtcctatctactgtcagcatattattgactcggtctcgaaccagttgaacaaactgtacatgaaatttctaaagagaaatcctggttacagtggaaaggtttcattgtatggccactcgttaggaagtgttttgtcgtatgatatactttgtcatcaagaatccctttgggccccatttccaacagagtatctgaacatggaaacatctgatcgaaatcaaggagcaaaatcagccaatgaagctgatctgcatgattcaggcgcaaaggatcatgatacttctagtctagggtattcttgtgctgataatgaaaacagtgtcattgatgaagatagcaccagaactgacgtgtcatgtatggacagcatcctcccatcatgtgtgcttgaggattcaccaaataaccatgacactgtcgtgcctcgtggtgcggttgttgctgatcaaaatggagaagaaaagaaggttgagaattatcagtcggtgtatgctgaggaaggaacaacttcaggtgtaatcacaaaaaaggctgaaggatcaagcatttcaagatctgctaaggaagtccatgaagaggtcctcgacaaagaaaaattgatggtccttgccaaagacaaattgatcctttcactagaagaagaggtgaaatgtcttaaagctaaactagatcagcttgaacaacataatcatctagtgactgaaaacaccagtggtgttgagtatcatgaagggcaaaattataatcatgccttgaactctggcaaacttttcgtggcacaagaaagtacaaaccagtcctactcaccgcaaatcaaatacacgaaactaaactttaaggttgatacattctttgctgttggatctcccttgggtgtcttcctttccctgcgtaatgtccgtattggtattggcaaaggacaagactattggcaagataagaacgtaattgaagagatgccatgctgccggcagatgttcaatatttttcatccttttgaccctgtagcatacagaattgaaccacttgtatgtgaagattatctaaagaagcgtcctgtaattgttccctaccatagaggcggaaagaggatacatgttggagtgcaggagttcagagaagatatttctgcacgttctcaagcaattgcccgtcaattgaagtcactgaaggtcaaagcagtagctgctatactagcattgagcagaaatgacacagaagaggatggtgagagtgctaatgagaaagaaaaatcatatggttccattatgatggaaaggttgaccagttcaccgaatggtcgaattgatcatgtgcttcaggagaaaacatttcagcatccatatctatctgctttgggagctcataccaactattggcgagatcatgatactgctctcttcattctcaaacatttgtatcgtgatatacccgaggatcctccaagcgatgtcattgaaaggatgcctattaaactattttatgagagagatccagttgaggaagaaacgcctgtgacgttttcagatcatgcagcaattaaggaattctgcagaaaggtgaaagcttactcaagaaaaatggaggatgatgccaactgccaagcctcgtgatggatttttagtctctcgttacggcctcacacgttcctgggcaagcagaagcaagatgcagacatgggaaggaagaacgaatcgtgatcccaagaaaagaatccacgagatgcagttccacgcttcacgccagaatcagagcacttggagaatgttgtacggagtagagtcggttgccttgctcgttcctacatttataatgcagtgttgtacatagaacgtccgactgtagttttgtgcatcttgaacgtaatgttatgctgcctgctttaaatgctacagaatatatttttgcttttgcatccctagtgtgcgtcaattgcaaagtggttagctcctacttatttagcatgtcttttcattatgtctatcatgggcaaaagtactacataaaaaaggactcgcttagggcccggttgattttttttttttgaaagtttaggtattacaaagacctagttttatagctaaagcgatgcaaaaccaccgtgatttcaaaagaacgaggttgagtagagttttcaggagtccaacaaagaa

SEQ ID NO: 214793 - DNA, 2500 bp, Zea Mays
gttcgatggagcacttattctactatcaatcttacaccgaaggttccagttggtcatctggtattcatggttcatggcattggacagaggctggagaaagctaatcttgttgatgatgttgttgatttccgtcgtgtaactgctaacctagctgaaagatacttaacttcgtatcaaagaagtacccagagggttctatttataccctgtcagtggaggaagggcttgaagctcagtggtgaaagtactgttgagaaactcactttggatggagttaagggccttcgagtcgcattaggtgccacagttcatgatgttttatattatatgagtcctatctactgtcagcatattattgactcggtctcgaaccagttgaacaaactgtacatgaaatttctaaagagaaatcctggttacagtggaaaggtttcattgtatggccactcgttaggaagtgttttgtcgtatgatatactttgtcatcaagaatccctttgggccccatttccaacagagtatctgaacatggaaacatctgatcgaaatcaaggagcaaaatcagccaatgaagctgatctgcatgattcaggcgcaaaggatcatgatacttctagtctagggtattcttgtgctgataatgaaaacagtgtcattgatgaagatagcaccagaactgacgtgtcatgtatggacagcatcctcccatcatgtgtgcttgaggattcaccaaataaccatgacactgtcgtgcctcgtggtgcggttgttgctgatcaaaatggagaagaaaagaaggttgagaattatcagtcggtgtatgctgaggaaggaacaacttcaggtgtaatcacaaaaaaggctgaaggatcaagcatttcaagatctgctaaggaagtccatgaagaggtcctcgacaaagaaaaattgatggtccttgccaaagacaaattgatcctttcactagaagaagaggtgaaatgtcttaaagctaaactagatcagcttgaacaacataatcatctagtgactgaaaacaccagtggtgttgagtatcatgaagggcaaaattataatcatgccttgaactctggcaaacttttcgtggcacaagaaagtacaaaccagtcctactcaccgcaaatcaaatacacgaaactaaactttaaggttgatacattctttgctgttggatctcccttgggtgtcttcctttccctgcgtaatgtccgtattggtattggcaaaggacaagactattggcaagataagaacgtaattgaagagatgccatgctgccggcagatgttcaatatttttcatccttttgaccctgtagcatacaggtgggcttttatacagaattgaaccacttgtatgtgaagattatctaaagaagcgtcctgtaattgttccctaccatagaggcggaaagaggatacatgttggagtgcaggagttcagagaagatatttctgcacgttctcaagcaattgcccgtcaattgaagtcactgaaggtcaaagcagtagctgctatactagcattgagcagaaatgacacagaagaggatggtgagagtgctaatgagaaagaaaaatcatatggttccattatgatggaaaggttgaccagttcaccgaatggtcgaattgatcatgtgcttcaggagaaaacatttcagcatccatatctatctgctttgggagctcataccaactattggcgagatcatgatactgctctcttcattctcaaacatttgtatcgtgatatacccgaggatcctccaagcgatgtcattgaaaggatgcctattaaactattttatgagagagatccagttgaggaagaaacgcctgtgacgttttcagatcatgcagcaattaaggaattctgcagaaaggtgaaagcttactcaagaaaaatggaggatgatgccaactgccaagcctcgtgatggatttttagtctctcgttacggcctcacacgttcctgggcaagcagaagcaagatgcagacatgggaaggaagaacgaatcgtgatcccaagaaaagaatccacgagatgcagttccacgcttcacgccagaatcagagcacttggagaatgttgtacggagtagagtcggttgccttgctcgttcctacatttataatgcagtgttgtacatagaacgtccgactgtagttttgtgcatcttgaacgtaatgttatgctgcctgctttaaatgctacagaatatatttttgcttttgcatccctagtgtgcgtcaattgcaaagtggttagctcctacttatttagcatgtcttttcattatgtctatcatgggcaaaagtactacataaaaaaggactcgcttagggcccggttgattttttttttttgaaagtttaggtattacaaagacctagttttatagctaaagcgatgcaaaaccaccgtgatttcaaaagaacgaggttgagtagagttttcaggagtccaacaaagaa

SEQ ID NO: 214794 - DNA, 2220 bp, Zea Mays
ggaagtaagaagctattagatggcctccatgggattggattttttttttccaacaggaacgtgagcggtgagcaaccctaccccaggcccagcttgcgcgctctctctctctctggacgacgacgcctacgccagggccccaggtcgctgccgccctacgccaggtccccttcgccggcgacgagcaccaggtctgttgttacttctctggtgatggaccggaattcagatcaaaactgaaagattggaggagcatataccagtttgagtgtaaatagaggatcttccttatgtttgatgattagctcattgagcaacatacagcaacagatagctacaaatcgtggcatatgactccaaaatggagtgcatgctcttcaaatagctacagagaactaccttcacatgaaaatggagagtgcaaatcaaccttaacagagtcagtcccttcacctacaagctgttttggcttgcacactgcaaacacaatgtgctccttatcttcacaaaagaaggatggtaatgtttataaaagaaggaagatggataaggattcaaattctcctataacatttgaagatgctaaagaaatggcaacccaaagttgcacaatttctgatgaccactcatcattactgctacccattatctcctcagaggcattgcttttaaattcaacagcaggcatggcaggtcctatcctagattgtgaggagcctgctgatgttccattggagccaaattctggtacagatgatagatgcttcatttcaaacatgtctccaacttccatgactccagacaaaaagaatgctgctgaatgttcctcatcgaatattggccctacagaatcaattaccgagcatatttcaccaagggatctttgcattgccatactgatgaaagatggactaataaatgaatcaagaacaagaatggcacataaagaggaattcactgacaatgatgctaaccctttgttggcatgcaataattgtggctgcttggaacattcattgaagatgctgatatgcgattcttgtgaagcaggatttcatttgtcttgctgcattccttgtattaaggagctacctactgatgaatggtattgtgctccatgcttgtgtaagaaacccaagagtctttatggcaaactctcagagggcaggataaatccttccaggaatactaacacaaggcctcatgggatgagtcacatagagtacatgctgaaggatgctgaaccatatgtaactggggttcgacttggtagagattttcaggcagaggtgccagaatggtctggtccatcatccagcgatgtttactttgacgagccctgtgcaattgattctgcagaactaactacatttaatttgtgcaaaatgagtaatcaaagtcattcttccattggtaattggatccaatgccgtgagaccttgaatccaggagattctgacaagcaagttgtctgtggaaaatggagaagggcacccttatatgttgtacagtcagataattgggattgtttttgttgtcttctttgggatccagtccatgctgattgtgctgttccacaggagttgaagactagtgaagttctaaagcagctgaagtttgtaaacatgctaaagaatcagctggtggaccaaaaccagaagcctgcttaaataaatgccagtaccagagtgggcgattcctcaagagaaggatacccattatgatggtatgaatgagttgccgtatgtggcgttctcttgtagtaactagccgtctgtgaacatgtgagaactatgttgttctagcctgttaaacgaaatgatctgtactgtcttctatagggtcttggtacacaagagttatacaacatagatctgtctgtgcagtccagggagcagcgtgtcgctactgctgtgatcgccgccaaacgatcctgtgatcctgcgccaagttttgtttcttggtaacttctggtattgcgcgtgccactgcatggcgtggatgacgttttctggtagactgccgagcgtttgtgtatctgttgataggcgtttggcctgctatgcatttcatgacgagaggcatattgcattgtgtgcctgcattcttgccagaactaaaatgctgggcctagaatccactttccttgtaagcccacgcggcctttttcccgtgagcacaaaatagtactcccagacctttttcatgacgagaggattg

SEQ ID NO: 214795 - DNA, 663 bp, Zea Mays
ataagtatttaaccatggctcgggagttgaagactagtgaagttctaaagcagctgaagtttgtaaacatgctaaagaatcagctggtggaccaaaaccagaagcctgcttaaataaatgccagtaccagagtgggcgattcctcaagagaaggatacccattatgatggtatgaatgagttgccgtatgtggcgttctcttgtagtaactagccgtctgtgaacatgtgagaactatgttgttctagcctgttaaacgaaatgatctgtactgtcttctatagggtcttggtacacaagagttatacaacatagatctgtctgtgcagtccagggagcagcgtgtcgctactgctgtgatcgccgccaaacgatcctgtgatcctgcgccaagttttgtttcttggtaacttctggtattgcgcgtgccactgcatggcgtggatgacgttttctggtagactgccgagcgtttgtgtatctgttgataggcgtttggcctgctatgcatttcatgacgagaggcatattgcattgtgtgcctgcattcttgccagaactaaaatgctgggcctagaatccactttccttgtaagcccacgcggcctttttcccgtgagcacaaaatagtactcccagacctttttcatgacgagaggattg

SEQ ID NO: 214796 - DNA, 4505 bp, Zea Mays
ggcttctgcttctcccctccctagggcgggcgtgaatacgtgatccatcatctccatctccgtctgctgtggtgtgctggtttgagagactcgacggctggcgagacgagactgaagggcacaaatctctccgccatctgttagattccatcgtatcccccacgtcttggcgtcgcttcgtcggctgcgacctgcgagaagccggtgccgccgcgccggtggacgaagacgatcaaggattaggaacggcaaggtcccttgcgatccgatccaattcttcattcttcgattccttccttgggcgggcggctcccctcagcttccttccacatggctcgtcgcccgccgccgtcaccccctcccccggcgcaagggaacgggagtgggagcgggagcctcaccaccagagacgccctcgcctatctcaaggccgtcaaggacaagttccaggaaaagcgccacacgtacgagcagttcatccaggtcatgcgtgatttcaagagcgacaggctcgacagcaccggcgtgatcgcccgtgtcaagaccatcttccacggctacccggacctaatcctcggattcaacgccttcctgcccaaggagcatgccatcaggcctctggacctccgcgaggacaagaagcccgtcgattatcccagggccatcagccttgtcaacaggattaagagccgattccagcaggaggaacatgtctacaagtcattcctggggatcctcaataagtaccgcatgcataacaagcccatccaagatgtttacaacgaggtcaccgcactgttacatggccatccagatttactcgaggagttcagtcattttttgcctgatacgcccatgcctcctccgcaggcaggcactactactaaagttaggcatgatgacaataatgctataatgcattctgtcacgagagctcagacagtccagagggggagagattttccatcaactgctgattgggacaccagtgctgatcgccttgatcttgagcatgatattcaaaaaagttgtattgagaaggagaaaattcgtgatgcctgcccacgtcagcatagaagaggttataaaaggaatgagaagaatgacgagtatgaaaatgaagatttggatgtggagcaatgcggtcacaaatcacaaagaaagatggagggtactggtgatgatacaccaggggatgctacattgtcctcattcaattgttcacacgcacaagagtttcaattttgtgagaaactaaaggcacatctagagcctgaagcttaccaagagttcttgaaatgccttcacatatacaaccaagatattattacaagaaatgaactaaaaagattggtaaaggatatacttcaacattacccagatcttgtgaatggattcaatgacttcttgggtcactgtgaaaatatagatggttttttggaaggaaccttcaataaaatcttttggaatatagggcaaacatcgcggatggttagacctgtggaaaaagagagatacaaggagaacgagggggatagcgatcctgagaaagagagatacaaggaaagcaaaaattctgaaagagtattgaccttcaattctaaggaaggagcagctcatgaagctagtacattccctagcaaagagaagtataacttatgcaaaccaatatcagagcttgatctatcaaattgtcagcggtgcactccaagttaccgacttttgcctaaaaattatccagtaccttctgcaagcaacaggactgacactgaagcttccgtgctgaatgatcgctgggtatcggtgacctcaggaagtgaagattattcatttaagcatatgcgcaaaaatcagtatgaagaaagcttgtttagatgtgaagatgacatgtttgagctggacatgctgttggaatctgttactgttgcaattgagcgtgttgagaagttggtggaaaggatggaaggcaattcactgaaaccagacagctctatctccctcgatgaacatttgactagtttgaatatgaggtgcattgagcggctatatggtgaccatggacttgatgttattgatgttcttcgaaaaaatgttggtgtgacattaccagttattttaaccaggcttaaacaaaagcaggaggagtggtcaaggtgccagtcagattttaataaagtttgggctgaggtatattcaaaaaattatcacaagtctcttgaccatcgcagtttttatttcaaacaacaagacacaaagaatttgaacacaaaagctctattatctcagattaaagaaatcagtgagaagaataggaagggggatgatgtgttacttgctattgctgctgggaataggtggccactagttgccaacatgtcatttgtgtatttggatatggacattcatgaagatctttatcagatcatcaaatactcttgcggagaactatgcaattcttcagatcaagttaacaaagtgatgaggatctggacaacatttttagagcctctgttagggattcatcatagggctcatggcgctgaagatgcagatatggtaaaatcaaagaggcgaactagagaagttggtttggcatgtggcgggaaaacaaataatgctgcagcaaagggtggtaatggctctaaaagtgctggagctgagtctgtggctgaatttatgggtaggaatgaaacaattccgtctatgaagagcataaaacatgacaggataacatctttgtatggagtgggtgtacatccatttagtgcatattcggtgtcccacaacaatttaaggcctgaaacagaagagggtgaattatctcctaatggtgatttcaaagaggaacacttctgtgttttcgaagatgaagctgtagatggaacttctaaacaaaatgaaggttctaccagcagatctccccagggtagacctaagaattatctcaagttttcaggcaaggatcattcaggtgcagaaaatgaaggtaacaagagagcccagaggtctgcagaggatagtgaaaatgcatctgaggctgatgaagatatctctggcagtgaatctgctggtgatgaggagtcttctcatgaagatcaggaggaagaagaggatgatatggatcttgatacaaaggcaaaaaatgactgcagagcagaggtaaatagggaggcacagggtttggatggaggaacatcattgtcattttcagaatgtttgcaaagtacagttaaaccaatttccaagtatgtttccactgcattaccaaaccatgaaaagaaactttctcacatattttatggaaatgactcattttatgttctgttcaggctacatcagatcttttatgagagaatattgtcagctaagacaaactgttccacatcagacaataactggaaagcttcaaggcacataaattctccagatcaatattcaaggtttatcagtgcactatacaacttgcttgatggttcttctgaccacaccaaatttgaagatgactgccgctccatcattgggactcagtcatatgttctctttactatagataaactgatatacaaaattgtgaagcagcttcaagcattagcatctgatgaaatggacaaccagcttctccagctttatttatatgaaaagtcgaggtctcctgggagcttctttgatctggtttatcacgaaaatgcacgagcccttctacatgatgacaacatataccgttttgaatgtcattctgatcctacagaattaactattcagctcatggagtatgggaatgaaaaacctgagttgactgctgtctcatttgatccaaccttttcaccgtatctttataatggttatctgtcaagtattgatgataccaaattggttgatgacgtcttccttaggaggaataagcggaagcaagggaggaatgatgactcccctacttccttgaagatcatggacaatgtcatgtttgctaatggtcttgaatgcaagatatcttgcgaatcttcaaaagtctcttatgtcctcgatactgaggatgtcttatttcgtacgagaaagaggagaagctctatctagtggaaccatgcctgcgctgcaaagacaaattttgtgaaaattaacaccgtaaaatcgatagtttcatttatctcttcagaccgtatagggtcttgtggtagagttatgttaattacaatggcatgcactggtgggatcctcgtgttgttgatctgtcacttcactggaatatattggtgattctttgtgttttactcgctaccaattatatatgagcgtgtagcatgggcgagtcacggaggcagtgttccgtatgtgtttttgcagttcaacgcgctgggttcactgtgttgcgttatgacaggtggaccctaaaacttaaggagtagctaatgcaagagtggggcgaacaaggaactatgagtgtgtttggtttgagtaatgaagtgatccatattcttctcactcctcacttttttatttggtttgtg

SEQ ID NO: 214797 - DNA, 1509 bp, Zea Mays
atttgatggaggaggttgagcttctagtggatgctgcttctcgcctgaggtgaatttaactcaggaaagtcaacttttataaatgctttacttggaaggcagtatcttcaggagggagttgtgcctacgacaaatgagatcacactactatcatattctgaggttgaatctgaaaactttgaacgatgtgagaggcatccagatggtcaattcatgtgctatttatctgttccaattttaaaggaaatgaatctagttgatacacctggaacaaatgttattcttcagaggcagcaacgactcactgaagaatacgtgccacgagctgatttggtgctctttgtcctatcatcagatagaccattaactgaaagtgaggttggatttcttcagtatgtccagcagtggaagaagaaagttgtatttattctaaataaattggacctctatcggaacagcaatgagcttgaagaagctactgcatttgtcaaggaaaatgcaatgaaattgcttaccgcagaggatgtcacactgtttcctgtatcttcacgctctgctctggaagccaaactttcatattccaaaaacagtgatggaaagcattcaaccgaagctatgtataatgatcctagatggagaagcagcaaattttttgaacttgaggattacttactgagtttcttagatagttcaacggaaaatggaaaagaaagggtccggctgaaacttgaaacaccaataggcattgcagatcgattgttaacttcgtgtcaaaggctggtgaaactagaatatgaaaaggctgttgaagacttagcatccatcaaggatcttgtttatggtgcaaacaattatgccatcaaacttaagtctgatagcagttcctggcagaaccagatttcgtctctcattgagagagcaaaaggtcgagcagttacactcatggaatctacacttcagctgtcaaatattgaccttatttttgcatacacgatcaaaggaaaaacaggcagttccatgagagccacatcatttgttcagaatgatattctgagtccaacccttgatgatgctgtgaatttactaggtgactactcgacatggttgagttctagcaatacccgcgaagcaaatgtatatttggagtgtttctgtgaaagatgggatgcactggttgctccggaagaaagggctctgttagatccaaatgggcttgttaatgaaggggagaaactcaccataaaggcactggaaggcttcaatgccagtgctgccgccaaagattttgaagaggaaattcgagaattggtggtcaagcttcctgctgatagctttctagatgatgaactacttgtgccttgaaggaccggacttagtagaatccactgcatggtccaccttttgtaatttgaccttatgtggaacatttgaatatacacctttaggatttgtctggcaaacttattccctgtggatcggagtgttggagtggactgggatggattgacg

SEQ ID NO: 214798 - DNA, 1176 bp, Zea Mays
agatagtctaaatgtacatatggttagattgagagagcaaaaggtcgagcagttacactcatggaatctacacttcagctgtcaaatattgaccttatttttgcatacacgatcaaaggaaaaacaggcagttccatgagagccacatcatttgttcagaatgatattctgagtccaacccttgatgatgctgtgaatttactaggtgactactcgacatggttgagttctagcaatacccgcgaagcaaatgtatatttggagtgtttctgtgaaagatgggatgcactggttgctccggaagaaagggctctgttagatccaaatgggcttgttaatgaaggggagaaactcaccataaaggcactggaaggcttcaatgccagtgctgccgccaaagattttgaagaggaaattcgagaattggcttttggaacatttggagggctaggtattgctggactgtcagcttctctgttgacatctgttttgtcaactacccttgaagatcttcttgcccttgctctttgctcagctggcgggtaattcagtaattgataactgtgcatcgttctttagcaaatattttaacaatgaaatgggacggttgatgtgtaaccattttgatttgtccttcagtttttttgttttatcaagtttccctggtcggcggaagcatgcaatagacaagattaacaaggctgctgatgaactctctcgaaaagttgatgaagctatccaaaaggatatctcacagagtgctaataacctaatccgcttcgttgaggttatcagcaaaccttaccaggaagcatgtcagcgaaaaatagattggttacagggcgttcagggtgagctatctgctgtcgagcgtaagctccaaactttgaaagttgaaatccaaaatcttaatggatcataaggtttcatttcaacttgtttatttgcaattattttttggatactaatagtttttgttggtttatactgcgttgtgatgctattgagttgacgtagtgcctttcctgtatatgatgaagtctgaaagtgtaatatgtgttgtaaattcagaataagtgataaactatcacatgataattacacaccttgagaaccgagaaggatgttttgaaaacttgcctttttgataattttacaatatgatgtgggcaagaa

SEQ ID NO: 214799 - DNA, 4075 bp, Zea Mays
aggggatcctctgtttttaggactcggtgtggccgcacacaccgcacctcttcaaggccggccctgcatcgcagaggagggtactcaaacctcaagggcgacgaggaacgacgatcgccagtgtgcatccgttttcacgaggagaggccgtgtcgtatgggcggcggggacaaaggggccggcggcgtcgtgcttggcctgaagccctgaacggcgacggggacaaaggggccagcggcgtcgtgcttggccacgaaggcgaggcggcggctaggaagcctgaacaagccaatgttagaagagtgagggaaggtctacatgctaatatgccaaggccatcactgctctcaagaaaggagcatacttgctgaagtacggacgtagaggaaaaccaaagttttgtccatttaggttatccaatgatgaatctgtactgatatggttctcagggaaagaagagaaacatctaaggttgagccatatatccaagataattcctgggcaacggacttcaatttttcagaggtatccacggcctgagaaagaatgccagtctttttctctaatttcacatgataggtcattggatgtaatatgcaaagataaagatgaagctgaagtatggttcgctgggctgaaaacactgatttcacgttgtcaccaaagaaaatggagaactgaatctagaagtgatttgctttcctctggtgcaactagtccgaggacttacacacgacggagttctcctttgagttcacctttcagcagcaatgacagcatccacaaggatggcagtgacaattatcgactccgtactccatatggaagcccaccaaagaatggattggagaaggcattttctgatgtcatgctgtatgcagttcctccccgtggtttctttccatcagattctaatgctggatctgtccattctatgtcttctggacactcggataacacaaatgggcaccctagaggcgttccaatggatgctttccgagccagttattcaagtgcagttagttcatctagtcatggttctggtcatgacgatggtgatgctttaggcgatgtttttatatggggagaaggaaccggggaaggaattcttggtggtggtggttcaagagttggaagctcctcaggtgcaaaaatggactgccttgtaccaaaaccgttagaatttgccgtgcgacttgatgtgcagaacatatcttgtggaggaaggcatgctgcacttgttactaaacaaggcgagatatactcatggggtgaggaatcagggggacggcttggtcatggtgttgattgtgatgtgtctcagccaaaacttattgatgctctttctcatatgaacattgagcttgtagcatgtggtgaatatcacacttgtgctgttacactatctggagatctttacacatggggggatggcacatttaaatttgggcttttaggtcatggaaatgatatcagtcactgggtaccaaagcacgtgaatggaccattagagggcatacatgtttcatcaatttcatgtggaccttggcatacagccgtagtaacttccgctggacagcttttcacatttggtgatggatcttttggggttctgggccatggagatcgtgagagtatctcggtccccagggaagttgaatctctcaaagggctacgcacggtgcgggcagcttgtggtgtttggcacactgctgcagttgtagaagtcatggctgggaattcaagttctagcaattgttcttctggtaagatatttacatggggtgatggtgataaaggtcgcttaggtcatggtgacaagggaccaaaacttgtcccaacttgtgtggctgctttggtggagcccaatttttgtcaggttgcttgtgggcattgcttgacagtagccctaacaacttctgggcatgtgtatacaatgggcagtgctgtctatggtcaacttgggaatgcacaagctgatggtatgcttcctgtgcgtgttgaagggaagctacacaaaaactttgtggaggagatttcatgtggcgcttatcatgtggctgtattgacttctaagaccgaggtgtacacatggggaaaaggtgcaaatgggcggttaggtcatggcgatactgatgataagaatactcctacattggtcgaagcactgaaagataagcaagtcagaattgttgtttgtggaattaatttcactgcagcaatatgcattcacaaatgggtatctggagttgatcaatcgatgtgctcaggttgccgtcagccattcaacttgaggagaaaacgccataattgttacaactgtgctctagtattttgtcattcctgcagcagtaaaaaatccctgaaggcttcattagcacctaatacaaacaagccctaccgtgtctgcgatacctgctacagcaaactgacaaagggacttgagacggatatgcattcttcagcgaagcgagctgctactgtaccgggagtcagtgatgcaaatgaggaggatctggaaacaaggtcaaatgctcaactatcaaggttgtcttcaatggaatcttttaagcatttggatagcagatattccaagaaaaataagaagtttgaatttaatagcactcgtgtttcccctgtgcctaatggaagttcacattggagtggactaaacatttcaagatctttcaatcctgtatttggatcttcaaagaagttcttctcagcatcagttcctggatctagaattgtttctagggcaacatcaccgatttcaagaagagcaagccctccacgatctacaacaccaacacctactctgggtggtctaacatctccaagagttgttcccaatgatggcaagccaacaaatgatgcattaagccaagaggttctgaatttgaggtctcaggtggagagtcttgctaggaagtctcaactcctggaagtggagctggaaagaactaccaaacaactgaaggaagctatttctattgctggtgaggaaactgcaaagtgcaaggcagcaaaggaagtaatcaagtcactcactgcacaattgaaggggatggcagagagattacctggaggagcagccaagaacactaagttgccacctcttcctggaattttcattccaagtgacattccgtctatgcctacggagagtgagggcagcccaagcagctctggagaacaaatcataaatggtcataatggattgcttacttctaatggacaaagttctattaggaataaaacgagccatccagaagttggcaagaatggaggtaggctgcctgatgctgaatcttgccacgatgctgaatgggtagagcaagatgaaccaggtgtttacattactctcactgcgttgcctggaggcgccagagatctcaagcgggttcggttcagccggaagagattcagtgagacacaagcagaacagtggtggcaacagaaccgggcgagggtataccagcagtacaatgtccgcgtgattgacaaatcgaccgccagtgtcaacagtgacattgcggctaactgacactagattgacctggagaaacatacctgattacaagcggagctgaggccatgtaacctgaagggctctctcgtcagtcaagctgggttgctaacgtggctaccattttacctacccccctgagaagaggtggtttctgctcccaggaaaacaggaagttttttttatcttcagttttacataattctttactcttaccccgacccccccccctttttttttctcattgtgtgaaaagtagagtgcttgagcagaggtaatgtaaatgcttagtagaagcaggctaatctatcttgtaaatgcataagcaagcatcggttttagaatgccttgggaatcttccaatatgattgcaaatgcaaatggcaaatctgggccaagtattgatggtctctgaagtttgtagtagagcctgtatgcatataaatctgaagcaatcccgaggtcggaagtcgtacaagtgattaagtactccctctactgaaccaaatcataagatgttttagtaattctacgattgactttttt

SEQ ID NO: 214800 - DNA, 4264 bp, Zea Mays
cagcgttggatcagaaattaaagactgagattttacgtgtgcaccatgtgcaccgatcagtgatgtgcacaggatacgccgccgatcccctattcccctccctccacagcctcctctctttctctctcccgactcctcaacatcgcgacctctctcccctcccctgcccctgcccctcccacctccctgcaccgccaaacccctcgctcccgcctcctcctccgccgctctaagatctggtctctcgcggccctgcggcgcgccccgagctcgtcgcctcgcgcgcacgcgagcttccctgcccacccggacacgagccgacgagcgagccccccattgcggcgccccgtttcccccgcacgcggcggcagggcgcggagagcgagtccggcagtccgcgcgcgcctgttcgtgatggggcggtgctggcgccggggctgatgcggaggccgctgccatgtcggacgtctcgttggatctcggcggcatccgggcggggcccgtggagcgtgacatcgagcaggccatcactgctctcaagaaaggagcatacttgctgaagtacggacgtagaggaaaaccaaagttttgtccatttaggttatccaatgatgaatctgtactgatatggttctcagggaaagaagagaaacatctaaggttgagccatatatccaagataattcctgggcaacggacttcaatttttcagaggtatccacggcctgagaaagaatgccagtctttttctctaatttcacatgataggtcattggatgtaatatgcaaagataaagatgaagctgaagtatggttcgctgggctgaaaacactgatttcacgttgtcaccaaagaaaatggagaactgaatctagaagtgatttgctttcctctggtgcaactagtccgaggacttacacacgacggagttctcctttgagttcacctttcagcagcaatgacagcatccacaaggatggcagtgacaattatcgactccgtactccatatggaagcccaccaaagaatggattggagaaggcattttctgatgtcatgctgtatgcagttcctccccgtggtttctttccatcagattctaatgctggatctgtccattctatgtcttctggacactcggataacacaaatgggcaccctagaggcgttccaatggatgctttccgagccagttattcaagtgcagttagttcatctagtcatggttctggtcatgacgatggtgatgctttaggcgatgtttttatatggggagaaggaaccggggaaggaattcttggtggtggtggttcaagagttggaagctcctcaggtgcaaaaatggactgccttgtaccaaaaccgttagaatttgccgtgcgacttgatgtgcagaacatatcttgtggaggaaggcatgctgcacttgttactaaacaaggcgagatatactcatggggtgaggaatcagggggacggcttggtcatggtgttgattgtgatgtgtctcagccaaaacttattgatgctctttctcatatgaacattgagcttgtagcatgtggtgaatatcacacttgtgctgttacactatctggagatctttacacatggggggatggcacatttaaatttgggcttttaggtcatggaaatgatatcagtcactgggtaccaaagcacgtgaatggaccattagagggcatacatgtttcatcaatttcatgtggaccttggcatacagccgtagtaacttccgctggacagcttttcacatttggtgatggatcttttggggttctgggccatggagatcgtgagagtatctcggtccccagggaagttgaatctctcaaagggctacgcacggtgcgggcagcttgtggtgtttggcacactgctgcagttgtagaagtcatggctgggaattcaagttctagcaattgttcttctggtaagatatttacatggggtgatggtgataaaggtcgcttaggtcatggtgacaagggaccaaaacttgtcccaacttgtgtggctgctttggtggagcccaatttttgtcaggttgcttgtgggcattgcttgacagtagccctaacaacttctgggcatgtgtatacaatgggcagtgctgtctatggtcaacttgggaatgcacaagctgatggtatgcttcctgtgcgtgttgaagggaagctacacaaaaactttgtggaggagatttcatgtggcgcttatcatgtggctgtattgacttctaagaccgaggtgtacacatggggaaaaggtgcaaatgggcggttaggtcatggcgatactgatgataagaatactcctacattggtcgaagcactgaaagataagcaagtcagaattgttgtttgtggaattaatttcactgcagcaatatgcattcacaaatgggtatctggagttgatcaatcgatgtgctcaggttgccgtcagccattcaacttgaggagaaaacgccataattgttacaactgtgctctagtattttgtcattcctgcagcagtaaaaaatccctgaaggcttcattagcacctaatacaaacaagccctaccgtgtctgcgatacctgctacagcaaactgacaaagggacttgagacggatatgcattcttcagcgaagcgagctgctactgtaccgggagtcagtgatgcaaatgaggaggatctggaaacaaggtcaaatgctcaactatcaaggttgtcttcaatggaatcttttaagcatttggatagcagatattccaagaaaaataagaagtttgaatttaatagcactcgtgtttcccctgtgcctaatggaagttcacattggagtggactaaacatttcaagatctttcaatcctgtatttggatcttcaaagaagttcttctcagcatcagttcctggatctagaattgtttctagggcaacatcaccgatttcaagaagagcaagccctccacgatctacaacaccaacacctactctgggtggtctaacatctccaagagttgttcccaatgatggcaagccaacaaatgatgcattaagccaagaggttctgaatttgaggtctcaggtggagagtcttgctaggaagtctcaactcctggaagtggagctggaaagaactaccaaacaactgaaggaagctatttctattgctggtgaggaaactgcaaagtgcaaggcagcaaaggaagtaatcaagtcactcactgcacaattgaaggggatggcagagagattacctggaggagcagccaagaacactaagttgccacctcttcctggaattttcattccaagtgacattccgtctatgcctacggagagtgagggcagcccaagcagctctggagaacaaatcataaatggtcataatggattgcttacttctaatggacaaagttctattaggaataaaacgagccatccagaagttggcaagaatggaggtaggctgcctgatgctgaatcttgccacgatgctgaatgggtagagcaagatgaaccaggtgtttacattactctcactgcgttgcctggaggcgccagagatctcaagcgggttcggttcagccggaagagattcagtgagacacaagcagaacagtggtggcaacagaaccgggcgagggtataccagcagtacaatgtccgcgtgattgacaaatcgaccgccagtgtcaacagtgacattgcggctaactgacactagattgacctggagaaacatacctgattacaagcggagctgaggccatgtaacctgaagggctctctcgtcagtcaagctgggttgctaacgtggctaccattttacctacccccctgagaagaggtggtttctgctcccaggaaaacaggaagttttttttatcttcagttttacataattctttactcttaccccgacccccccccctttttttttctcattgtgtgaaaagtagagtgcttgagcagaggtaatgtaaatgcttagtagaagcaggctaatctatcttgtaaatgcataagcaagcatcggttttagaatgccttgggaatcttccaatatgattgcaaatgcaaatggcaaatctgggccaagtattgatggtctctgaagtttgtagtagagcctgtatgcatataaatctgaagcaatcccgaggtcggaagtcgtacaagtgattaagtactccctctactgaaccaaatcataagatgttttagtaattctacgattgactttttt

SEQ ID NO: 214801 - DNA, 4121 bp, Zea Mays
ccacagcctcctctctttctctctcccgactcctcaacatcgcgacctctctcccctcccctgcccctgcccctcccacctccctgcaccgccaaacccctcgctcccgcctcctcctccgccgctctaagatctggtctctcgcggccctgcggcgcgccccgagctcgtcgcctcgcgcgcacgcgagcttccctgcccacccggacacgagccgacgagcgagccccccattgcggcgccccgtttcccccgcacgcggcggcagggcgcggagagcgagtccggcagtccgcgcgcgcctgttcgtgatggggcggtgctggcgccggggctgatgcggaggccgctgccatgtcggacgtctcgttggatctcggcggcatccgggcggggcccgtggagcgtgacatcgagcaggccatcactgctctcaagaaaggagcatacttgctgaagtacggacgtagaggaaaaccaaagttttgtccatttaggttatccaatgatgaatctgtactgatatggttctcagggaaagaagagaaacatctaagtcaatttttcagaggtatccacggcctgagaaagaatgccagtctttttctctaatttcacatgataggtcattggatgtaatatgcaaagataaagatgaagctgaagtatggttcgctgggctgaaaacactgatttcacgttgtcaccaaagaaaatggagaactgaatctagaagtgatttgctttcctctggtgcaactagtccgaggacttacacacgacggagttctcctttgagttcacctttcagcagcaatgacagcatccacaaggatggcagtgacaattatcgactccgtactccatatggaagcccaccaaagaatggattggagaaggcattttctgatgtcatgctgtatgcagttcctccccgtggtttctttccatcagattctaatgctggatctgtccattctatgtcttctggacactcggataacacaaatgggcaccctagaggcgttccaatggatgctttccgagccagttattcaagtgcagttagttcatctagtcatggttctggtcatgacgatggtgatgctttaggcgatgtttttatatggggagaaggaaccggggaaggaattcttggtggtggtggttcaagagttggaagctcctcaggtgcaaaaatggactgccttgtaccaaaaccgttagaatttgccgtgcgacttgatgtgcagaacatatcttgtggaggaaggcatgctgcacttgttactaaacaaggcgagatatactcatggggtgaggaatcagggggacggcttggtcatggtgttgattgtgatgtgtctcagccaaaacttattgatgctctttctcatatgaacattgagcttgtagcatgtggtgaatatcacacttgtgctgttacactatctggagatctttacacatggggggatggcacatttaaatttgggcttttaggtcatggaaatgatatcagtcactgggtaccaaagcacgtgaatggaccattagagggcatacatgtttcatcaatttcatgtggaccttggcatacagccgtagtaacttccgctggacagcttttcacatttggtgatggatcttttggggttctgggccatggagatcgtgagagtatctcggtccccagggaagttgaatctctcaaagggctacgcacggtgcgggcagcttgtggtgtttggcacactgctgcagttgtagaagtcatggctgggaattcaagttctagcaattgttcttctggtaagatatttacatggggtgatggtgataaaggtcgcttaggtcatggtgacaagggaccaaaacttgtcccaacttgtgtggctgctttggtggagcccaatttttgtcaggttgcttgtgggcattgcttgacagtagccctaacaacttctgggcatgtgtatacaatgggcagtgctgtctatggtcaacttgggaatgcacaagctgatggtatgcttcctgtgcgtgttgaagggaagctacacaaaaactttgtggaggagatttcatgtggcgcttatcatgtggctgtattgacttctaagaccgaggtgtacacatggggaaaaggtgcaaatgggcggttaggtcatggcgatactgatgataagaatactcctacattggtcgaagcactgaaagataagcaagtcagaattgttgtttgtggaattaatttcactgcagcaatatgcattcacaaatgggtatctggagttgatcaatcgatgtgctcaggttgccgtcagccattcaacttgaggagaaaacgccataattgttacaactgtgctctagtattttgtcattcctgcagcagtaaaaaatccctgaaggcttcattagcacctaatacaaacaagccctaccgtgtctgcgatacctgctacagcaaactgacaaagggacttgagacggatatgcattcttcagcgaagcgagctgctactgtaccgggagtcagtgatgcaaatgaggaggatctggaaacaaggtcaaatgctcaactatcaaggttgtcttcaatggaatcttttaagcatttggatagcagatattccaagaaaaataagaagtttgaatttaatagcactcgtgtttcccctgtgcctaatggaagttcacattggagtggactaaacatttcaagatctttcaatcctgtatttggatcttcaaagaagttcttctcagcatcagttcctggatctagaattgtttctagggcaacatcaccgatttcaagaagagcaagccctccacgatctacaacaccaacacctactctgggtggtctaacatctccaagagttgttcccaatgatggcaagccaacaaatgatgcattaagccaagaggttctgaatttgaggtctcaggtggagagtcttgctaggaagtctcaactcctggaagtggagctggaaagaactaccaaacaactgaaggaagctatttctattgctggtgaggaaactgcaaagtgcaaggcagcaaaggaagtaatcaagtcactcactgcacaattgaaggggatggcagagagattacctggaggagcagccaagaacactaagttgccacctcttcctggaattttcattccaagtgacattccgtctatgcctacggagagtgagggcagcccaagcagctctggagaacaaatcataaatggtcataatggattgcttacttctaatggacaaagttctattaggaataaaacgagccatccagaagttggcaagaatggaggtaggctgcctgatgctgaatcttgccacgatgctgaatgggtagagcaagatgaaccaggtgtttacattactctcactgcgttgcctggaggcgccagagatctcaagcgggttcggttcagccggaagagattcagtgagacacaagcagaacagtggtggcaacagaaccgggcgagggtataccagcagtacaatgtccgcgtgattgacaaatcgaccgccagtgtcaacagtgacattgcggctaactgacactagattgacctggagaaacatacctgattacaagcggagctgaggccatgtaacctgaagggctctctcgtcagtcaagctgggttgctaacgtggctaccattttacctacccccctgagaagaggtggtttctgctcccaggaaaacaggaagttttttttatcttcagttttacataattctttactcttaccccgacccccccccctttttttttctcattgtgtgaaaagtagagtgcttgagcagaggtaatgtaaatgcttagtagaagcaggctaatctatcttgtaaatgcataagcaagcatcggttttagaatgccttgggaatcttccaatatgattgcaaatgcaaatggcaaatctgggccaagtattgatggtctctgaagtttgtagtagagcctgtatgcatataaatctgaagcaatcccgaggtcggaagtcgtacaagtgattaagtactccctctactgaaccaaatcataagatgttttagtaattctacgattgactttttt

SEQ ID NO: 214802 - DNA, 4275 bp, Zea Mays
atgaaattcatctgcctacgcccgccggtcgccagagcctggatccctgagggagaggcggagaagcagcagaccaggggctcagcttcatcatttcccaaaatccccaagctagtagacgaagagggtctcattggacgcttcggttcttcaaacaagaggaacatcaccatacttaagaatgtcaatggtatcctgaagccatccaggatgacgcttcttcttgggcctccatcctcagggaagagcacactaatgcgagcactcgctggcaaacttgacaaaaatctcaaggtctctggcagcattacgtattgtggccatccaatttcagaattctatcctgagaggactagcgcgtatgttggtcaatatgatctccacaatgccgagatgactgtaagggagacacttgatttctctaggcggtgcctaggcattggtgccagatatgagatgattacagaacttgctagaagggagcgggatgccggcattaagccagatcctgagattgatgctttcatgaaagctactgcagtacaaggacaggagactaatattataacagatctcactctcaaggtgcttgggctggacatttgtgctgatgttattattggtgatgagatgatcagaggaatttctggcgggcaaaagaaacgtgtgacaactggggagatgctaacagggccagcaacggctttatttatggacgaaatatccactggtttggatagctcgagcacatttcagattgtaaagtttatgaggcatttggtccatgtaatgaatgaaactgtcatgatctctctgctccagccaccgccagagacctacaatctttttgatgacataatcctgctatcagaaggatacatagtgtaccatgggccacgcgagaatatcctggaattctttgagtctgtcggtttccggtgccctgacaggaaaggtgtcgcagactttcttcaagaggttacttccaagaaagaccagcaacaatattggtatcttgatcaggagcaatatcattatgtatctgtacccgactttgcagaacgtttcaaatcattccatgcatgccaacagatgcagaaggagttgcaaataccttttgaaaagtccaaaacccatcctgctgcgttgaccaccaaaaaatatgggctttctagctgggaatcactcaaggcagtgatgtcaagggagcagctattgatgaagcgcaactctttcatctatattttcaaggtcacagtgttgatcatccttgcattcgtgtccatgactgtgtttctcagaacaaagatgccccatgggcaaattgctgatggcaccaaattctttggggccctgacttttggtttaataacgatcatgttcaatgggttcgctgagctacaattgaccataaagaagctaccagttttctacaaacatagggatttcttattcttccctgcatggacctttggagtggcaaacatactcttaaaagttcctatctcgctcgtggaatcagtagtatgggttgttctcacatactatgtgatgggctttgcacctgctgcaggaaggttctttcgtcagtttatagctttctttgccacacaccaaatggcaatggctttatttcggtttcttggtgctgttttgaaaacaatggttgtggccaatacttttgggatgtttgtgctgctcattattttcatttttggaggatttgtcatccgtagaaatgacattaaaccttggtggatctggggttattgggcatcacctatgatgtatagccaaaatgcaatatctatcaacgaattccttgctagtaggtgggctattccaaacaatgacacgactattgatgcaccaacagtaggcaaagcaattcttaaatccaaaggcttgtttactgaagaatggggattttggctttccattggagcccttataggattcattattttgttcaacagtctctacctttgggcccttacatatttaagtcctagtagtggctccaatgccctagtttcagaaggtgaagatgatgtaaatgaaatagcattgaaagaaagaagcagagatgcaagaagcgaagatgaaatatcccaagttgtatacggggatctaggtgcaaacacatgcactaatggagcaacaaacacactagttcagtcacgagtcactttgcctttccagcctctttcactttgctttaaccatgtaaactattacgtcgacatgcctgcggaaatgaaggaacaaggattcacagaaagccgtttacaactgctctctgatatcagtggtgcttttaggccaggggttctaacagcattagttggtgtgagtggagctggaaagaccactttaatggatgtcctggcaggaaggaaaactagtggagccattgaaggagatattaccctgtccggataccccaaaaaacaagaaacttttgcccggattagtggttattgtgaacaaaccgatatccattctccgaatgttactgtatttgaatccatcacgtactctgcatggttgcgtctttcctcggatattgatgatggtacgaaaaagatgtttgtggaggaagtgatggcccttgtagagcttgatgtgttgtgcgacgctcttgtgggtctccctggagttagtgggttatcaactgagcaaagaaaaaggctgacaattgctgtggagctggtagcaaacccttcgatcatcttcatggatgagccaacttctggtcttgatgctcgagctgctgcgattgtcatgcgtacagtaagaaatacggttaacactggacgtactgtggtctgcacaatccatcagccaagcatcgacatatttgagtcttttgatgagctactgcttttgaaacgtggaggtcaggttatttatgctggtgaacttggtcgccactctcacaaattagttgaatattttgaggcgattccaggtgttcaaaagatcacagaaggatataatcctgcaacatgggcgctggaagttagctctcctctatccgaggctcgattgaacatgaattttgctgaaatttatgctaactctgtgctttataggaaaaatcaagagctcatcaaggagttgagtgttccctcaccagactaccaggacctgtcattccctacaaaatattcgcagaatttctacaaccaatgcgccgcgaacttttggaagcaataccgttcctattggaagaatccgccctacaatgctatgcgctacctgatgacatttctcttcggccttgtatttggtacagtgttctggcaaaaaggaaagaacatagattcacagcaagatttatataatctactcggagccacttacgctgctaccttctttctgggggcttcaaatagcatcacggttcagcctgttgtatcaattgagcgagcagtgttctaccgtgagaaggcagcggggatgtactctccattatcctacgcatttgctcagacgtgcgtggaggtgatctacaccatcttacaggggatactgtacacagtcatcatatatgcgacgatcggatacgactggaaagcggataagttcttgtacttcctgtttttcatgaccgcgtgcttcaactacttcgggttgttcggcatgatgttggtagcgtgcactccctccgcattgctcgccaacattctcatcacgtttgctctgcctctttggaacctcttcgctggattcctcatcgttagaccggcaataccaatttggtggaggtggtactactgggcgaaccccgtgtcgtggaccatctacggcgttgttgcgtctcagttcggcgagaaccaaggcgagctttcagttcccggtgggaagcccgtggtggtgaagcagttcttgaaggataatctcggcatccagcatgacttactcggctatgtcgtgctagtccatttcgcctacatcattgcgttcttcttcgttttcggttattccatcaagttcttcaacttccagaaacgttagctgcacctctactctctgctgtctcacacggacggtcatttgtaatctactttctcgtacgtcgaagcaaatgcttgtttgggaagcctgtttgcaagtagccaagtactagtatattctcctctagcatgttccttcaatggaaaatgttaaaaaaagatgacgaatacataaagtgacatctttgtttagatatcggtgtcgtatctgttgtaccgtaataaaaaaattgttgggactgactgacacgtggtt

SEQ ID NO: 214803 - DNA, 1163 bp, Zea Mays
caacatatttgagtgttccctcaccagactaccaggacctgtcattccctacaaaatattcgcagaatttctacaaccaatgcgccgcgaacttttggaagcaataccgttcctattggaagaatccgccctacaatgctatgcgctacctgatgacatttctcttcggccttgtatttggtacagtgttctggcaaaaaggaaagaacatagattcacagcaagatttatataatctactcggagccacttacgctgctaccttctttctgggggcttcaaatagcatcacggttcagcctgttgtatcaattgagcgagcagtgttctaccgtgagaaggcagcggggatgtactctccattatcctacgcatttgctcagacgtgcgtggaggtgatctacaccatcttacaggggatactgtacacagtcatcatatatgcgacgatcggatacgactggaaagcggataagttcttgtacttcctgtttttcatgaccgcgtgcttcaactacttcgggttgttcggcatgatgttggtagcgtgcactccctccgcattgctcgccaacattctcatcacgtttgctctgcctctttggaacctcttcgctggattcctcatcgttagaccggcaataccaatttggtggaggtggtactactgggcgaaccccgtgtcgtggaccatctacggcgttgttgcgtctcagttcggcgagaaccaaggcgagctttcagttcccggtgggaagcccgtggtggtgaagcagttcttgaaggataatctcggcatccagcatgacttactcggctatgtcgtgctagtccatttcgcctacatcattgcgttcttcttcgttttcggttattccatcaagttcttcaacttccagaaacgttagctgcacctctactctctgctgtctcacacggacggtcatttgtaatctactttctcgtacgtcgaagcaaatgcttgtttgggaagcctgtttgcaagtagccaagtactagtatattctcctctagcatgttccttcaatggaaaatgttaaaaaaagatgacgaatacataaagtgacatctttgtttagatatcggtgtcgtatctgttgtaccgtaataaaaaaattgttgggactgactgacacgtggtt

SEQ ID NO: 214804 - DNA, 3172 bp, Zea Mays
gttgggctgggatgaaacggactcccaaacaggcccaacgctaaaaaaaccacccccagctccgttctcttccaagtggccagtgccgtctccggccaccgcccatggctatgccttcctccaccacggcggcgctctcccgcctcgtcgaccgcacccgggttccggaccccacactgcaacgccatgcggttggggccgtcttccgccacctcctctccctccccgcgcccctcccagcggccgcccacgacgccacctcagccctcctcgcttcgccccaccctgcagtcgccgcgcacgctgcggcctccatcgcccgtctcaccgccacccgccccgatctcctcccctcggatgtcgccctcccgctcctcatcgcgcccctcgcggcctcaccgtcccccctgctcgcctcctgcctcgtcaaggcagtctccgcgctcgcaacctgcgccctccgctccggctctcgcttcccggcccacgaccaccccttcatccaggcgctcgcgtcgggggctgacggcgctcgagcggagctgatgcggcaggcagccgggatggttgccgaccgggtggattgggtggtcaagtttctgaggccgttcgtgatgttctccgtggtgaggaagggggacgccgcatttgccagggatttgatcggtgcattggccgcagcagccgtggcagcagggaaggctagtgtcgcgatcccggttctgaagatgctccaagacagcatgctgcatttcggccgcggggacgatcaggaagtgcggctatggcttagttccgcagagtgtttggttgatgcttatgtcgtgctactgaggaagttagctcatggtcaaatgcctacatatgatgctcaagcaagtagtgcgacattgatggaaacactcctatcacaatattcatttcatcaaaaatttctgggaattgattcaacaatttttgggttatcaaaacatttattcttggtgcaaaaggatcttggattatgctatatacctgagatttctgttgtccttagctctctttcttactctctcactgggctagagtttgaacatgaacagctagctgccttgaaacttctgagctttttgattgattggaaatatgaaaatgtgcttgacagtaaagaacaaacacatcacgtcagtgtggagcttctctgtgttctggcagttatcaaccttaccatttcaccatccaaatctgtgaaagcagtggcatatcatgttctgtcaaggttcagcttgtttgttttagacttgccagcttctcattcatcagaggaacaagatatttcaacgagttaccacataagcaaacctgcacttcttcttcctaaacttttgcatcatctatggtccaagccatcttcatcatgcttcagttttatgaagtacatagctaccaaggcctcacctgattctggccagagtgacttggaagcaaattattggactcatcaaataaatgcctatctgacagcccttcacagagaaaagcatacattagatgtcaggtcttcaaaaacgacttcagtagccatatcatctctgataagctctgtagcatctgttttggtaatgcatccaaaacttggtacttctgcagcagaatctttggccatgcttggcacatcggacccaagattgggtatgccactttttgtagttatcctcttctacagcaagattctatgcagcagcggtaaattttcagcggaaatctcggcttctcttctctcctgctactgggttgaggcgctgaacacggccacctacgaggcctatgatcgatgtaaacaggttttgctgtgtctgatgatgaagtgtcgacctctgaaggtcctgctcctttcgagaccgagccccctggtgctggtgattgcgatggtcttgctggagatggtggagcacgaacatgggatcctgcaggtcccggagatgcttttgacaagtcattaccccccccccccccttagaccagcattggtaatagagggaggagtaacacacttctgtacaactggtccgggtgttgataatagatggtcatagggcaactgaccctgcacaaaaggtgttgctgcatcagttgacaccgaacaagaacttcaccatcttcgtcatgtctgtcattaccagaatctccaaaaactttctcagcaacattagcattagtagataaatcattagacaacaaaggatcagttgtattacaattgcccctgttgtcatagttagatgaaggtaaagagttgaaggcaacaaattgattttggcccttagtttagcattagcattatgatgaagttctacatgtattagggtgcagttctgtagaaggaaaaccttcttcatcaaagtcaacatcacgagaaatataaatgtgcgcaatggatacttctagacacttgtacccattatgcatgctgttacaacctaagaaaacacaacaaatgcactaacaagacaacttgcgagtattataagaatataaggacacaaatttggccagcctgcacatgcaaagatcttaaggaaagaataatcaggggtttgttgacacaactttttgaaaggagttgaataatcaagcaacttactaggtgcatgatttataagatatgcaacaacatgtaacatcccctccactcctgtattttgtcctcactcatgtagtcatgtgcactcgagaaaacttcctggtcggtcacccatcccacattgctccgagccaagcacgcttaacccagatgtttttttgagatatgctttcgaaaaagaagatgcaccttgctggtatgaatattctatcaatctattaagccttggaccaggatatcaccatcctccatggccaggatatcacatagcaacaaaagcttcatcctagaacttcagaggcaagatgcatgcacaagcaaaattaggccaacttcaactatataacgatgttttctctcagcaggaccattttgctgttttggtgaaaagcgagttcaaatgctgatactcgcctccccaattagttcggacaacaatgattttggtgttgaagcgacactcaaccatattatgaaactcaacaaaattttcaaagacttcagagttgaattcaagcatgttaatctagataaacttgctaaaatcat

SEQ ID NO: 214805 - DNA, 2585 bp, Zea Mays
cggactcccaaacaggcccaacgctaaaaaaaccacccccagctccgttctcttccaagtggccagtgccgtctccggccaccgcccatggctatgccttcctccaccacggcggcgctctcccgcctcgtcgaccgcacccgggttccggaccccacactgcaacgccatgcggttggggccgtcttccgccacctcctctccctccccgcgcccctcccagcggccgcccacgacgccacctcagccctcctcgcttcgccccaccctgcagtcgccgcgcacgctgcggcctccatcgcccgtctcaccgccacccgccccgatctcctcccctcggatgtcgccctcccgctcctcatcgcgcccctcgcggcctcaccgtcccccctgctcgcctcctgcctcgtcaaggcagtctccgcgctcgcaacctgcgccctccgctccggctctcgcttcccggcccacgaccaccccttcatccaggcgctcgcgtcgggggctgacggcgctcgagcggagctgatgcggcaggcagccgggatggttgccgaccgggtggattgggtggtcaagtttctgaggccgttcgtgatgttctccgtggtgaggaagggggacgccgcatttgccagggatttgatcggtgcattggccgcagcagccgtggcagcagggaaggctagtgtcgcgatcccggttctgaagatgctccaagacagcatgctgcatttcggccgcggggacgatcaggaagtgcggctatggcttagttccgcagagtgtttggttgatgcttatgtcgtgctactgaggaagttagctcatggtcaaatgcctacatatgatgctcaagcaagtagtgcgacattgatggaaacactcctatcacaatattcatttcatcaaaaatttctgggaattgattcaacaatttttgggttatcaaaacatttattcttggtgcaaaaggatcttggattatgctatatacctgagatttctgttgtccttagctctctttcttactctctcactgggctagagtttgaacatgaacagctagctgccttgaaacttctgagctttttgattgattggaaatatgaaaatggtacattcccaaatattcataatcacaagcgctctgtaaatttccaaatccaactgctggaggggctaggaacttggttctcttatttttctaatcttaagctactgtgttttgtttcataccaataatcttaagcatggaatgggtatcatctttctcttcactaaatttgatgagagttttggtttgctttgcatgtaatagtccacctggagaaggtttgcagcatacaaatcatttgggctgaataaaatcataatttttagagggatatctatctatattttcaatgcaaaccctgaccatatcattcatatatttgtcacttcatgtcttcatgtatgtgtttcttgtgggctggacaaaaatcaatgaaactcaaattaaactgggtgcacactgatatgatagatatgctagacaaaaatctcttcagagattaaatagcatacttgttagcagtaaatttttagatttttatgacaaacgttgaaacataccatgaccattaacatttggaaccaaaaggcatatttgaatacagaggaagtgatgtttagttcaatccttttataggatgtgcagtcaatctaaccttacttttgttaccattgacatggcatacaatgcctgtcaattattatcattgtaaagtttcatatatgtgtatggctgcagtgcttgacagtaaagaacaaacacatcacgtcagtgtggagcttctctgtgttctggcagttatcaaccttaccatttcaccatccaaatctgtgaaagcagtggcatatcatgttctgtcaaggttcagcttgtttgttttagacttgccagcttctcattcatcagaggaacaagatatttcaacgagttaccacataagcaaacctgcacttcttcttcctaaacttttgcatcatctatggtccaagccatcttcatcatgcttcagttttatgaagtacatagctaccaaggcctcacctgattctggccagagtgacttggaagcaaattattggactcatcaaataaatgcctatctgacagcccttcacagagaaaagcatacattagatgtcaggtcttcaaaaacgacttcagtagccatatcatctctgataagctctgtagcatctgttttggtaatgcatccaaaacttggtacttctgcagcagaatctttggccatgcttggcacatcggacccaagattgggtatgccactttttgtagttatcctcttctacagcaagattctatgcagcagcggtaaattttcagcggaaatctcgcaacacaaacatcgtcatatattgcaaaaagattagagtatatgtcatgtcttttggaagaaaacacggcaccaggtttaagctgttcttctttgttagcgtattttgtattctatcactgtaatgggccttggcccatgtacttggatatatattaatatatctcctacccaatt

SEQ ID NO: 214806 - DNA, 3206 bp, Zea Mays
gttgggctgggatgaaacggactcccaaacaggcccaacgctaaaaaaaccacccccagctccgttctcttccaagtggccagtgccgtctccggccaccgcccatggctatgccttcctccaccacggcggcgctctcccgcctcgtcgaccgcacccgggttccggaccccacactgcaacgccatgcggttggggccgtcttccgccacctcctctccctccccgcgcccctcccagcggccgcccacgacgccacctcagccctcctcgcttcgccccaccctgcagtcgccgcgcacgctgcggcctccatcgcccgtctcaccgccacccgccccgatctcctcccctcggatgtcgccctcccgctcctcatcgcgcccctcgcggcctcaccgtcccccctgctcgcctcctgcctcgtcaaggcagtctccgcgctcgcaacctgcgccctccgctccggctctcgcttcccggcccacgaccaccccttcatccaggcgctcgcgtcgggggctgacggcgctcgagcggagctgatgcggcaggcagccgggatggttgccgaccgggtggattgggtggtcaagtttctgaggccgttcgtgatgttctccgtggtgaggaagggggacgccgcatttgccagggatttgatcggtgcattggccgcagcagccgtggcagcagggaaggctagtgtcgcgatcccggttctgaagatgctccaagacagcatgctgcatttcggccgcggggacgatcaggaagtgcggctatggcttagttccgcagagtgtttggttgatgcttatgtcgtgctactgaggaagttagctcatggtcaaatgcctacatatgatgctcaagcaagtagtgcgacattgatggaaacactcctatcacaatattcatttcatcaaaaatttctgggaattgattcaacaatttttgggttatcaaaacatttattcttggtgcaaaaggatcttggattatgctatatacctgagatttctgttgtccttagctctctttcttactctctcactgggctagagtttgaacatgaacagctagctgccttgaaacttctgagctttttgattgattggaaatatgaaaatgtgcttgacagtaaagaacaaacacatcacgtcagtgtggagcttctctgtgttctggcagttatcaaccttaccatttcaccatccaaatctgtgaaagcagtggcatatcatgttctgtcaaggttcagcttgtttgttttagacttgccagcttctcattcatcagaggaacaagatatttcaacgagttaccacataagcaaacctgcacttcttcttcctaaacttttgcatcatctatggtccaagccatcttcatcatgcttcagttttatgaagtacatagctaccaaggcctcacctgattctggccagagtgacttggaagcaaattattggactcatcaaataaatgcctatctgacagcccttcacagagaaaagcatacattagatgtcaggtcttcaaaaacgacttcagtagccatatcatctctgataagctctgtagcatctgttttggtaatgcatccaaaacttggtacttctgcagcagaatctttggccatgcttggcacatcggacccaagattgggtatgccactttttgtagttatcctcttctacagcaagattctatgcagcagcggtaaattttcagcggaaatctcgctcagtttgctagagtcattgccatcacttgctatacatggttttgttcttccactagctctgcaatggatatcgccaatgcttaaaagggactcaaattcggttttgtatgctatggctgttcgattactctgcaagatatgggctgtaaccgactgggcatttccaaacttacaagtggttctggatcctgagaatttttccaatttcatctctgacagagagatctctgcaagtattgccacatcaatacgcgatgtttgcaagcaaaatccagatagaggcgttgatataatattatctgtctctttttgtattgagagtcgtgattctgtggttcaagctcttggcctcgagagcctctcgtacctttgtgaagcagatgtggtcgatttctacacggcgtggaaagttatatcaaagcaggtgcttgattattacgttgagcctgctgttgctcacagtttgtgtattctgttgaggtgcggagcgatggatgctgaggcatattctgtaatatctggtaaccttgtaagaacattgtggagaattggaacatccaagaaaaataatcccgatccactctgggataaagcaagaggaactgcttttcactccttgtccaactacaaggtatcacttattcaagatgctattcctgatttctggaaactaaactatgagttctttacgaacgaacataatctggcagttctcaaggccatggagcaccttcaagatgagatcatcagatatgagcacataaatcgtcgtcgagtgactactgacaaaagaactgcagtgcataaatttgagaagctactggaggtttttcctcgggcggtatttaaagggatgttatctcatcatcagttgcctggtgctgctcttttaactctcaattttactccaaaggacatacttaatgaagggaaacctaaggatttgcctagagttcattccgcttttgagcaagcttttgtggaaattgctgaatctatgtatgtgtcaagaaacatagtggtagctcttcttgccttgcagtcatggaagtcatttgtttccaactggatgcaagcagttgtggcattgcttgacactaaagactcgtcaaagttgaacaaagcaatgaaagctgctaatgatatatttaagattctgtgcgaccaagttccggtgtctactcctcaagttgttgttaacatagctcttgttattggggcactggccttgattgttccgccaactgctcatttggtagtatcttcggtatcagattttcttttaaaatggttgcttcaatacgagcatgagcacaagcaatggtcagcagctctctctcttggattaatattcaattgttttcatcctacggacaaaaagagcagacttcaggttattaatgggtttcttgagtgaaacaatgttcatgatgctggaaggtggagcaggaccagt

SEQ ID NO: 214807 - DNA, 5976 bp, Zea Mays
gttgggctgggatgaaacggactcccaaacaggcccaacgctaaaaaaaccacccccagctccgttctcttccaagtggccagtgccgtctccggccaccgcccatggctatgccttcctccaccacggcggcgctctcccgcctcgtcgaccgcacccgggttccggaccccacactgcaacgccatgcggttggggccgtcttccgccacctcctctccctccccgcgcccctcccagcggccgcccacgacgccacctcagccctcctcgcttcgccccaccctgcagtcgccgcgcacgctgcggcctccatcgcccgtctcaccgccacccgccccgatctcctcccctcggatgtcgccctcccgctcctcatcgcgcccctcgcggcctcaccgtcccccctgctcgcctcctgcctcgtcaaggcagtctccgcgctcgcaacctgcgccctccgctccggctctcgcttcccggcccacgaccaccccttcatccaggcgctcgcgtcgggggctgacggcgctcgagcggagctgatgcggcaggcagccgggatggttgccgaccgggtggattgggtggtcaagtttctgaggccgttcgtgatgttctccgtggtgaggaagggggacgccgcatttgccagggatttgatcggtgcattggccgcagcagccgtggcagcagggaaggctagtgtcgcgatcccggttctgaagatgctccaagacagcatgctgcatttcggccgcggggacgatcaggaagtgcggctatggcttagttccgcagagtgtttggttgatgcttatgtcgtgctactgaggaagttagctcatggtcaaatgcctacatatgatgctcaagcaagtagtgcgacattgatggaaacactcctatcacaatattcatttcatcaaaaatttctgggaattgattcaacaatttttgggttatcaaaacatttattcttggtgcaaaaggatcttggattatgctatatacctgagatttctgttgtccttagctctctttcttactctctcactgggctagagtttgaacatgaacagctagctgccttgaaacttctgagctttttgattgattggaaatatgaaaatgtgcttgacagtaaagaacaaacacatcacgtcagtgtggagcttctctgtgttctggcagttatcaaccttaccatttcaccatccaaatctgtgaaagcagtggcatatcatgttctgtcaaggttcagcttgtttgttttagacttgccagcttctcattcatcagaggaacaagatatttcaacgagttaccacataagcaaacctgcacttcttcttcctaaacttttgcatcatctatggtccaagccatcttcatcatgcttcagttttatgaagtacatagctaccaaggcctcacctgattctggccagagtgacttggaagcaaattattggactcatcaaataaatgcctatctgacagcccttcacagagaaaagcatacattagatgtcaggtcttcaaaaacgacttcagtagccatatcatctctgataagctctgtagcatctgttttggtaatgcatccaaaacttggtacttctgcagcagaatctttggccatgcttggcacatcggacccaagattgggtatgccactttttgtagttatcctcttctacagcaagattctatgcagcagcggtaaattttcagcggaaatctcgctcagtttgctagagtcattgccatcacttgctatacatggttttgttcttccactagctctgcaatggatatcgccaatgcttaaaagggactcaaattcggttttgtatgctatggctgttcgattactctgcaagatatgggctgtaaccgactgggcatttccaaacttacaagtggttctggatcctgagaatttttccaatttcatctctgacagagagatctctgcaagtattgccacatcaatacgcgatgtttgcaagcaaaatccagatagaggcgttgatataatattatctgtctctttttgtattgagagtcgtgattctgtggttcaagctcttggcctcgagagcctctcgtacctttgtgaagcagatgtggtcgatttctacacggcgtggaaagttatatcaaagcaggtgcttgattattacgttgagcctgctgttgctcacagtttgtgtattctgttgaggtgcggagcgatggatgctgaggcatattctgtaatatctggtaaccttgtaagaacattgtggagaattggaacatccaagaaaaataatcccgatccactctgggataaagcaagaggaactgcttttcactccttgtccaactacaaggtatcacttattcaagatgctattcctgatttctggaaactaaactatgagttctttacgaacgaacataatctggcagttctcaaggccatggagcaccttcaagatgagatcatcagatatgagcacataaatcgtcgtcgagtgactactgacaaaagaactgcagtgcataaatttgagaagctactggaggtttttcctcgggcggtatttaaagggatgttatctcatcatcagttgcctggtgctgctcttttaactctcaattttactccaaaggacatacttaatgaagggaaacctaaggatttgcctagagttcattccgcttttgagcaagcttttgtggaaattgctgaatctatgtatgtgtcaagaaacatagtggtagctcttcttgccttgcagtcatggaagtcatttgtttccaactggatgcaagcagttgtggcattgcttgacactaaagactcgtcaaagttgaacaaagcaatgaaagctgctaatgatatatttaagattctgtgcgaccaagttccggtgtctactcctcaagttgttgttaacatagctcttgttattggggcactggccttgattgttccgccaactgctcatttggtagtatcttcggtatcagattttcttttaaaatggttgcttcaatacgagcatgagcacaagcaatggtcagcagctctctctcttggattaatattcaattgttttcatcctacggacaaaaagagcagacttcaggttattaatgggtttcttgaggttatctcaaaaactgaaagctgtcttgtaaaaggagcttgtggactggcattaggctatgtttgccacggtcttttgacaagagcacataatgctgttgattcagaagtagaggctattacacaactcaatgagcgtgcatcagttgaggatattcttcatgctttggttaccttgttaattcaactatgtccatcctcatgctattctctgaagaagcttagtatatacggaatatcctccatgggagggatggaagaaaatattcatagcttcagtgatgatccttgggctgtcgctggacttgtcattggtctgggaaactctgttgttgctctgtatagacttggagcttatgaagcagttactgaagtcaaggatgtattgatatcatggataccaaatgttgattcgaactctgcattatttgatgaaatagattcagtatcactatgtatgggttcatgtcttgctcttccatctgttgtggctttttgccaaagagtggagctgttgaatgacgacttggatgcattgttcaatcgctacacttctttagcttctgagctcctgaacctcaataaatctgggattatctttcagaatttgttaatggcaatctgtattggtgctggatcttttctctcttctatattgaatgatggcgtgcatgctatggaatttaatggtgttaaaggctttctggacactctcagacatatatatacccacccttttcctccccttgttcatttgggaggcatgtttggtgtggtcaacgcttttggtgcaggtgcaggagatcttactggggtgttttcaaagcctatgacttctcaaatcaaacatgaggagtcatcttttgtgagtggttcattactgacaagtcctgttggtgagactctgtcaacatcaatgattcaggaaatatttcttcttgctaaggatgctaaggataagcacatacaagattatgctgcatgggctatttcatttctcagaagcaggtggtcgaagaatcagaatcagattctttatgaggacaatggttctaatagaagtcctgatgatcatgatcaagcttcaagtttttctgaacaaagcttagtttggaacttaagtctctggttgagtgatctaaaatttgaaaagtctggtgatgtggtgccaataagtacagttggaacagttttaaaatgcctttccaaagctccccgattgccaactacagactggggagctattgtacggaggtgcattaaagctgaggcgcagatttctcataagttaaccaatcaggaagatcctaagatactaaaggaggcatgcttatatttgactctagctcatgctgctcacataagtccccttctgcagtttttggatgatctgactgacatactcagattccagagattagatataaatgttcagtctattttgctcaaacatttgttacacctaatgaagctattctctgattcaagattggataaattgcatgaggattttaccgaatacttgtattcccccacttcttcatacttgaattactcatctgaacagaaaagcatgctaagaatgtcgttctgggaaggcatttatacgtgcctggtggatgtttctgaagaatctggtgttttttcattcattgaaaaatgcattcagtgcttgttgcctcttttgacgctccatagtgatggtcaacctgaattcatgaaagagtggtctgttgctatcttatgtcttacaaacgcccagaaaaaatggctggatgatattttgcagattcgcagtactgccttagtcaatgaaggacatgttgatgttgcaaaaaagattatcctcagagcaagattgtgtgcaactggttgtggttcaacacatgagctgggaaatataaagacagcaatattgtgtacaaaagctgatggtgtttggtggagtgtccttgttgagatcacttcagccttaaactcagccgaaaacatcatcaaaagacagtggcttctggatgcattagacattggctgtgttacagctcacccctcaacggtgctgtgttttgttggcttgctttgtggtagctgctgcatctatatgccgcttcttcttgttaattcgataaatgtactgagcgacttgccggtcaccctgcctgcctttctctccaccatcgtttctgatgatttcaggaactctgtggcagacaggctatggctgttgactactgacatctatacttgggctgaacaattagctcacggacacgatcaacctggacatgatcgtattcatagaagtgaaactgagattgcgacttttttggccaatattctgctctctacatgcattacagtcgaggactacctgtctgttgataagcggctaaagcttgcaaatcttgaagcactctaatcaaagggagatgtgtttcttttctattttatgtatgtatttatgtacggtatcagtcatgttttaatagttgatgtccctgctgatgatccagcaatgtttttttcatgtacataattaatttaactaactcatcttatgcactgaaaacaatctattgttcaaagatagatagacctatgaaataatattgttgtgtacactcactttgtcataccgccactgaacaatttaagagcagtcaccttacaatttgatgggagtaaacttctgaggtattaacagagattatctgagaccatagctgagatgtaaaagctcccatgcaagtttacttggattatgccataactgtaaatgagtctaatcgcaattacatttgccttgagctcag

SEQ ID NO: 214808 - DNA, 5953 bp, Zea Mays
gttgggctgggatgaaacggactcccaaacaggcccaacgctaaaaaaaccacccccagctccgttctcttccaagtggccagtgccgtctccggccaccgcccatggctatgccttcctccaccacggcggcgctctcccgcctcgtcgaccgcacccgggttccggaccccacactgcaacgccatgcggttggggccgtcttccgccacctcctctccctccccgcgcccctcccagcggccgcccacgacgccacctcagccctcctcgcttcgccccaccctgcagtcgccgcgcacgctgcggcctccatcgcccgtctcaccgccacccgccccgatctcctcccctcggatgtcgccctcccgctcctcatcgcgcccctcgcggcctcaccgtcccccctgctcgcctcctgcctcgtcaaggcagtctccgcgctcgcaacctgcgccctccgctccggctctcgcttcccggcccacgaccaccccttcatccaggcgctcgcgtcgggggctgacggcgctcgagcggagctgatgcggcaggcagccgggatggttgccgaccgggtggattgggtggtcaagtttctgaggccgttcgtgatgttctccgtggtgaggaagggggacgccgcatttgccagggatttgatcggtgcattggccgcagcagccgtggcagcagggaaggctagtgtcgcgatcccggttctgaagatgctccaagacagcatgctgcatttcggccgcggggacgatcaggaagtgcggctatggcttagttccgcagagtgtttggttgatgcttatgtcgtgctactgaggaagttagctcatggtcaaatgcctacatatgatgctcaagcaagtagtgcgacattgatggaaacactcctatcacaatattcatttcatcaaaaatttctgggaattgattcaacaatttttgggttatcaaaacatttattcttggtgcaaaaggatcttggattatgctatatacctgagatttctgttgtccttagctctctttcttactctctcactgggctagagtttgaacatgaacagctagctgccttgaaacttctgagctttttgattgattggaaatatgaaaatgtgcttgacagtaaagaacaaacacatcacgtcagtgtggagcttctctgtgttctggcagttatcaaccttaccatttcaccatccaaatctgtgaaagcagtggcatatcatgttctgtcaaggttcagcttgtttgttttagacttgccagcttctcattcatcagaggaacaagatatttcaacgagttaccacataagcaaacctgcacttcttcttcctaaacttttgcatcatctatggtccaagccatcttcatcatgcttcagttttatgaagtacatagctaccaaggcctcacctgattctggccagagtgacttggaagcaaattattggactcatcaaataaatgcctatctgacagcccttcacagagaaaagcatacattagatgtcaggtcttcaaaaacgacttcagtagccatatcatctctgataagctctgtagcatctgttttggtaatgcatccaaaacttggtacttctgcagcagaatctttggccatgcttggcacatcggacccaagattgggtatgccactttttgtagttatcctcttctacagcaagattctatgcagcagcgctcagtttgctagagtcattgccatcacttgctatacatggttttgttcttccactagctctgcaatggatatcgccaatgcttaaaagggactcaaattcggttttgtatgctatggctgttcgattactctgcaagatatgggctgtaaccgactgggcatttccaaacttacaagtggttctggatcctgagaatttttccaatttcatctctgacagagagatctctgcaagtattgccacatcaatacgcgatgtttgcaagcaaaatccagatagaggcgttgatataatattatctgtctctttttgtattgagagtcgtgattctgtggttcaagctcttggcctcgagagcctctcgtacctttgtgaagcagatgtggtcgatttctacacggcgtggaaagttatatcaaagcaggtgcttgattattacgttgagcctgctgttgctcacagtttgtgtattctgttgaggtgcggagcgatggatgctgaggcatattctgtaatatctggtaaccttgtaagaacattgtggagaattggaacatccaagaaaaataatcccgatccactctgggataaagcaagaggaactgcttttcactccttgtccaactacaaggtatcacttattcaagatgctattcctgatttctggaaactaaactatgagttctttacgaacgaacataatctggcagttctcaaggccatggagcaccttcaagatgagatcatcagatatgagcacataaatcgtcgtcgagtgactactgacaaaagaactgcagtgcataaatttgagaagctactggaggtttttcctcgggcggtatttaaagggatgttatctcatcatcagttgcctggtgctgctcttttaactctcaattttactccaaaggacatacttaatgaagggaaacctaaggatttgcctagagttcattccgcttttgagcaagcttttgtggaaattgctgaatctatgtatgtgtcaagaaacatagtggtagctcttcttgccttgcagtcatggaagtcatttgtttccaactggatgcaagcagttgtggcattgcttgacactaaagactcgtcaaagttgaacaaagcaatgaaagctgctaatgatatatttaagattctgtgcgaccaagttccggtgtctactcctcaagttgttgttaacatagctcttgttattggggcactggccttgattgttccgccaactgctcatttggtagtatcttcggtatcagattttcttttaaaatggttgcttcaatacgagcatgagcacaagcaatggtcagcagctctctctcttggattaatattcaattgttttcatcctacggacaaaaagagcagacttcaggttattaatgggtttcttgaggttatctcaaaaactgaaagctgtcttgtaaaaggagcttgtggactggcattaggctatgtttgccacggtcttttgacaagagcacataatgctgttgattcagaagtagaggctattacacaactcaatgagcgtgcatcagttgaggatattcttcatgctttggttaccttgttaattcaactatgtccatcctcatgctattctctgaagaagcttagtatatacggaatatcctccatgggagggatggaagaaaatattcatagcttcagtgatgatccttgggctgtcgctggacttgtcattggtctgggaaactctgttgttgctctgtatagacttggagcttatgaagcagttactgaagtcaaggatgtattgatatcatggataccaaatgttgattcgaactctgcattatttgatgaaatagattcagtatcactatgtatgggttcatgtcttgctcttccatctgttgtggctttttgccaaagagtggagctgttgaatgacgacttggatgcattgttcaatcgctacacttctttagcttctgagctcctgaacctcaataaatctgggattatctttcagaatttgttaatggcaatctgtattggtgctggatcttttctctcttctatattgaatgatggcgtgcatgctatggaatttaatggtgttaaaggctttctggacactctcagacatatatatacccacccttttcctccccttgttcatttgggaggcatgtttggtgtggtcaacgcttttggtgcaggtgcaggagatcttactggggtgttttcaaagcctatgacttctcaaatcaaacatgaggagtcatcttttgtgagtggttcattactgacaagtcctgttggtgagactctgtcaacatcaatgattcaggaaatatttcttcttgctaaggatgctaaggataagcacatacaagattatgctgcatgggctatttcatttctcagaagcaggtggtcgaagaatcagaatcagattctttatgaggacaatggttctaatagaagtcctgatgatcatgatcaagcttcaagtttttctgaacaaagcttagtttggaacttaagtctctggttgagtgatctaaaatttgaaaagtctggtgatgtggtgccaataagtacagttggaacagttttaaaatgcctttccaaagctccccgattgccaactacagactggggagctattgtacggaggtgcattaaagctgaggcgcagatttctcataagttaaccaatcaggaagatcctaagatactaaaggaggcatgcttatatttgactctagctcatgctgctcacataagtccccttctgcagtttttggatgatctgactgacatactcagattccagagattagatataaatgttcagtctattttgctcaaacatttgttacacctaatgaagctattctctgattcaagattggataaattgcatgaggattttaccgaatacttgtattcccccacttcttcatacttgaattactcatctgaacagaaaagcatgctaagaatgtcgttctgggaaggcatttatacgtgcctggtggatgtttctgaagaatctggtgttttttcattcattgaaaaatgcattcagtgcttgttgcctcttttgacgctccatagtgatggtcaacctgaattcatgaaagagtggtctgttgctatcttatgtcttacaaacgcccagaaaaaatggctggatgatattttgcagattcgcagtactgccttagtcaatgaaggacatgttgatgttgcaaaaaagattatcctcagagcaagattgtgtgcaactggttgtggttcaacacatgagctgggaaatataaagacagcaatattgtgtacaaaagctgatggtgtttggtggagtgtccttgttgagatcacttcagccttaaactcagccgaaaacatcatcaaaagacagtggcttctggatgcattagacattggctgtgttacagctcacccctcaacggtgctgtgttttgttggcttgctttgtggtagctgctgcatctatatgccgcttcttcttgttaattcgataaatgtactgagcgacttgccggtcaccctgcctgcctttctctccaccatcgtttctgatgatttcaggaactctgtggcagacaggctatggctgttgactactgacatctatacttgggctgaacaattagctcacggacacgatcaacctggacatgatcgtattcatagaagtgaaactgagattgcgacttttttggccaatattctgctctctacatgcattacagtcgaggactacctgtctgttgataagcggctaaagcttgcaaatcttgaagcactctaatcaaagggagatgtgtttcttttctattttatgtatgtatttatgtacggtatcagtcatgttttaatagttgatgtccctgctgatgatccagcaatgtttttttcatgtacataattaatttaactaactcatcttatgcactgaaaacaatctattgttcaaagatagatagacctatgaaataatattgttgtgtacactcactttgtcataccgccactgaacaatttaagagcagtcaccttacaatttgatgggagtaaacttctgaggtattaacagagattatctgagaccatagctgagatgtaaaagctcccatgcaagtttacttggattatgccataactgtaaatgagtctaatcgcaattacatttgccttgagctcag

SEQ ID NO: 214809 - DNA, 5980 bp, Zea Mays
gttgggctgggatgaaacggactcccaaacaggcccaacgctaaaaaaaccacccccagctccgttctcttccaagtggccagtgccgtctccggccaccgcccatggctatgccttcctccaccacggcggcgctctcccgcctcgtcgaccgcacccgggttccggaccccacactgcaacgccatgcggttggggccgtcttccgccacctcctctccctccccgcgcccctcccagcggccgcccacgacgccacctcagccctcctcgcttcgccccaccctgcagtcgccgcgcacgctgcggcctccatcgcccgtctcaccgccacccgccccgatctcctcccctcggatgtcgccctcccgctcctcatcgcgcccctcgcggcctcaccgtcccccctgctcgcctcctgcctcgtcaaggcagtctccgcgctcgcaacctgcgccctccgctccggctctcgcttcccggcccacgaccaccccttcatccaggcgctcgcgtcgggggctgacggcgctcgagcggagctgatgcggcaggcagccgggatggttgccgaccgggtggattgggtggtcaagtttctgaggccgttcgtgatgttctccgtggtgaggaagggggacgccgcatttgccagggatttgatcggtgcattggccgcagcagccgtggcagcagggaaggctagtgtcgcgatcccggttctgaagatgctccaagacagcatgctgcatttcggccgcggggacgatcaggaagtgcggctatggcttagttccgcagagtgtttggttgatgcttatgtcgtgctactgaggaagttagctcatggtcaaatgcctacatatgatgctcaagcaagtagtgcgacattgatggaaacactcctatcacaatattcatttcatcaaaaatttctgggaattgattcaacaatttttgggttatcaaaacatttattcttggtgcaaaaggatcttggattatgctatatacctgagatttctgttgtccttagctctctttcttactctctcactgggctagagtttgaacatgaacagctagctgccttgaaacttctgagctttttgattgattggaaatatgaaaatgtgcttgacagtaaagaacaaacacatcacgtcagtgtggagcttctctgtgttctggcagttatcaaccttaccatttcaccatccaaatctgtgaaagcagtggcatatcatgttctgtcaaggttcagcttgtttgttttagacttgccagcttctcattcatcagaggaacaagatatttcaacgagttaccacataagcaaacctgcacttcttcttcctaaacttttgcatcatctatggtccaagccatcttcatcatgcttcagttttatgaagtacatagctaccaaggcctcacctgattctggccagagtgacttggaagcaaattattggactcatcaaataaatgcctatctgacagcccttcacagagaaaagcatacattagatgtcaggtcttcaaaaacgacttcagccatatcatctctgataagctctgtagcatctgttttggtaatgcatccaaaacttggtacttctgcagcagaatctttggccatgcttggcacatcggacccaagattgggtatgccactttttgtagttatcctcttctacagcaagattctatgcagcagcggtaaattttcagcggaaatctcgctcagtttgctagagtcattgccatcacttgctatacatggttttgttcttccactagctctgcaatggatatcgccaatgcttaaaagggactcaaattcggttttgtatgctatggctgttcgattactctgcaagatatgggctgtaaccgactgggcatttccaaacttacaagtaagaagtggttctggatcctgagaatttttccaatttcatctctgacagagagatctctgcaagtattgccacatcaatacgcgatgtttgcaagcaaaatccagatagaggcgttgatataatattatctgtctctttttgtattgagagtcgtgattctgtggttcaagctcttggcctcgagagcctctcgtacctttgtgaagcagatgtggtcgatttctacacggcgtggaaagttatatcaaagcaggtgcttgattattacgttgagcctgctgttgctcacagtttgtgtattctgttgaggtgcggagcgatggatgctgaggcatattctgtaatatctggtaaccttgtaagaacattgtggagaattggaacatccaagaaaaataatcccgatccactctgggataaagcaagaggaactgcttttcactccttgtccaactacaaggtatcacttattcaagatgctattcctgatttctggaaactaaactatgagttctttacgaacgaacataatctggcagttctcaaggccatggagcaccttcaagatgagatcatcagatatgagcacataaatcgtcgtcgagtgactactgacaaaagaactgcagtgcataaatttgagaagctactggaggtttttcctcgggcggtatttaaagggatgttatctcatcatcagttgcctggtgctgctcttttaactctcaattttactccaaaggacatacttaatgaagggaaacctaaggatttgcctagagttcattccgcttttgagcaagcttttgtggaaattgctgaatctatgtatgtgtcaagaaacatagtggtagctcttcttgccttgcagtcatggaagtcatttgtttccaactggatgcaagcagttgtggcattgcttgacactaaagactcgtcaaagttgaacaaagcaatgaaagctgctaatgatatatttaagattctgtgcgaccaagttccggtgtctactcctcaagttgttgttaacatagctcttgttattggggcactggccttgattgttccgccaactgctcatttggtagtatcttcggtatcagattttcttttaaaatggttgcttcaatacgagcatgagcacaagcaatggtcagcagctctctctcttggattaatattcaattgttttcatcctacggacaaaaagagcagacttcaggttattaatgggtttcttgaggttatctcaaaaactgaaagctgtcttgtaaaaggagcttgtggactggcattaggctatgtttgccacggtcttttgacaagagcacataatgctgttgattcagaagtagaggctattacacaactcaatgagcgtgcatcagttgaggatattcttcatgctttggttaccttgttaattcaactatgtccatcctcatgctattctctgaagaagcttagtatatacggaatatcctccatgggagggatggaagaaaatattcatagcttcagtgatgatccttgggctgtcgctggacttgtcattggtctgggaaactctgttgttgctctgtatagacttggagcttatgaagcagttactgaagtcaaggatgtattgatatcatggataccaaatgttgattcgaactctgcattatttgatgaaatagattcagtatcactatgtatgggttcatgtcttgctcttccatctgttgtggctttttgccaaagagtggagctgttgaatgacgacttggatgcattgttcaatcgctacacttctttagcttctgagctcctgaacctcaataaatctgggattatctttcagaatttgttaatggcaatctgtattggtgctggatcttttctctcttctatattgaatgatggcgtgcatgctatggaatttaatggtgttaaaggctttctggacactctcagacatatatatacccacccttttcctccccttgttcatttgggaggcatgtttggtgtggtcaacgcttttggtgcaggtgcaggagatcttactggggtgttttcaaagcctatgacttctcaaatcaaacatgaggagtcatcttttgtgagtggttcattactgacaagtcctgttggtgagactctgtcaacatcaatgattcaggaaatatttcttcttgctaaggatgctaaggataagcacatacaagattatgctgcatgggctatttcatttctcagaagcaggtggtcgaagaatcagaatcagattctttatgaggacaatggttctaatagaagtcctgatgatcatgatcaagcttcaagtttttctgaacaaagcttagtttggaacttaagtctctggttgagtgatctaaaatttgaaaagtctggtgatgtggtgccaataagtacagttggaacagttttaaaatgcctttccaaagctccccgattgccaactacagactggggagctattgtacggaggtgcattaaagctgaggcgcagatttctcataagttaaccaatcaggaagatcctaagatactaaaggaggcatgcttatatttgactctagctcatgctgctcacataagtccccttctgcagtttttggatgatctgactgacatactcagattccagagattagatataaatgttcagtctattttgctcaaacatttgttacacctaatgaagctattctctgattcaagattggataaattgcatgaggattttaccgaatacttgtattcccccacttcttcatacttgaattactcatctgaacagaaaagcatgctaagaatgtcgttctgggaaggcatttatacgtgcctggtggatgtttctgaagaatctggtgttttttcattcattgaaaaatgcattcagtgcttgttgcctcttttgacgctccatagtgatggtcaacctgaattcatgaaagagtggtctgttgctatcttatgtcttacaaacgcccagaaaaaatggctggatgatattttgcagattcgcagtactgccttagtcaatgaaggacatgttgatgttgcaaaaaagattatcctcagagcaagattgtgtgcaactggttgtggttcaacacatgagctgggaaatataaagacagcaatattgtgtacaaaagctgatggtgtttggtggagtgtccttgttgagatcacttcagccttaaactcagccgaaaacatcatcaaaagacagtggcttctggatgcattagacattggctgtgttacagctcacccctcaacggtgctgtgttttgttggcttgctttgtggtagctgctgcatctatatgccgcttcttcttgttaattcgataaatgtactgagcgacttgccggtcaccctgcctgcctttctctccaccatcgtttctgatgatttcaggaactctgtggcagacaggctatggctgttgactactgacatctatacttgggctgaacaattagctcacggacacgatcaacctggacatgatcgtattcatagaagtgaaactgagattgcgacttttttggccaatattctgctctctacatgcattacagtcgaggactacctgtctgttgataagcggctaaagcttgcaaatcttgaagcactctaatcaaagggagatgtgtttcttttctattttatgtatgtatttatgtacggtatcagtcatgttttaatagttgatgtccctgctgatgatccagcaatgtttttttcatgtacataattaatttaactaactcatcttatgcactgaaaacaatctattgttcaaagatagatagacctatgaaataatattgttgtgtacactcactttgtcataccgccactgaacaatttaagagcagtcaccttacaatttgatgggagtaaacttctgaggtattaacagagattatctgagaccatagctgagatgtaaaagctcccatgcaagtttacttggattatgccataactgtaaatgagtctaatcgcaattacatttgccttgagctcag

SEQ ID NO: 214810 - DNA, 6055 bp, Zea Mays
gttgggctgggatgaaacggactcccaaacaggcccaacgctaaaaaaaccacccccagctccgttctcttccaagtggccagtgccgtctccggccaccgcccatggctatgccttcctccaccacggcggcgctctcccgcctcgtcgaccgcacccgggttccggaccccacactgcaacgccatgcggttggggccgtcttccgccacctcctctccctccccgcgcccctcccagcggccgcccacgacgccacctcagccctcctcgcttcgccccaccctgcagtcgccgcgcacgctgcggcctccatcgcccgtctcaccgccacccgccccgatctcctcccctcggatgtcgccctcccgctcctcatcgcgcccctcgcggcctcaccgtcccccctgctcgcctcctgcctcgtcaaggcagtctccgcgctcgcaacctgcgccctccgctccggctctcgcttcccggcccacgaccaccccttcatccaggcgctcgcgtcgggggctgacggcgctcgagcggagctgatgcggcaggcagccgggatggttgccgaccgggtggattgggtggtcaagtttctgaggccgttcgtgatgttctccgtggtgaggaagggggacgccgcatttgccagggatttgatcggtgcattggccgcagcagccgtggcagcagggaaggctagtgtcgcgatcccggttctgaagatgctccaagacagcatgctgcatttcggccgcggggacgatcaggaagtgcggctatggcttagttccgcagagtgtttggttgatgcttatgtcgtgctactgaggaagttagctcatggtcaaatgcctacatatgatgctcaagcaagtagtgcgacattgatggaaacactcctatcacaatattcatttcatcaaaaatttctgggaattgattcaacaatttttgggttatcaaaacatttattcttggtgcaaaaggatcttggattatgctatatacctgagatttctgttgtccttagctctctttcttactctctcactgggctagagtttgaacatgaacagctagctgccttgaaacttctgagctttttgattgattggaaatatgaaaatgtgcttgacagtaaagaacaaacacatcacgtcagtgtggagcttctctgtgttctggcagttatcaaccttaccatttcaccatccaaatctgtgaaagcagtggcatatcatgttctgtcaaggttcagcttgtttgttttagacttgccagcttctcattcatcagaggaacaagatatttcaacgagttaccacataagcaaacctgcacttcttcttcctaaacttttgcatcatctatggtccaagccatcttcatcatgcttcagttttatgaagtacatagctaccaaggcctcacctgattctggccagagtgacttggaagcaaattattggactcatcaaataaatgcctatctgacagcccttcacagagaaaagcatacattagatgtcaggtcttcaaaaacgacttcagtagccatatcatctctgataagctctgtagcatctgttttggtaatgcatccaaaacttggtacttctgcagcagaatctttggccatgcttggcacatcggacccaagattgggtatgccactttttgtagttatcctcttctacagcaagattctatgcagcagcggtaaattttcagcggaaatctcgctcagtttgctagagtcattgccatcacttgctatacatggttttgttcttccactagctctgcaatggatatcgccaatgcttaaaagggactcaaattcggttttgtatgctatggctgttcgattactctgcaagatatgggctgtaaccgactgggcatttccaaacttacaagtaagaagtggttctggatcctgagaatttttccaatttcatctctgacagagagatctctgcaagtattgccacatcaatacgcgatgtttgcaagcaaaatccagatagaggcgttgatataatattatctgtctctttttgtattgagagtcgtgattctgtggttcaagctcttggcctcgagagcctctcgtacctttgtgaagcagatgtggtcgatttctacacggcgtggaaagttatatcaaagcaggtgcttgattattacgttgagcctgctgttgctcacagtttgtgtattctgttgaggtgcggagcgatggatgctgaggcatattctgtaatatctggtaaccttgtaagaacattgtggagaattggaacatccaagaaaaataatcccgatccactctgggataaagcaagaggaactgcttttcactccttgtccaactacaaggtatcacttattcaagatgctattcctgatttctggaaactaaactatgagttctttacgaacgaacataatctggcagttctcaaggccatggagcaccttcaagatgagatcatcagatatgagcacataaatcgtcgtcgagtgactactgacaaaagaactgcagtgcataaatttgagaagctactggaggtttttcctcgggcggtatttaaagggatgttatctcatcatcagttgcctggtgctgctcttttaactctcaattttactccaaaggacatacttaatgaagggaaacctaaggatttgcctagagttcattccgcttttgagcaagcttttgtggaaattgctgaatctatgtatgtgtcaagaaacatagtggtagctcttcttgccttgcagtcatggaagtcatttgtttccaactggatgcaagcagttgtggcattgcttgacactaaagactcgtcaaagttgaacaaagcaatgaaagctgctaatgatatatttaagattctgtgcgaccaagttccggtgtctactcctcaagttgttgttaacatagctcttgttattggggcactggccttgattgttccgccaactgctcatttggtagtatcttcggtatcagattttcttttaaaatggttgcttcaatacgagcatgagcacaagcaatggtcagcagctctctctcttggattaatattcaattgttttcatcctacggacaaaaagagcagacttcaggttattaatgggtttcttgaggttatctcaaaaactgaaagctgtcttgtaaaaggagcttgtggactggcattaggctatgtttgccacggtcttttgacaagagcacataatgctgttgattcagaagtagaggctattacacaactcaatgagcgtgcatcagttgaggatattcttcatgctttggttaccttgttaattcaactatgtccatcctcatgctattctctgaagaagcttagtatatacggaatatcctccatgggagggatggaagaaaatattcatagcttcagtgatgatccttgggctgtcgctggacttgtcattggtctgggaaactctgttgttgctctgtatagacttggagcttatgaagcagttactgaagtcaaggatgtattgatatcatggataccaaatgttgattcgaactctgcattatttgatgaaatagattcagtatcactatgtatgggttcatgtcttgctcttccatctgttgtggctttttgccaaagagtggagctgttgaatgacgacttggatgcattgttcaatcgctacacttctttagcttctgagctcctgaacctcaataaatctgggattatctttcagaatttgttaatggcaatctgtattggtgctggatcttttctctcttctatattgaatgatggcgtgcatgctatggaatttaatggtgttaaaggctttctggacactctcagacatatatatacccacccttttcctccccttgttcatttgggaggcatgtttggtgtggtcaacgcttttggtgcaggtgcaggagatcttactggggtgttttcaaagcctatgacttctcaaatcaaacatgaggtttccttcatacatcttaacacttaatgttctgtaaaattgttagaataatctatttagttgtgtgcacaggagtcatcttttgtgagtggttcattactgacaagtcctgttggtgagactctgtcaacatcaatgattcaggaaatatttcttcttgctaaggatgctaaggataagcacatacaagattatgctgcatgggctatttcatttctcagaagcaggtggtcgaagaatcagaatcagattctttatgaggacaatggttctaatagaagtcctgatgatcatgatcaagcttcaagtttttctgaacaaagcttagtttggaacttaagtctctggttgagtgatctaaaatttgaaaagtctggtgatgtggtgccaataagtacagttggaacagttttaaaatgcctttccaaagctccccgattgccaactacagactggggagctattgtacggaggtgcattaaagctgaggcgcagatttctcataagttaaccaatcaggaagatcctaagatactaaaggaggcatgcttatatttgactctagctcatgctgctcacataagtccccttctgcagtttttggatgatctgactgacatactcagattccagagattagatataaatgttcagtctattttgctcaaacatttgttacacctaatgaagctattctctgattcaagattggataaattgcatgaggattttaccgaatacttgtattcccccacttcttcatacttgaattactcatctgaacagaaaagcatgctaagaatgtcgttctgggaaggcatttatacgtgcctggtggatgtttctgaagaatctggtgttttttcattcattgaaaaatgcattcagtgcttgttgcctcttttgacgctccatagtgatggtcaacctgaattcatgaaagagtggtctgttgctatcttatgtcttacaaacgcccagaaaaaatggctggatgatattttgcagattcgcagtactgccttagtcaatgaaggacatgttgatgttgcaaaaaagattatcctcagagcaagattgtgtgcaactggttgtggttcaacacatgagctgggaaatataaagacagcaatattgtgtacaaaagctgatggtgtttggtggagtgtccttgttgagatcacttcagccttaaactcagccgaaaacatcatcaaaagacagtggcttctggatgcattagacattggctgtgttacagctcacccctcaacggtgctgtgttttgttggcttgctttgtggtagctgctgcatctatatgccgcttcttcttgttaattcgataaatgtactgagcgacttgccggtcaccctgcctgcctttctctccaccatcgtttctgatgatttcaggaactctgtggcagacaggctatggctgttgactactgacatctatacttgggctgaacaattagctcacggacacgatcaacctggacatgatcgtattcatagaagtgaaactgagattgcgacttttttggccaatattctgctctctacatgcattacagtcgaggactacctgtctgttgataagcggctaaagcttgcaaatcttgaagcactctaatcaaagggagatgtgtttcttttctattttatgtatgtatttatgtacggtatcagtcatgttttaatagttgatgtccctgctgatgatccagcaatgtttttttcatgtacataattaatttaactaactcatcttatgcactgaaaacaatctattgttcaaagatagatagacctatgaaataatattgttgtgtacactcactttgtcataccgccactgaacaatttaagagcagtcaccttacaatttgatgggagtaaacttctgaggtattaacagagattatctgagaccatagctgagatgtaaaagctcccatgcaagtttacttggattatgccataactgtaaatgagtctaatcgcaattacatttgccttgagctcag

SEQ ID NO: 214811 - DNA, 5973 bp, Zea Mays
gttgggctgggatgaaacggactcccaaacaggcccaacgctaaaaaaaccacccccagctccgttctcttccaagtggccagtgccgtctccggccaccgcccatggctatgccttcctccaccacggcggcgctctcccgcctcgtcgaccgcacccgggttccggaccccacactgcaacgccatgcggttggggccgtcttccgccacctcctctccctccccgcgcccctcccagcggccgcccacgacgccacctcagccctcctcgcttcgccccaccctgcagtcgccgcgcacgctgcggcctccatcgcccgtctcaccgccacccgccccgatctcctcccctcggatgtcgccctcccgctcctcatcgcgcccctcgcggcctcaccgtcccccctgctcgcctcctgcctcgtcaaggcagtctccgcgctcgcaacctgcgccctccgctccggctctcgcttcccggcccacgaccaccccttcatccaggcgctcgcgtcgggggctgacggcgctcgagcggagctgatgcggcaggcagccgggatggttgccgaccgggtggattgggtggtcaagtttctgaggccgttcgtgatgttctccgtggtgaggaagggggacgccgcatttgccagggatttgatcggtgcattggccgcagcagccgtggcagcagggaaggctagtgtcgcgatcccggttctgaagatgctccaagacagcatgctgcatttcggccgcggggacgatcaggaagtgcggctatggcttagttccgcagagtgtttggttgatgcttatgtcgtgctactgaggaagttagctcatggtcaaatgcctacatatgatgctcaagcaagtagtgcgacattgatggaaacactcctatcacaatattcatttcatcaaaaatttctgggaattgattcaacaatttttgggttatcaaaacatttattcttggtgcaaaaggatcttggattatgctatatacctgagatttctgttgtccttagctctctttcttactctctcactgggctagagtttgaacatgaacagctagctgccttgaaacttctgagctttttgattgattggaaatatgaaaatgtgcttgacagtaaagaacaaacacatcacgtcagtgtggagcttctctgtgttctggcagttatcaaccttaccatttcaccatccaaatctgtgaaagcagtggcatatcatgttctgtcaaggttcagcttgtttgttttagacttgccagcttctcattcatcagaggaacaagatatttcaacgagttaccacataagcaaacctgcacttcttcttcctaaacttttgcatcatctatggtccaagccatcttcatcatgcttcagttttatgaagtacatagctaccaaggcctcacctgattctggccagagtgacttggaagcaaattattggactcatcaaataaatgcctatctgacagcccttcacagagaaaagcatacattagatgtcaggtcttcaaaaacgacttcagccatatcatctctgataagctctgtagcatctgttttggtaatgcatccaaaacttggtacttctgcagcagaatctttggccatgcttggcacatcggacccaagattgggtatgccactttttgtagttatcctcttctacagcaagattctatgcagcagcggtaaattttcagcggaaatctcgctcagtttgctagagtcattgccatcacttgctatacatggttttgttcttccactagctctgcaatggatatcgccaatgcttaaaagggactcaaattcggttttgtatgctatggctgttcgattactctgcaagatatgggctgtaaccgactgggcatttccaaacttacaagtggttctggatcctgagaatttttccaatttcatctctgacagagagatctctgcaagtattgccacatcaatacgcgatgtttgcaagcaaaatccagatagaggcgttgatataatattatctgtctctttttgtattgagagtcgtgattctgtggttcaagctcttggcctcgagagcctctcgtacctttgtgaagcagatgtggtcgatttctacacggcgtggaaagttatatcaaagcaggtgcttgattattacgttgagcctgctgttgctcacagtttgtgtattctgttgaggtgcggagcgatggatgctgaggcatattctgtaatatctggtaaccttgtaagaacattgtggagaattggaacatccaagaaaaataatcccgatccactctgggataaagcaagaggaactgcttttcactccttgtccaactacaaggtatcacttattcaagatgctattcctgatttctggaaactaaactatgagttctttacgaacgaacataatctggcagttctcaaggccatggagcaccttcaagatgagatcatcagatatgagcacataaatcgtcgtcgagtgactactgacaaaagaactgcagtgcataaatttgagaagctactggaggtttttcctcgggcggtatttaaagggatgttatctcatcatcagttgcctggtgctgctcttttaactctcaattttactccaaaggacatacttaatgaagggaaacctaaggatttgcctagagttcattccgcttttgagcaagcttttgtggaaattgctgaatctatgtatgtgtcaagaaacatagtggtagctcttcttgccttgcagtcatggaagtcatttgtttccaactggatgcaagcagttgtggcattgcttgacactaaagactcgtcaaagttgaacaaagcaatgaaagctgctaatgatatatttaagattctgtgcgaccaagttccggtgtctactcctcaagttgttgttaacatagctcttgttattggggcactggccttgattgttccgccaactgctcatttggtagtatcttcggtatcagattttcttttaaaatggttgcttcaatacgagcatgagcacaagcaatggtcagcagctctctctcttggattaatattcaattgttttcatcctacggacaaaaagagcagacttcaggttattaatgggtttcttgaggttatctcaaaaactgaaagctgtcttgtaaaaggagcttgtggactggcattaggctatgtttgccacggtcttttgacaagagcacataatgctgttgattcagaagtagaggctattacacaactcaatgagcgtgcatcagttgaggatattcttcatgctttggttaccttgttaattcaactatgtccatcctcatgctattctctgaagaagcttagtatatacggaatatcctccatgggagggatggaagaaaatattcatagcttcagtgatgatccttgggctgtcgctggacttgtcattggtctgggaaactctgttgttgctctgtatagacttggagcttatgaagcagttactgaagtcaaggatgtattgatatcatggataccaaatgttgattcgaactctgcattatttgatgaaatagattcagtatcactatgtatgggttcatgtcttgctcttccatctgttgtggctttttgccaaagagtggagctgttgaatgacgacttggatgcattgttcaatcgctacacttctttagcttctgagctcctgaacctcaataaatctgggattatctttcagaatttgttaatggcaatctgtattggtgctggatcttttctctcttctatattgaatgatggcgtgcatgctatggaatttaatggtgttaaaggctttctggacactctcagacatatatatacccacccttttcctccccttgttcatttgggaggcatgtttggtgtggtcaacgcttttggtgcaggtgcaggagatcttactggggtgttttcaaagcctatgacttctcaaatcaaacatgaggagtcatcttttgtgagtggttcattactgacaagtcctgttggtgagactctgtcaacatcaatgattcaggaaatatttcttcttgctaaggatgctaaggataagcacatacaagattatgctgcatgggctatttcatttctcagaagcaggtggtcgaagaatcagaatcagattctttatgaggacaatggttctaatagaagtcctgatgatcatgatcaagcttcaagtttttctgaacaaagcttagtttggaacttaagtctctggttgagtgatctaaaatttgaaaagtctggtgatgtggtgccaataagtacagttggaacagttttaaaatgcctttccaaagctccccgattgccaactacagactggggagctattgtacggaggtgcattaaagctgaggcgcagatttctcataagttaaccaatcaggaagatcctaagatactaaaggaggcatgcttatatttgactctagctcatgctgctcacataagtccccttctgcagtttttggatgatctgactgacatactcagattccagagattagatataaatgttcagtctattttgctcaaacatttgttacacctaatgaagctattctctgattcaagattggataaattgcatgaggattttaccgaatacttgtattcccccacttcttcatacttgaattactcatctgaacagaaaagcatgctaagaatgtcgttctgggaaggcatttatacgtgcctggtggatgtttctgaagaatctggtgttttttcattcattgaaaaatgcattcagtgcttgttgcctcttttgacgctccatagtgatggtcaacctgaattcatgaaagagtggtctgttgctatcttatgtcttacaaacgcccagaaaaaatggctggatgatattttgcagattcgcagtactgccttagtcaatgaaggacatgttgatgttgcaaaaaagattatcctcagagcaagattgtgtgcaactggttgtggttcaacacatgagctgggaaatataaagacagcaatattgtgtacaaaagctgatggtgtttggtggagtgtccttgttgagatcacttcagccttaaactcagccgaaaacatcatcaaaagacagtggcttctggatgcattagacattggctgtgttacagctcacccctcaacggtgctgtgttttgttggcttgctttgtggtagctgctgcatctatatgccgcttcttcttgttaattcgataaatgtactgagcgacttgccggtcaccctgcctgcctttctctccaccatcgtttctgatgatttcaggaactctgtggcagacaggctatggctgttgactactgacatctatacttgggctgaacaattagctcacggacacgatcaacctggacatgatcgtattcatagaagtgaaactgagattgcgacttttttggccaatattctgctctctacatgcattacagtcgaggactacctgtctgttgataagcggctaaagcttgcaaatcttgaagcactctaatcaaagggagatgtgtttcttttctattttatgtatgtatttatgtacggtatcagtcatgttttaatagttgatgtccctgctgatgatccagcaatgtttttttcatgtacataattaatttaactaactcatcttatgcactgaaaacaatctattgttcaaagatagatagacctatgaaataatattgttgtgtacactcactttgtcataccgccactgaacaatttaagagcagtcaccttacaatttgatgggagtaaacttctgaggtattaacagagattatctgagaccatagctgagatgtaaaagctcccatgcaagtttacttggattatgccataactgtaaatgagtctaatcgcaattacatttgccttgagctcag

SEQ ID NO: 214812 - DNA, 5883 bp, Zea Mays
gttgggctgggatgaaacggactcccaaacaggcccaacgctaaaaaaaccacccccagctccgttctcttccaagtggccagtgccgtctccggccaccgcccatggctatgccttcctccaccacggcggcgctctcccgcctcgtcgaccgcacccgggttccggaccccacactgcaacgccatgcggttggggccgtcttccgccacctcctctccctccccgcgcccctcccagcggccgcccacgacgccacctcagccctcctcgcttcgccccaccctgcagtcgccgcgcacgctgcggcctccatcgcccgtctcaccgccacccgccccgatctcctcccctcggatgtcgccctcccgctcctcatcgcgcccctcgcggcctcaccgtcccccctgctcgcctcctgcctcgtcaaggcagtctccgcgctcgcaacctgcgccctccgctccggctctcgcttcccggcccacgaccaccccttcatccaggcgctcgcgtcgggggctgacggcgctcgagcggagctgatgcggcaggcagccgggatggttgccgaccgggtggattgggtggtcaagtttctgaggccgttcgtgatgttctccgtggtgaggaagggggacgccgcatttgccagggatttgatcggtgcattggccgcagcagccgtggcagcagggaaggctagtgtcgcgatcccggttctgaagatgctccaagacagcatgctgcatttcggccgcggggacgatcaggaagtgcggctatggcttagttccgcagagtgtttggttgatgcttatgtcgtgctactgaggaagttagctcatggtcaaatgcctacatatgatgctcaagcaagtagtgcgacattgatggaaacactcctatcacaatattcatttcatcaaaaatttctgggaattgattcaacaatttttgggttatcaaaacatttattcttggtgcaaaaggatcttggattatgctatatacctgagatttctgttgtccttagctctctttcttactctctcactgggctagagtttgaacatgaacagctagctgccttgaaacttctgagctttttgattgattggaaatatgaaaatgtgcttgacagtaaagaacaaacacatcacgtcagtgtggagcttctctgtgttctggcagttatcaaccttaccatttcaccatccaaatctgtgaaagcagtggcatatcatgttctgtcaaggttcagcttgtttgttttagacttgccagcttctcattcatcagaggaacaagatatttcaacgagttaccacataagcaaacctgcacttcttcttcctaaacttttgcatcatctatggtccaagccatcttcatcatgcttcagttttatgaagtacatagctaccaaggcctcacctgattctggccagagtgacttggaagcaaattattggactcatcaaataaatgcctatctgacagcccttcacagagaaaagcatacattagatgtcaggtcttcaaaaacgacttcagtagccatatcatctctgataagctctgtagcatctgttttggtaatgcatccaaaacttggtacttctgcagcagaatctttggccatgcttggcacatcggacccaagattgggtatgccactttttgtagttatcctcttctacagcaagattctatgcagcagcggtaaattttcagcggaaatctcgctcagtttgctagagtcattgccatcacttgctatacatggttttgttcttccactagctctgcaatggatatcgccaatgcttaaaagggactcaaattcggttttgtatgctatggctgttcgattactctgcaagatatgggctgtaaccgactgggcatttccaaacttacaagtggttctggatcctgagaatttttccaatttcatctctgacagagagatctctgcaagtattgccacatcaatacgcgatgtttgcaagcaaaatccagatagaggcgttgatataatattatctgtctctttttgtattgagagtcgtgattctgtggttcaagctcttggcctcgagagcctctcgtacctttgtgaagcagatgtggtcgatttctacacggcgtggaaagttatatcaaagcaggtgcttgattattacgttgagcctgctgttgctcacagtttgtgtattctgttgaggtgcggagcgatggatgctgaggcatattctgtaatatctggtaaccttgtaagaacattgtggagaattggaacatccaagaaaaataatcccgatccactctgggataaagcaagaggaactgcttttcactccttgtccaactacaaggtatcacttattcaagatgctattcctgatttctggaaactaaactatgagttctttacgaacgaacataatctggcagttctcaaggccatggagcaccttcaagatgagatcatcagatatgagcacataaatcgtcgtcgagtgactactgacaaaagaactgcagtgcataaatttgagaagctactggaggtttttcctcgggcggtatttaaagggatgttatctcatcatcagttgcctggtgctgctcttttaactctcaattttactccaaaggacatacttaatgaagggaaacctaaggatttgcctagagttcattccgcttttgagcaagcttttgtggaaattgctgaatctatgtatgtgtcaagaaacatagtggtagctcttcttgccttgcagtcatggaagtcatttgtttccaactggatgcaagcagttgtggcattgcttgacactaaagactcgtcaaagttgaacaaagcaatgaaagctgctaatgatatatttaagattctgtgcgaccaagttccggtgtctactcctcaagttgttgttaacatagctcttgttattggggcactggccttgattgttccgccaactgctcatttggtagtatcttcggtatcagattttcttttaaaatggttgcttcaatacgagcatgagcacaagcaatggtcagcagctctctctcttggattaatattcaattgttttcatcctacggacaaaaagagcagacttcaggttattaatgggtttcttgaggttatctcaaaaactgaaagctgtcttgtaaaaggagcttgtggactggcattaggctatgtttgccacggtcttttgacaagagcacataatgctgttgattcagaagtagaggctattacacaactcaatgagcgtgcatcagttgaggatattcttcatgctttggttaccttgttaattcaactatgtccatcctcatgctattctctgaagaagcttagtatatacggaatatcctccatgggagggatggaagaaaatattcatagcttcagtgatgatccttgggctgtcgctggacttgtcattggtctgggaaactctgttgttgctctgtatagacttggagcttatgaagcagttactgaagtcaaggatgtattgatatcatggataccaaatgttgattcgaactctgcattatttgatgaaatagattcagtatcactatgtatgggttcatgtcttgctcttccatctgttgtggctttttgccaaagagtggagctgttgaatgacgacttggatgcattgttcaatcgctacacttctttagcttctgagctcctgaacctcaataaatctgggattatctttcagaatttgttaatggcaatctgtattggtgctggatcttttctctcttctatattgaatgatggcgtgcatgctatggaatttaatggtgttaaaggctttctggacactctcagacatatatatacccacccttttcctccccttgttcatttgggaggcatgtttggtgtggtcaacgcttttggtgcaggtgcaggagatcttactggggtgttttcaaagcctatgacttctcaaatcaaacatgaggatgctaaggataagcacatacaagattatgctgcatgggctatttcatttctcagaagcaggtggtcgaagaatcagaatcagattctttatgaggacaatggttctaatagaagtcctgatgatcatgatcaagcttcaagtttttctgaacaaagcttagtttggaacttaagtctctggttgagtgatctaaaatttgaaaagtctggtgatgtggtgccaataagtacagttggaacagttttaaaatgcctttccaaagctccccgattgccaactacagactggggagctattgtacggaggtgcattaaagctgaggcgcagatttctcataagttaaccaatcaggaagatcctaagatactaaaggaggcatgcttatatttgactctagctcatgctgctcacataagtccccttctgcagtttttggatgatctgactgacatactcagattccagagattagatataaatgttcagtctattttgctcaaacatttgttacacctaatgaagctattctctgattcaagattggataaattgcatgaggattttaccgaatacttgtattcccccacttcttcatacttgaattactcatctgaacagaaaagcatgctaagaatgtcgttctgggaaggcatttatacgtgcctggtggatgtttctgaagaatctggtgttttttcattcattgaaaaatgcattcagtgcttgttgcctcttttgacgctccatagtgatggtcaacctgaattcatgaaagagtggtctgttgctatcttatgtcttacaaacgcccagaaaaaatggctggatgatattttgcagattcgcagtactgccttagtcaatgaaggacatgttgatgttgcaaaaaagattatcctcagagcaagattgtgtgcaactggttgtggttcaacacatgagctgggaaatataaagacagcaatattgtgtacaaaagctgatggtgtttggtggagtgtccttgttgagatcacttcagccttaaactcagccgaaaacatcatcaaaagacagtggcttctggatgcattagacattggctgtgttacagctcacccctcaacggtgctgtgttttgttggcttgctttgtggtagctgctgcatctatatgccgcttcttcttgttaattcgataaatgtactgagcgacttgccggtcaccctgcctgcctttctctccaccatcgtttctgatgatttcaggaactctgtggcagacaggctatggctgttgactactgacatctatacttgggctgaacaattagctcacggacacgatcaacctggacatgatcgtattcatagaagtgaaactgagattgcgacttttttggccaatattctgctctctacatgcattacagtcgaggactacctgtctgttgataagcggctaaagcttgcaaatcttgaagcactctaatcaaagggagatgtgtttcttttctattttatgtatgtatttatgtacggtatcagtcatgttttaatagttgatgtccctgctgatgatccagcaatgtttttttcatgtacataattaatttaactaactcatcttatgcactgaaaacaatctattgttcaaagatagatagacctatgaaataatattgttgtgtacactcactttgtcataccgccactgaacaatttaagagcagtcaccttacaatttgatgggagtaaacttctgaggtattaacagagattatctgagaccatagctgagatgtaaaagctcccatgcaagtttacttggattatgccataactgtaaatgagtctaatcgcaattacatttgccttgagctcag

SEQ ID NO: 214813 - DNA, 4305 bp, Zea Mays
atgggggtcatgaggaaaccgatgacttgctgcacaagcgccgcccactgggtgtactccagattgggttcccctgatgaattgtcacatttcctgctcagtttgctagagtcattgccatcacttgctatacatggttttgttcttccactagctctgcaatggatatcgccaatgcttaaaagggactcaaattcggttttgtatgctatggctgttcgattactctgcaagatatgggctgtaaccgactgggcatttccaaacttacaagtggttctggatcctgagaatttttccaatttcatctctgacagagagatctctgcaagtattgccacatcaatacgcgatgtttgcaagcaaaatccagatagaggcgttgatataatattatctgtctctttttgtattgagagtcgtgattctgtggttcaagctcttggcctcgagagcctctcgtacctttgtgaagcagatgtggtcgatttctacacggcgtggaaagttatatcaaagcaggtgcttgattattacgttgagcctgctgttgctcacagtttgtgtattctgttgaggtgcggagcgatggatgctgaggcatattctgtaatatctggtaaccttgtaagaacattgtggagaattggaacatccaagaaaaataatcccgatccactctgggataaagcaagaggaactgcttttcactccttgtccaactacaaggtatcacttattcaagatgctattcctgatttctggaaactaaactatgagttctttacgaacgaacataatctggcagttctcaaggccatggagcaccttcaagatgagatcatcagatatgagcacataaatcgtcgtcgagtgactactgacaaaagaactgcagtgcataaatttgagaagctactggaggtttttcctcgggcggtatttaaagggatgttatctcatcatcagttgcctggtgctgctcttttaactctcaattttactccaaaggacatacttaatgaagggaaacctaaggatttgcctagagttcattccgcttttgagcaagcttttgtggaaattgctgaatctatgtatgtgtcaagaaacatagtggtagctcttcttgccttgcagtcatggaagtcatttgtttccaactggatgcaagcagttgtggcattgcttgacactaaagactcgtcaaagttgaacaaagcaatgaaagctgctaatgatatatttaagattctgtgcgaccaagttccggtgtctactcctcaagttgttgttaacatagctcttgttattggggcactggccttgattgttccgccaactgctcatttggtagtatcttcggtatcagattttcttttaaaatggttgcttcaatacgagcatgagcacaagcaatggttatctcaaaaactgaaagctgtcttgtaaaaggagcttgtggactggcattaggctatgtttgccacggtcttttgacaagagcacataatgctgttgattcagaagtagaggctattacacaactcaatgagcgtgcatcagttgaggatattcttcatgctttggttaccttgttaattcaactatgtccatcctcatgctattctctgaagaagcttagtatatacggaatatcctccatgggagggatggaagaaaatattcatagcttcagtgatgatccttgggctgtcgctggacttgtcattggtctgggaaactctgttgttgctctgtatagacttggagcttatgaagcagttactgaagtcaaggatgtattgatatcatggataccaaatgttgattcgaactctgcattatttgatgaaatagattcagtatcactatgtatgggttcatgtcttgctcttccatctgttgtggctttttgccaaagagtggagctgttgaatgacgacttggatgcattgttcaatcgctacacttctttagcttctgagctcctgaacctcaataaatctgggattatctttcagaatttgttaatggcaatctgtattggtgctggatcttttctctcttctatattgaatgatggcgtgcatgctatggaatttaatggtgttaaaggctttctggacactctcagacatatatatacccacccttttcctccccttgttcatttgggaggcatgtttggtgtggtcaacgcttttggtgcaggtgcaggagatcttactggggtgttttcaaagcctatgacttctcaaatcaaacatgaggtttccttcatacatcttaacacttaatgttctgtaaaattgttagaataatctatttagttgtgtgcacaggagtcatcttttgtgagtggttcattactgacaagtcctgttggtgagactctgtcaacatcaatgattcaggaaatatttcttcttgctaaggatgctaaggataagcacatacaagattatgctgcatgggctatttcatttctcagaagcaggtggtcgaagaatcagaatcagattctttatgaggacaatggttctaatagaagtcctgatgatcatgatcaagcttcaagtttttctgaacaaagcttagtttggaacttaagtctctggttgagtgatctaaaatttgaaaagtctggtgatgtggtgccaataagtacagttggaacagttttaaaatgcctttccaaagctccccgattgccaactacagactggggagctattgtacggaggtgcattaaagctgaggcgcagatttctcataagttaaccaatcaggaagatcctaagatactaaaggaggcatgcttatatttgactctagctcatgctgctcacataagtccccttctgcagtttttggatgatctgactgacatactcagattccagagattagatataaatgttcagtctattttgctcaaacatttgttacacctaatgaagctattctctgattcaagattggataaattgcatgaggattttaccgaatacttgtattcccccacttcttcatacttgaattactcatctgaacagaaaagcatgctaagaatgtcgttctgggaaggcatttatacgtgcctggtggatgtttctgaagaatctggtgttttttcattcattgaaaaatgcattcagtgcttgttgcctcttttgacgctccatagtgatggtcaacctgaattcatgaaagagtggtctgttgctatcttatgtcttacaaacgcccagaaaaaatggctggatgatattttgcagattcgcagtactgccttagtcaatgaaggacatgttgatgttgcaaaaaagattatcctcagagcaagattgtgtgcaactggttgtggttcaacacatgagctgggaaatataaagacagcaatattgtgtacaaaagctgatggtgtttggtggagtgtccttgttgagatcacttcagccttaaactcagccgaaaacatcatcaaaagacagtggcttctggatgcattagacattggctgtgttacagctcacccctcaacggtgctgtgttttgttggcttgctttgtggtagctgctgcatctatatgccgcttcttcttgttaattcgataaatgtactgagcgacttgccggtcaccctgcctgcctttctctccaccatcgtttctgatgatttcaggaactctgtggcagacaggctatggctgttgactactgacatctatacttgggctgaacaattagctcacggacacgatcaacctggacatgatcgtattcatagaagtgaaactgagattgcgacttttttggccaatattctgctctctacatgcattacagtcgaggactacctgtctgttgataagcggctaaagcttgcaaatcttgaagcactctaatcaaagggagatgtgtttcttttctattttatgtatgtatttatgtacggtatcagtcatgttttaatagttgatgtccctgctgatgatccagcaatgtttttttcatgtacataattaatttaactaactcatcttatgcactgaaaacaatctattgttcaaagatagatagacctatgaaataatattgttgtgtacactcactttgtcataccgccactgaacaatttaagagcagtcaccttacaatttgatgggagtaaacttctgaggtattaacagagattatctgagaccatagctgagatgtaaaagctcccatgcaagtttacttggattatgccataactgtaaatgagtctaatcgcaattacatttgccttgagctcag

SEQ ID NO: 214814 - DNA, 3182 bp, Zea Mays
gtttgctgaaatttgtggcaagattggcatcgtcaagattctgtgcgaccaagttccggtgtctactcctcaagttgttgttaacatagctcttgttattggggcactggccttgattgttccgccaactgctcatttggtagtatcttcggtatcagattttcttttaaaatggttgcttcaatacgagcatgagcacaagcaatggtcagcagctctctctcttggattaatattcaattgttttcatcctacggacaaaaagagcagacttcaggttattaatgggtttcttgaggttatctcaaaaactgaaagctgtcttgtaaaaggagcttgtggactggcattaggctatgtttgccacggtcttttgacaagagcacataatgctgttgattcagaagtagaggctattacacaactcaatgagcgtgcatcagttgaggatattcttcatgctttggttaccttgttaattcaactatgtccatcctcatgctattctctgaagaagcttagtatatacggaatatcctccatgggagggatggaagaaaatattcatagcttcagtgatgatccttgggctgtcgctggacttgtcattggtctgggaaactctgttgttgctctgtatagacttggagcttatgaagcagttactgaagtcaaggatgtattgatatcatggataccaaatgttgattcgaactctgcattatttgatgaaatagattcagtatcactatgtatgggttcatgtcttgctcttccatctgttgtggctttttgccaaagagtggagctgttgaatgacgacttggatgcattgttcaatcgctacacttctttagcttctgagctcctgaacctcaataaatctgggattatctttcagaatttgttaatggcaatctgtattggtgctggatcttttctctcttctatattgaatgatggcgtgcatgctatggaatttaatggtgttaaaggctttctggacactctcagacatatatatacccacccttttcctccccttgttcatttgggaggcatgtttggtgtggtcaacgcttttggtgcaggtgcaggagatcttactggggtgttttcaaagcctatgacttctcaaatcaaacatgaggtttccttcatacatcttaacacttaatgttctgtaaaattgttagaataatctatttagttgtgtgcacaggagtcatcttttgtgagtggttcattactgacaagtcctgttggtgagactctgtcaacatcaatgattcaggaaatatttcttcttgctaaggatgctaaggataagcacatacaagattatgctgcatgggctatttcatttctcagaagcaggtggtcgaagaatcagaatcagattctttatgaggacaatggttctaatagaagtcctgatgatcatgatcaagcttcaagtttttctgaacaaagcttagtttggaacttaagtctctggttgagtgatctaaaatttgaaaagtctggtgatgtggtgccaataagtacagttggaacagttttaaaatgcctttccaaagctccccgattgccaactacagactggggagctattgtacggaggtgcattaaagctgaggcgcagatttctcataagttaaccaatcaggaagatcctaagatactaaaggaggcatgcttatatttgactctagctcatgctgctcacataagtccccttctgcagtttttggatgatctgactgacatactcagattccagagattagatataaatgttcagtctattttgctcaaacatttgttacacctaatgaagctattctctgattcaagattggataaattgcatgaggattttaccgaatacttgtattcccccacttcttcatacttgaattactcatctgaacagaaaagcatgctaagaatgtcgttctgggaaggcatttatacgtgcctggtggatgtttctgaagaatctggtgttttttcattcattgaaaaatgcattcagtgcttgttgcctcttttgacgctccatagtgatggtcaacctgaattcatgaaagagtggtctgttgctatcttatgtcttacaaacgcccagaaaaaatggctggatgatattttgcagattcgcagtactgccttagtcaatgaaggacatgttgatgttgcaaaaaagattatcctcagagcaagattgtgtgcaactggttgtggttcaacacatgagctgggaaatataaagacagcaatattgtgtacaaaagctgatggtgtttggtggagtgtccttgttgagatcacttcagccttaaactcagccgaaaacatcatcaaaagacagtggcttctggatgcattagacattggctgtgttacagctcacccctcaacggtgctgtgttttgttggcttgctttgtggtagctgctgcatctatatgccgcttcttcttgttaattcgataaatgtactgagcgacttgccggtcaccctgcctgcctttctctccaccatcgtttctgatgatttcaggaactctgtggcagacaggctatggctgttgactactgacatctatacttgggctgaacaattagctcacggacacgatcaacctggacatgatcgtattcatagaagtgaaactgagattgcgacttttttggccaatattctgctctctacatgcattacagtcgaggactacctgtctgttgataagcggctaaagcttgcaaatcttgaagcactctaatcaaagggagatgtgtttcttttctattttatgtatgtatttatgtacggtatcagtcatgttttaatagttgatgtccctgctgatgatccagcaatgtttttttcatgtacataattaatttaactaactcatcttatgcactgaaaacaatctattgttcaaagatagatagacctatgaaataatattgttgtgtacactcactttgtcataccgccactgaacaatttaagagcagtcaccttacaatttgatgggagtaaacttctgaggtattaacagagattatctgagaccatagctgagatgtaaaagctcccatgcaagtttacttggattatgccataactgtaaatgagtctaatcgcaattacatttgccttgagctcag

SEQ ID NO: 214815 - DNA, 574 bp, Zea Mays
cccccttcccctgcctcgcgttcgcgttcgcctagtctccttccttttcctctcgctctccgcctccatcagctcgagccgcttccttccacccaccacgcaccacctgacctcccttccctcatcggctcctcctcgttcccactaggcaggaacgccgcgcgccgagccgagctagcggccggaatgcccgcgcagaagcgcccgctcccgtcgtctgcctcgcccggctccgacgccgacgtcgaggaagctcctggcgccgacgcggacggctgcggcggggccgaccaacggtcgccgaaggtgacgctgaacggagtggaggagcgggacggcgggccgctgcaggccaaggaccagcgccacgattccgacgctgacgacgaggaggaaggagaccgcgaaggcggcggcggcggggacgggagcgggagcggaggcgacgacgactgcgacagccagtcgtcgcagagtgacggcgtgatggacgagtttacgcttgtgaaattagtggatgttcggaaggaagtgcaatgccctatatgcctagttagatgttactgtttttttt

SEQ ID NO: 214816 - DNA, 546 bp, Zea Mays
catgcccccaaaccattctatctagctcattcttggactttcctgcggctgaggacgaagacggcgaagctgaggatgacgagcttgacgcagacgcagaagacaaggagaacatcgaaagcaaggcaggatcttccctgccaaataagaggaaaaggaataacgaggatgatgccaatggatacaagtaaaacggtgagggaaagtagtattttcctgaacttcggaaacgttcctgtgcactgattattatttgtatgcttttcgagtcttttttttcccgcacttgtaatagactagagcatagttttttttaggcggttccacttctgaagtatcgtttggattctggaagttgtctgactctgaaaccatgagtaggatgtgtccccagcacgtatatacgctttgtttggtgtgctttgtttggtgtgacttcctgatgctactaatcgagatcccagtttatattatgctgatgtaaacatggaatttgtgaaacaaattcaagggtaggaaaatttcaatgaagatcggacaccatac

SEQ ID NO: 214817 - DNA, 3201 bp, Zea Mays
  misc_feature (1)..(2): n is a, c, g, or t
nnttgctgcatttcatcgaacaccacttgagcatcaatcgaatatgatgtaggcttgcttgcagtagtcaccatgtctaccgaattgggcttgacaagctttggaatgaggccagagagatagttgggtctttcctcggctgctgttgctctgtgatgcctctgtgtgtgttgtgtctgcgagcgcaggtgcggtttctgttggtcgcttggccagcgaccttgcaggtggtgccagagctgcttggggtcatccttgtcttctcctgctggaacaaccccttgggtaacagacttgcagaggtcggcaggtatggcgcaatacagatccacacacagcttgaagaagagcgacatctcggtgaggatgccacaggtgagctggtgggatggcgtgaggtaggagagctggtccggcagcgagaacgggctgtggtcgaaccctgccacctcgacaggctcgcccatggtcgtgcgcgtgcacgcgaaggagaagttgtcgacgaccatggccatgggcgtgcgtgcgctagcgccccacccgacgcggccgcgcctcagatccctcgagagctatgcaactgctccagcctcgcccacctcagcctgggggtcaaccagctggagggtgagattcctgctggccttggtctgctgtctcagcttcgcaccctctacatccactacaacaatttagtagggagcatcccaccgtcacttggtaaccttaccctgcttcagattcttgatgtccttgagaacaaactggtaggcagcatacctgtaagcctttcccatttagatcgtctggtagactttgaggtgggtagaaataatctctccggcacaattccaccactgctcttcaacaagtcatcgctcctgtatctcggagttgcatcgaacaagctgcatggaagcttgccagctgatgcaggcaccaacctgcctggtgtcaaaaagctcctcctaggtaacaacaggctgtccggaacacttcctagttcacttggtaacgctaccatggtcgaaatattaggtcttggattgaacagattccaagggagggtggcacctgagataggaaagctgtgcccgtttaatgtcgagatgagtgcaaatgaactgcaagcagaagatgaacagggttgggagttcttcacgctgttcacgaactgcacccgtcttcaactgatcgatctacccctgaacaggttaggaggagtgcttcctacttccatcactaacttttcaacacagatccaatggctcagcatcgcggccaatggcatatctggggtggtcccctcaggcttaggaaaccttatcaaccttagcaacctagacatgggtgaaaacgacctgcatggtgtaattcctgaagatatcgcaaaacttacaaatctgcaagtattgttgctagcaaataatcagttctcaggaaatataccatcctcctttggcaacctcacacagctgcagttgttttccttgtcgaacaacagccttgatggccccatccctagaagccttggtaacttgaaaaacttacctagcctggatttgtcctccaatctactcacgggcttcatccctactgagatctttggcctcccctcactgacagattacctattgctatctgataattacttatctggggtaattcctgcacaagttggcagcctaaaaaatatccaaactctcaatctgtcaaaaaacaacttttctggagaaataccagctgcaatcggtggttgtgtaagtttggtgtggcttggtttggctgacaactccttcacgggtagcatcccaaattcatttggcaatcttagaggcctcaacacactaaacctctctaggaattccttgtcaggaacaataccacaagagttgggaaatattactggtttacaagaattatttctggcacataatcatttgtctggaatgattcctaaagttcttgagagcataagtaatttggttgaactagacctctcctttaatatccttgatggtgaggttccaactcgtggggtgtttgctaacatgactggattctcaatggctggaaatcatgggctttgtggaggcattcgagagctagaattgcctccatgtcaggatatgccacaaaagaggtggcaccgtggactgcttaggattgtgcttccaattgctggcactgctatatgcatatctcttctattgtttgtgctctttctgttgaagtggaaagtaacatctgaaaagacaaaaaccgacagctttattgggttgaccgacaagtatccaagagtttcctaccttgaattgtttgaagctactgatggatttgcacccaccaatctgcaatctggttcttcaagaagtttcttggcagaatgcgaagctttgaggcaggtgaaacatcgaaatctgatcgatatcattacctgctgctctagtgttgacactagaggcaatgacttccaggcattagtgttcgagttcatgcccaactacagcctggatagatggctgcaccagcaaacggatgagcagctgcacaaattaaatttaatccaactcttgaatattgcagttgatgttgctgatgcaatagattatcttcacaataatagtcggccatcagtcatccattgtgatttgaagcctaacaacatcctccttgatagtgactggactgcttatgttgctgactttggactttcaaaactgattggtgaatccatgaacatatctggatcatatagtggaagctccatagggataagaggaactgttggatacgttgctccagaatatggaggaggtgggcatgtatccactgcaggtgatgcctacagctttggggttacccttctggagatgttcacagggagagcaccaactgatgatatgttcatagatgggttgagcttgcacttgtttgctgagatggccttacctgacaagttgacagaaattgtggatgcagtgctattagaggtgcaaccatatgaaaacactgcaaattatgacaaaatactggcttgcttagcttcagttgtcagagtcggcatctcatgctcaaaacaaaccccatcagagagaatgagcatgaaagatgcggccattgagctgcatggaatcagagatgtggtaaaggagaactatgtatagggttatggcgatggatcggagcggcgagactggc

SEQ ID NO: 214818 - DNA, 2319 bp, Zea Mays
tccgtctccgtctccatgccctgcccggaatatttgccggagtcctgcggctgaagctgtgtttcggaccctcgtaagcaagcgtgggcttgactccaagtttctcatagactctgctggtaccatcgggtatcatgagggtaataaggcagactcaaggatgagagcagcttcaaaaaagcgggggattgaggtcacatcaatatccaggcctatcaaaccctcggattttcgtgattttgatcttatccttgcaatggacaggcagaactatgaagatatattgaactcgtttgagagatggagacgcaaagagcccctccctgatagtgcacccaataaggttaagctgatgtgctcctactgcaaacaacatactgagtctgaagttccagatccttattatggaggtcctcagggatttgaaaaggtgttggacttattggaagatgcttgcgagtcgctgcttgatagtatcgtcgcaaacaatgcaagcatttctgggtgacatcgatgtaaatctccacatagacatctattttcagacgcaccggctgtagcatccatgcacaaccggagtaatttggttgctaatgcaacattgatcatgtcgttattacccaggtcttggtctggtttgtatataccaccatccttatacctggttatgtgataagtgacaaaaaaactgctcatcatcacttttttccactaaagataatcagaaacaatcagaatgactgacaaagcatgcttatgtccatttgaaacttactattttcgcataaggcatactcggttcctcaggaaccatgcttggaacaattgtttgactaatttatatgacatttgataagctggaacagtttctgggttctggctagatttctagctatccctttgtttgaattttgcactgttttttttttcttcttcccggtgcttttctttagcctgcagcaggctgcaaccagcacgacctccacaggtgactgcggctaccatgaaatcagtcgtcaccggcggtagcactgcacatgcaagaagaagccgccgggcgactgctctgtggcagctgtgtcgtcggccatccacagcctgccctccttctccgccctagccttcaccatgaactgcgcccccgagcccgcgctgccgccaccccgcccaccgaaccaccagtcgtgcacgtcccacatgacgtcgaccacctctccgtcgggcagcacggcggcgcggttgccccggaagccccagcccacccgccgcacctccgtcaccttctcgccgtcgatggtgacccgcagctccccctccccgcccctgcacgcgtgcacggccacctcgtgctcgtccccgccctcgcggaacctgcagcgcgtgacgtgcgccgccgccgccgctgccgcgcagcgcagctgctcccgccggctgacgaggagcgcgggcgcggcgcgagcgctcggtgcgaggccgaggcggcgggagagctcgcgcgccgcgccgcccgcgccgaggaggagcgcgagctcggcgtcggccacgacggcgaggcagtagtcgcgttcgggctccggggacgaaggcgacgggtacttggcctccgcggtgtcccagtgcacgccgacggccgtgccggcgccggtgaccagcgaccggctccctcttctcttgtgcagcaggaggacaggaggcctcgtccgggccggcgacggcttcggcgcgtcggaggtgccgccgccgccgtcgtcatcgaagtcgaaggcgaccgcgacgccggcctctccggccgcgctccgggtccacgtcacccggacgagcacctccttgcccgaggacagcgcggccctgtacacgctggtggtggccgcctgcagcgcccggtcgagcgcgccgcggccggagacggcggcgtcggccgtggccacgctgacggagccgtcgccgaagcaggacagctccctcatcgccgcagccacttgattcggacgccgagcaaagcgacggaacgctgcgaatctgctgcggatgcattggagggaggcgaggtgttttaatcggcgggtgtgcgtgtcgtttggctgggcttgcaatctgcgagaggaggtggcagtcaaacaaaggatttcgtgaatcaaccgacggcagaagcacccgccggtatcttgagttcagctgccgtgttgtattgtattgtattgctagctgaagctgagtgaattttgcacgacggcaagcatgcgtgcatgcatgttggcagctgacagggcgactaccagaccatatcatattccgtcccgatcatgcttgactcccaac

SEQ ID NO: 214819 - DNA, 3772 bp, Zea Mays
gtattttggcggcaacatcagggagtttcccgcgaaaaataattgtggctgtccttgccttggccgcttggcttccatctatctattcctccattttcactgcgttcggacccacattcgttcacttcccaatactggagtggatggtagaaaggagagagagaccacactatgtcgatcgcttggcttccatctacaaatcccgccgccggcccgctggcgatcgctgaggcggtccccatctcgatctcccttgtccagttcttttcgccggagtgcactatgtcggcactgccgccggcagaggaattggatgcgtcgcatcagaagaagcggcggaggaggaaaaagcacagggagcaggtggaggctatagcggcatcctcggagcctcctccacctccggcaagcccggagtccaagcccaagtcaacaattccagtcgctcccgaaaccctaacctcagcggcggtgagggagtctccccgacctctgggaaacccggaatctaagtccgagtcgccgctactagtcgctcccgaaaccctagcctcggcggtgatggcagcggcggcagtgaggctggttaaggagcgcgagaggaagaatcaggtggtgccaccggcatctccgttaatggaggagcccgtgtggaaggaggaaaagcagcgtaagaaaaggaaacacgtgggcgccgcactggtggttccatcgccgccgactcctgatgcggcccaaaacttgcggatggaagccaagatgatggctgagggggcgacggtgaggaagaagcagaggcggctgaaggcggggcaggagcaatccggcgagccaccattttcaattgatgtccatccacaaggaggggaagaagctactgatgatggtggcgttggcgtcatggtcactcagtgtgtcaagaggagcaaaagcaagaactcccgggttttgaagacgcagcagacactgccccaaggttttttccctcccatggccaatcccaattccattgatcaggaccccaattattcctcaccttttggtgcattctttgcccaattcgcctacaaacctgctaatatcgctgatcgcccagcgaggctgcctcctcgaggccacccatcatctgggtcttctctactcactggaaaagagacctccaaggctgcctggacagcaacctcaaacaccaagcaaccatgcccagcctcagaatcaacctcagattcacaagaagaggcaaggatcgaagggaaagaaaagcctgagaagaagatgacaagggagatggcagtgagggagtctacccgacatttggcaatactggaatccatgtctgcttcctcagtcccagtcgctcccgaaaccccaacctcggcggcgatgacagcagcgacagtgatgcaggataaggagtgcaagagggagaatcaggaggcactgccggcagctccattaattgaggaccctgtgccgaaggtagaaaagaggcacaagaaaagaaaagtggcacaaatcacgcagatggaaaacaaggtgatgacagagggtgcgacggtaaggaagaaacataggcggcagaaggtgaagcaggagcaatctggccaaacaccatttctcaatgatgtctattcaaaggcaggggaagaagctgctgctggtggcgtcatgggcagtcagtgtgtcaagaggatcgaccgcagcaagaattccaaggttttgaagaagcagcagacactgccccaaggctttttccctcccatagccaatcccgatttcattgatcaggaccccaattattgttctccttttggtgcattttttgcccaattcgcctacaaacctgagcgccggcaagatgggaatggttcgccacttcctagtaccactggtcgcacagcgaggctgcctcctcgaggccacccgttatctgggtcttctctgcttactgcaaaagaggtctccaaggctgcccggacaacaaccttgaacaccaagcaaccatgcccagcctcagaatcaacctcagattcacaagaagaggcaaggatcgaagggaaagaaaagcctgagaagaagatgacaagggagatggcagcgagggagtctccccgacatttggcaatactggaatccatgtctgcttcctcagtcccagtcgctcccgaaaccctaacctcggcgatgacagcagcgacagtgatgcaggataaggagcgcaagagggagaatcaggaggcgctgccggcagctccattaattgaggaccctgtgccgaaggtagaaaagaggcacaagaaaaggaaggatagggaggctgcaatgattataccatcggtgcccactgctgctgtggcacaaatcacgcagatggaaaagaaggtgatgacagagggtgcgacggtaaggaagaaacataggcggcggaaggtggagcaggagcaatctggcgaaacaccatttctcaatgatgtctattcaagggcaggggaagaagctgctgctggtggcgtcatgggcagacagtgtgtcaagaggatcaaccgcagcaagaattccaaggttttgaagaagcagcagacactgccccaaggctttttccctcccatagctaatcccgatttcattgatcaggaccccaattattgttcaccttttggtgcattttttgcccaattcgcctacaaacctgagcgccggcaagatgggaatggttcgccacttcctagtaccactggtcgcacagcgaggctgcctcctcgaggccacccgtcatctgggtcttctctgcttactgcaaaagaggtctccaaggctgcccggacaacaaccttgaacaccaagcaagcatgcccagcctcagcatcaatctcaagttcacaagaaggtgtaagggtcaagggaaagaaaaaacctgaggagaaaacgacaatggagaaaaagccgaggaaaccaccgatattacttagtcctgccgagaagtggtcagataaataccgccgcctgccgctggatcagctggtgcccccaccacgctccccccataagctattgcaggagaagtatgcttctgacccctggaaggtcatcgtaatatgcatgctcctcaacttaacacagggaaaacaggtcaggaagaaagtgaagggcttcttcaagcgctatcctgatgctcagactgcatatacagctgatcccgaaaagatggcagagtatctagcacctcttggactgcagcgtgtgaaaacaaacagaattcagaaattctctaaggcttacgttggagaagaatggacctatatcactgagctttgtggtgttggcaaggcaaacgaagtggttccaaaagatcacaagttagtagattactggaattatgtctgttttgagttaccctcgattcagaaatcgcaggaggctggagtgacggagctgggaaaccttgtcgctaaggtgcaggaagttgctgtcagctgttgacatgggaaaacagtaacgcggtggcaagcgcttttggtgtttctgcttgcagcttaataatgttattcgctccgttctttttttatctgtcatgttttagttcaaaaatattcgaggactgaggtagtataatatatggggtatttatctagttattggggtagcctatgtttcaatgctggttttgagacaaaaattgaaggtaactagccaaaaggaagaaagaaaagtgctgattttgtgtgcatcctgcatgcccaagaatcctatctttaaagtcctgaatctatgg

SEQ ID NO: 214820 - DNA, 3691 bp, Zea Mays
gtattttggcggcaacatcagggagtttcccgcgaaaaataattgtggctgtccttgccttggccgcttggcttccatctatctattcctccattttcactgcgttcggacccacattcgttcacttcccaatactggagtggatggtagaaaggagagagagaccacactatgtcgatcgcttggcttccatctacaaatcccgccgccggcccgctggcgatcgctgaggcggtccccatctcgatctcccttgtccagttcttttcgccggagtgcactatgtcggcactgccgccggcagaggaattggatgcgtcgcatcagaagaagcggcggaggaggaaaaagcacagggagcaggtggaggctatagcggcatcctcggagcctcctccacctccggcaagcccggagtccaagcccaagtcaacaattccagtcgctcccgaaaccctaacctcagcggcggtgagggagtctccccgacctctgggaaacccggaatctaagtccgagtcgccgctactagtcgctcccgaaaccctagcctcggcggtgatggcagcggcggcagtgaggctggttaaggagcgcgagaggaagaatcaggtggtgccaccggcatctccgttaatggaggagcccgtgtggaaggaggaaaagcagcgtaagaaaaggaaacacgtgggcgccgcactggtggttccatcgccgccgactcctgatgcggcccaaaacttgcggatggaagccaagatgatggctgagggggcgacggtgaggaagaagcagaggcggctgaaggcggggcaggagcaatccggcgagccaccattttcaattgatgtccatccacaaggaggggaagaagctactgatgatggtggcgttggcgtcatggtcactcagtgtgtcaagaggagcaaaagcaagaactcccgggttttgaagacgcagcagacactgccccaagcgaggctgcctcctcgaggccacccatcatctgggtcttctctactcactggaaaagagacctccaaggctgcctggacagcaacctcaaacaccaagcaaccatgcccagcctcagaatcaacctcagattcacaagaagaggcaaggatcgaagggaaagaaaagcctgagaagaagatgacaagggagatggcagtgagggagtctacccgacatttggcaatactggaatccatgtctgcttcctcagtcccagtcgctcccgaaaccccaacctcggcggcgatgacagcagcgacagtgatgcaggataaggagtgcaagagggagaatcaggaggcactgccggcagctccattaattgaggaccctgtgccgaaggtagaaaagaggcacaagaaaagaaaagtggcacaaatcacgcagatggaaaacaaggtgatgacagagggtgcgacggtaaggaagaaacataggcggcagaaggtgaagcaggagcaatctggccaaacaccatttctcaatgatgtctattcaaaggcaggggaagaagctgctgctggtggcgtcatgggcagtcagtgtgtcaagaggatcgaccgcagcaagaattccaaggttttgaagaagcagcagacactgccccaaggctttttccctcccatagccaatcccgatttcattgatcaggaccccaattattgttctccttttggtgcattttttgcccaattcgcctacaaacctgagcgccggcaagatgggaatggttcgccacttcctagtaccactggtcgcacagcgaggctgcctcctcgaggccacccgttatctgggtcttctctgcttactgcaaaagaggtctccaaggctgcccggacaacaaccttgaacaccaagcaaccatgcccagcctcagaatcaacctcagattcacaagaagaggcaaggatcgaagggaaagaaaagcctgagaagaagatgacaagggagatggcagcgagggagtctccccgacatttggcaatactggaatccatgtctgcttcctcagtcccagtcgctcccgaaaccctaacctcggcgatgacagcagcgacagtgatgcaggataaggagcgcaagagggagaatcaggaggcgctgccggcagctccattaattgaggaccctgtgccgaaggtagaaaagaggcacaagaaaaggaaggatagggaggctgcaatgattataccatcggtgcccactgctgctgtggcacaaatcacgcagatggaaaagaaggtgatgacagagggtgcgacggtaaggaagaaacataggcggcggaaggtggagcaggagcaatctggcgaaacaccatttctcaatgatgtctattcaagggcaggggaagaagctgctgctggtggcgtcatgggcagacagtgtgtcaagaggatcaaccgcagcaagaattccaaggttttgaagaagcagcagacactgccccaaggctttttccctcccatagctaatcccgatttcattgatcaggaccccaattattgttcaccttttggtgcattttttgcccaattcgcctacaaacctgagcgccggcaagatgggaatggttcgccacttcctagtaccactggtcgcacagcgaggctgcctcctcgaggccacccgtcatctgggtcttctctgcttactgcaaaagaggtctccaaggctgcccggacaacaaccttgaacaccaagcaagcatgcccagcctcagcatcaatctcaagttcacaagaaggtgtaagggtcaagggaaagaaaaaacctgaggagaaaacgacaatggagaaaaagccgaggaaaccaccgatattacttagtcctgccgagaagtggtcagataaataccgccgcctgccgctggatcagctggtgcccccaccacgctccccccataagctattgcaggagaagtatgcttctgacccctggaaggtcatcgtaatatgcatgctcctcaacttaacacagggaaaacaggtcaggaagaaagtgaagggcttcttcaagcgctatcctgatgctcagactgcatatacagctgatcccgaaaagatggcagagtatctagcacctcttggactgcagcgtgtgaaaacaaacagaattcagaaattctctaaggcttacgttggagaagaatggacctatatcactgagctttgtggtgttggcaagtatgctgctgatgcttacgcaatcttctgtgctggaagggcaaacgaagtggttccaaaagatcacaagttagtagattactggaattatgtctgttttgagttaccctcgattcagaaatcgcaggaggctggagtgacggagctgggaaaccttgtcgctaaggtgcaggaagttgctgtcagctgttgacatgggaaaacagtaacgcggtggcaagcgcttttggtgtttctgcttgcagcttaataatgttattcgctccgttctttttttatctgtcatgttttagttcaaaaatattcgaggactgaggtagtataatatatggggtatttatctagttattggggtagcctatgtttcaatgctggttttgagacaaaaattgaaggtaactagccaaaaggaagaaagaaaagtgctgattttgtgtgcatcctgcatgcccaagaatcctatctttaaagtcctgaatctatgg

SEQ ID NO: 214821 - DNA, 3828 bp, Zea Mays
gtattttggcggcaacatcagggagtttcccgcgaaaaataattgtggctgtccttgccttggccgcttggcttccatctatctattcctccattttcactgcgttcggacccacattcgttcacttcccaatactggagtggatggtagaaaggagagagagaccacactatgtcgatcgcttggcttccatctacaaatcccgccgccggcccgctggcgatcgctgaggcggtccccatctcgatctcccttgtccagttcttttcgccggagtgcactatgtcggcactgccgccggcagaggaattggatgcgtcgcatcagaagaagcggcggaggaggaaaaagcacagggagcaggtggaggctatagcggcatcctcggagcctcctccacctccggcaagcccggagtccaagcccaagtcaacaattccagtcgctcccgaaaccctaacctcagcggcggtgagggagtctccccgacctctgggaaacccggaatctaagtccgagtcgccgctactagtcgctcccgaaaccctagcctcggcggtgatggcagcggcggcagtgaggctggttaaggagcgcgagaggaagaatcaggtggtgccaccggcatctccgttaatggaggagcccgtgtggaaggaggaaaagcagcgtaagaaaaggaaacacgtgggcgccgcactggtggttccatcgccgccgactcctgatgcggcccaaaacttgcggatggaagccaagatgatggctgagggggcgacggtgaggaagaagcagaggcggctgaaggcggggcaggagcaatccggcgagccaccattttcaattgatgtccatccacaaggaggggaagaagctactgatgatggtggcgttggcgtcatggtcactcagtgtgtcaagaggagcaaaagcaagaactcccgggttttgaagacgcagcagacactgccccaaggttttttccctcccatggccaatcccaattccattgatcaggaccccaattattcctcaccttttggtgcattctttgcccaattcgcctacaaacctgctaatatcgctgatcgcccagcgaggctgcctcctcgaggccacccatcatctgggtcttctctactcactggaaaagagacctccaaggctgcctggacagcaacctcaaacaccaagcaaccatgcccagcctcagaatcaacctcagattcacaagaagaggcaaggatcgaagggaaagaaaagcctgagaagaagatgacaagggagatggcagtgagggagtctacccgacatttggcaatactggaatccatgtctgcttcctcagtcccagtcgctcccgaaaccccaacctcggcggcgatgacagcagcgacagtgatgcaggataaggagtgcaagagggagaatcaggaggcactgccggcagctccattaattgaggaccctgtgccgaaggtagaaaagaggcacaagaaaagaaaagtggcacaaatcacgcagatggaaaacaaggtgatgacagagggtgcgacggtaaggaagaaacataggcggcagaaggtgaagcaggagcaatctggccaaacaccatttctcaatgatgtctattcaaaggcaggggaagaagctgctgctggtggcgtcatgggcagtcagtgtgtcaagaggatcgaccgcagcaagaattccaaggttttgaagaagcagcagacactgccccaaggctttttccctcccatagccaatcccgatttcattgatcaggaccccaattattgttctccttttggtgcattttttgcccaattcgcctacaaacctgagcgccggcaagatgggaatggttcgccacttcctagtaccactggtcgcacagcgaggctgcctcctcgaggccacccgttatctgggtcttctctgcttactgcaaaagaggtctccaaggctgcccggacaacaaccttgaacaccaagcaaccatgcccagcctcagaatcaacctcagattcacaagaagaggcaaggatcgaagggaaagaaaagcctgagaagaagatgacaagggagatggcagcgagggagtctccccgacatttggcaatactggaatccatgtctgcttcctcagtcccagtcgctcccgaaaccctaacctcggcgatgacagcagcgacagtgatgcaggataaggagcgcaagagggagaatcaggaggcgctgccggcagctccattaattgaggaccctgtgccgaaggtagaaaagaggcacaagaaaaggaaggatagggaggctgcaatgattataccatcggtgcccactgctgctgtggcacaaatcacgcagatggaaaagaaggtgatgacagagggtgcgacggtaaggaagaaacataggcggcggaaggtggagcaggagcaatctggcgaaacaccatttctcaatgatgtctattcaagggcaggggaagaagctgctgctggtggcgtcatgggcagacagtgtgtcaagaggatcaaccgcagcaagaattccaaggttttgaagaagcagcagacactgccccaaggctttttccctcccatagctaatcccgatttcattgatcaggaccccaattattgttcaccttttggtgcattttttgcccaattcgcctacaaacctgagcgccggcaagatgggaatggttcgccacttcctagtaccactggtcgcacagcgaggctgcctcctcgaggccacccgtcatctgggtcttctctgcttactgcaaaagaggtctccaaggctgcccggacaacaaccttgaacaccaagcaagcatgcccagcctcagcatcaatctcaagttcacaagaaggtgtaagggtcaagggaaagaaaaaacctgaggagaaaacgacaatggagaaaaagccgaggaaaccaccgatattacttagtcctgccgagaagtggtcagataaataccgccgcctgccgctggatcagctggtgcccccaccacgctccccccataagctattgcaggagaagtatgcttctgacccctggaaggtcatcgtaatatgcatgctcctcaacttaacacagggaaaacaggtcaggaagaaagtgaagggcttcttcaagcgctatcctgatgctcagactgcatatacagctgatcccgaaaagatggcagagtatctagcacctcttggactgcagcgtgtgaaaacaaacagaattcagaaattctctaaggcttacgttggagaagaatggacctatatcactgagctttgtggtgttggcaagtatgctgctgatgcttacgcaatcttctgtgctggaagggcaaacgaagtggttccaaaagatcacaagttagtagattactggaattatgtctgttttgagttaccctcgattcagctgtgtgtctgttgcagaaatcgcaggaggctggagtgacggagctgggaaaccttgtcgctaaggtgcaggaagttgctgtcagctgttgacatgggaaaacagtaacgcggtggcaagcgcttttggtgtttctgcttgcagcttaataatgttattcgctccgttctttttttatctgtcatgttttagttcaaaaatattcgaggactgaggtagtataatatatggggtatttatctagttattggggtagcctatgtttcaatgctggttttgagacaaaaattgaaggtaactagccaaaaggaagaaagaaaagtgctgattttgtgtgcatcctgcatgcccaagaatcctatctttaaagtcctgaatctatgg

SEQ ID NO: 214822 - DNA, 2919 bp, Zea Mays
aaacatagcaacctctctctctccaccctgattgcgcgggaacaacgacgctggaatgttaggcgcatctcgtagcaccaccaacagcacggcgtcgagatgagcggtggtggcgacggcggcgacaaggaggccttcttccactgcctggaccgcgtgccttccggcctgcacctcgacgccgatttcccttccgatgacgaagaagacgacgaggatgacgtccgcgtctccttcacctctgccgccggcgaccagcatttcaagagcttccggtaccaggcggccgtgccggtggaggatgacgaggatgacgacgacgatgacgacgacgacgaggacacgtccaagtacgacatgtggatgtccgacgagcccatgtccatccaggagcgccgccgccgcctgcaccaggggctcgggatggccagcagccgggacctcgcgctgcgccggcacagcatgaagaaacgccccgccgatgtcccgcgggccatgtcccggagcgtgtcgaggtcaaagccaccgccgtcgccgatcccagccaatgcggcctcggccgccaacgtgccgagcactacctctgtggcgcaggcggcggctgccgcgccgcggccggcgaaggaggtcatcacgaggcggcgctcggacagcaaccttgtcgtgcgcgacggtgcgtcggtctcggggaagccaccgtcgcagcagcccttgcgacgcgttctgtccttgccggctcggcctgacgcccgcgacagcacgcccgtcgtcgggaaacctcaagccggggctccgcgtgggttgcctgtcgtgccgccgcaggcagcgccagggattaaaggcggcaaaggcgatggcgacgaggggagcaagaacaatcgggacggcgagaaggaggtcgccgtcgtggccgccagcacgcccaaggacgcttcgtcgagcacccagcagcagacgggcgtgctggggcttgaggagttcgagaagttcatcggcaacacccccatcatgaagctcatgcggcgtggcacgagccagaaccagcccgcgccgctgcccgccggcgtgccgcccaaggccgacaagtcgggcggcaagaagaagggcggctggctcaagaacatcaagtcggtggccatagggttcatgcaggacaaggacgccaacgccaagtcgggcgtcgtgtccgcggcggcggccgtgcccaagtccgtcccaaccaatgcctccgccgggtctgctgcgccgccggccgcgggttccgagcggcccaaggtgcaccagtatggcaagtcgagcaaggagctcaccggactctacatgtgtcaggagatccaggcgcacgaggggtccatctggagcatcaagttcagcgcggacgggcggcggctggccagcgccggcgaggacagcgtggtgcgcgtgtggcaggtggtggagaccagcgccccgccgtgctcgctggcgatggatggcaagtcaggcccgctggccccgctgccgtcccccggcgcggccgacggggcgtcttcaacgacgacgccggcgctggcctccatgcccaagaagccggccaaggggaagagcggcggcagggacgcgctccccgagcacctcgtcgtcccggacaaggtgttcgcgctggctgagcagccggcgtgcgtcctcgagggccaccaggacgacgtgctcgacctcacctggtccaagtccgaccagctgctgtcgtcgtcgatggacaagacggtgcggctgtgggacacggagagccaggcgtgcctcaagacgttcgcgcacagcgactacgtgacttgcatccagttcaacccggtggacgaccggtacttcatcagcgggtcgctggacgccaaggtgcggctgtggagcatccccgaccggcaggtcgtcgattggacggacctcaacgagatggtcaccgcggcctcctacacccctgacggccagggggcgatcatcggctcgcacaaagggagctgccggctgtacaagacagcagactgcaagcttagcgcagaggcgcagatcgatatccaacccaagaagcgcaaggcgcaagcgaagaagatcaccggatttcagtttgctccggggaaccctgccgaagtgctggtcacatctgccgactcgcagatccgtgtcttcgacggcgtcaccatggtccaaaagttcagaggtttcaagaacacgagcagccagatcacggcggcctacacctcggacgggcggtacgccgtgtgcgcgagcgaggactcgcacgtctacctgtggcggaccacccgggtgccgccggccgcggccatcggcatcggcatgaagcccaaggcgtggtgcaccatccgctcctacgagaacttctactgcaaggacgtgtccgccgcggtcccctggacgcagtcgccgtccccgccgggcgccggcgacggcagccccactggcggcagcccagcgtcggcggacaagccgccgcagggcgcgtcatgcaacgacgagtcctgcagcgtcgccgccaagccggagggcggcgacccgagcagctgcagcgccgccgctgccgagcccagcagctccgcgcggcagggtggcgccaagggcgacggcggcaacgcgtggggcctggtggtggtcacggcgagcttgggcggggagatcagggtgtaccagaactttgggatgccgttcaggatcaaaggccaggccaattttttctagtgattttgggcactcccgagactgcaattcgtttggctgttcctgttggtgacttctcttctcctaactatatcattttgtgtatgtgatgtgcaatgaaaatagtcaagggtgccatgatttggcgtgttttagctgctgagatgggatttttacttgtaccaaaattagtcaaagaaagaatttttt

SEQ ID NO: 214823 - DNA, 5646 bp, Zea Mays
gccgctggttggctctcccacagtcgtcggcttgtcgacattgcccctacccccacctcccctcgccctgcgtcccgccaggccccctgctccccatgcccggtgcgcgcgacggccaccatggcagacagctcttgggcgactgtggccgccagtgtccaccccgccaccagcgtcgccacctcacctgtctccaccaccgaagcgcacgccaccagtgtcgcgaccactccttgcgcgtacgacgccttctcagttggcacgacctcttctcgcgtgtgcggcgcctggggctcgcccggcttcggccacctggtgctggccgccgccgctacccaatccatctccaacctcgccacaaccgtcgttcccccctccacgttcgatctggacgtcgctgggacccatgccgacatgctaagcgcgtcccctgcatctgcccgctctttgccaccgtcggtgggtactctagggcccatgcgccctccaggcttcctatgctcctcacggtgtgccgccgacgccccctacacagctcctcggcgtcccctccactgttgttgtcttcccgcaacacgactccaccttctctagcctcgacagcatgtcctccctcggcgtggtcgtcgatgcggggctggtgcacggcgagccccctactgcccccctttcccctgcctcgacagccctctacaccgcctttgcaggcatgggcgtggacacccatgtccctgcagcccccatgccctccctgccatgccggcggtcctcgctgccccgtctccggcacggtcgttgctctccgggcaccccttcatgtagctgggctcatccatgggggctccttccccatgtccccctcagtcggttattccgacgacacatcctacaatgtcccaccgccctcaacgcctgcggcttcgcccctccaatcgattccggggacccctacctctgccgcagtccctatgagagcctttgtcatgcctgtcaactcgtcttccctttcctacctcctcgtctagggctgctcaagcctttgatcttgttcattgtgatctctggacatctgttttcagtctctgtggttacaaatactatctggtaatcctggatgatttctctcattttctttggactttttctctgtggcagtgcggctcaagtccgacacctttcacactctcacccatttctacacctaggtctccaaccagttccgtcacccggttcgtgccctctagtgtgataatggccgccagttcgataactccgcctctcgttccttctttctctctcacggtgaaagttacgcctctcgtgtccctacacttcccctcagaacggccgggccaaatgaattattcgcaccaccactaacatgatccgcctcctctttcagccgtatcttcttgccagctattggacaaaggccctgaatactgctacctatctccttaaccgccttccctccaagacggtgagtcaccccactcctagttcgccctgtatggtacaacccacttttatgtccaccttcgtgtctttggctgtgcctgctatcccaacacttccgccactgctcaacacaagctctctcctcgctccactcactgtcttttccttggttactctcctgaccacaaggggtaccgatgccatgacctcctcactcaccgcaccatcatctctcgtcatgttgtttttgatgaggaggtttttccccttgttgacccctcctccccaccccccgacgtcgatttccttctcgatgctgattgtgtcgatgctcgtcttccgttgccctatttcacgcaaccccgtgcggcctcgcccgcgccccgcacgaccctatcgattctgcctgtgtcggatgtggctccaccgactccgcctatgccatgcgcagccccgtcgccgcctccgccacatcgcgtggacccaacgtcccctgcgctgccaagcatggccccattgtcgttcgttgaggtagcctcttagccgcgcttcgcggtcctcgttcacatctaccagcgatgtggccgggtcgatgccccggctccctctcgcgaggagccgcctgtataccattcgattgctctccatcgggaccccaagcatgtccacccgatggttactcggcgtgctgttggtgtccttcaacctatcaaacgcctagttctcacggtgccctcctctctggtgctcccccctgtgccatcctctgtccgtagtgtgctcgtcgaccccacctggcggcgcgctatggaggagtatgaggccttacaggcaaaccacatctgggacctgtgccactccccttcggcgcaaatgtggtcaccgggaaatggatcttcaagcacaagctaaagacggatggctccttggatcggtacaagtctcgctaggtcctgtggggctccatccagcgtctcagggttgactatgacgagactttcagccccgtggtgaagcctgctaccatccggactgttctgactctggctctgtcatggtcctggccagtgcaacagcttgacgtcaagaatgccttcctccatggcactctgacggagacggtgtactacactcaatcggtcctggtcagtgcaacagcttgatgtcaagaatgccttactccatggctcactccgacatggtctgcaagcttaaccggtccttatacgacctcaagcatgcgccctgggcttcgtatagccgcttcgccagtcgccaccttcgtgctctcccatggttttgtcgaggccaaggcggatacctccctgttcgtcttccgtcgaggcctggacacgacgtacctcctctatgtcgacgacattgttctcacgacctcctccctcgagctcttgcggcgcatcatctcttccctcaagcaggaatttgcgcttaaggacttgggtgagctgcaccacttcttgggggtcaccgactcaccgtggaacaccagtcctagcgcctgtttctccaccagcggtattaaaccgtcgacatcctcgagcgcgcatgcatgattgactgcaagccctgtgtgactctggtggacaccaagggcaaggcttcctccgacgatggtggccctcggttgtcgatcccataggatacctgagtcttgccgaggcgctgcggtactcgtcttcacccggcccgacattgcctacgccgtctagcaggtatgcctccacatgcataccccgcgggagccgcatctcaccgccatgaagcggatcctgcggtacctccggggcaccctcgacttcggcctcctccgccactccttgaccactgacctcgtctacatcgacgctgactggatcggcttccccgacacgcgtaggtccactacaggctatgtcgtgttcctgggcgacaaccttgtctcttggtactcgaagcggcaaccagtcgtctctcgctctagtgctgaggctgaccgcgccgtggctagcggtgtggctccgtcagctgctccaggagctccatagttcgctgacatggagcacgctgggctactgtgatgtcagcgtcgtatatctctccatcaacctcgtctaacaccagcgcacgaagcatgtcgagctcgatctccacttcatgcgtgagcgtgtcgccattggagatgtgcgagttcatgtaccaaccacctctcagttcgccgacgtcttcaccaagggccatcccacgccggtgtttgaggagtttcggtccagtctcaacatctatcatggctagagttttgactgcggggggtgttagatgtatttgtgtgtggctgtcattgtattgggccaaggcccacctactctattattaatacatcacccaaccttattgagagagttagggtttcagtcttttccagaatgcaatattatctaagacacatatggatttgcttctctcctcaagttgatagacacatgttttttagaatgctaccttttttaatgaaaagtaggaagtattcctctgatcctataaccctatatattaatatacatgcatataaaagagtgattgtcacagtaagctacatttacattaaaatttgaatctttgtaaggtctactgttggcattggatgtcaagtagtatgatgaaagtttattttgttattatatctaagattgtgcttaaaactggtaggggcatttcacttctaggaaaagaaaaaaaaatcctactttgacctcttttttttatatcctggctggtttaggttatctgagatactgagaccagctagctatcagttagttatacttatgcacattctttgctccataagtattctttatcttcctatgttggcattttcaatttgagttgttgtcacctgaatttcaatacttcatattctataaataccccccccccccccctcaaactaacatatttcaagtatgtttgaacaatgaacagttggtagttctctaaaaaagtttaaggatcttgcaggtttcctgcttctgacaaggcctccaagatgaggaatcttgatgcctcgttgcttccgcaaaccaacaagaatgttcagcagcaaagtgaagtcgatgtgaagcttgcatcaatgctctatgaagctttacttagccttagagaacagataatggaggagtgtaacgaaggattcaatgcgtatcacatattcaaacacgttgaaggaaatgagtatccgagtaccgagaacaaaagaagagcttttggatataaacggcctcggcaagacaaaggtcaagaagtacggggaccgcttgcttgcaaccatcgaggacttcctcagcaaacacccaaatccaaggagaaacagcggcggaggtggcggcggcaacgagcactccgatgcggcaaagaagcgaaggggctccaccgccatctctgcagcgagttacggcgactatgacttcgacgaacgcacgggccagcagtccaagaagcgcgcggccaagacgcgaactgtctctgcccacggcccccgctgcacggacgccgatctcgatgggcctgaggtggtggaggtggacggcgagctgcgcagcgtccggaagcccgtggcgtatggcaatggcagggttcttcccaagtgggcacccctctaacttattccaggaatttgggtacgtcaagtagagtagagtaccgctagggaataggaatgtaggcttgcacatatgtaatctcccaggttggctcgtgcacatgcagcgatgcagtgatgtcaagggttttctgtgatgcagttgtacattggaactgtggcgtcgaatgtacgtccagctggtacacgcgtcaaggacatacgagaccaggagcaagagttccgttgcttgcttccgtgggcagcatcgcgatcgcagtgtcggccacctgttgcccgaaacatcttggatgcaggtacatcttcgcacgcgtgtaccatcaagcgaccaaacttgaattaacatcatcgccatcatcatccgatggctactgtagtaatgtatgcatgtatgctgacgttggactgaccttaaacatttctcttgcatccagttgtcctaggctgtatataggtctagcaagtcttaagggtccgtttgtttcctcgcgggtattctggattatatagtctattttgtataatcttat

SEQ ID NO: 214824 - DNA, 5528 bp, Zea Mays
gccgctggttggctctcccacagtcgtcggcttgtcgacattgcccctacccccacctcccctcgccctgcgtcccgccaggccccctgctccccatgcccggtgcgcgcgacggccaccatggcagacagctcttgggcgactgtggccgccagtgtccaccccgccaccagcgtcgccacctcacctgtctccaccaccgaagcgcacgccaccagtgtcgcgaccactccttgcgcgtacgacgccttctcagttggcacgacctcttctcgcgtgtgcggcgcctggggctcgcccggcttcggccacctggtgctggccgccgccgctacccaatccatctccaacctcgccacaaccgtcgttcccccctccacgttcgatctggacgtcgctgggacccatgccgacatgctaagcgcgtcccctgcatctgcccgctctttgccaccgtcggtgggtactctagggcccatgcgccctccaggcttcctatgctcctcacggtgtgccgccgacgccccctacacagctcctcggcgtcccctccactgttgttgtcttcccgcaacacgactccaccttctctagcctcgacagcatgtcctccctcggcgtggtcgtcgatgcggggctggtgcacggcgagccccctactgcccccctttcccctgcctcgacagccctctacaccgcctttgcaggcatgggcgtggacacccatgtccctgcagcccccatgccctccctgccatgccggcggtcctcgctgccccgtctccggcacggtcgttgctctccgggcaccccttcatgtagctgggctcatccatgggggctccttccccatgtccccctcagtcggttattccgacgacacatcctacaatgtcccaccgccctcaacgcctgcggcttcgcccctccaatcgattccggggacccctacctctgccgcagtccctatgagagcctttgtcatgcctgtcaactcgtcttccctttcctacctcctcgtctagggctgctcaagcctttgatcttgttcattgtgatctctggacatctgttttcagtctctgtggttacaaatactatctggtaatcctggatgatttctctcattttctttggactttttctctgtggcagtgcggctcaagtccgacacctttcacactctcacccatttctacacctaggtctccaaccagttccgtcacccggttcgtgccctctagtgtgataatggccgccagttcgataactccgcctctcgttccttctttctctctcacggtgaaagttacgcctctcgtgtccctacacttcccctcagaacggccgggccaaatgaattattcgcaccaccactaacatgatccgcctcctctttcagccgtatcttcttgccagctattggacaaaggccctgaatactgctacctatctccttaaccgccttccctccaagacggtgagtcaccccactcctagttcgccctgtatggtacaacccacttttatgtccaccttcgtgtctttggctgtgcctgctatcccaacacttccgccactgctcaacacaagctctctcctcgctccactcactgtcttttccttggttactctcctgaccacaaggggtaccgatgccatgacctcctcactcaccgcaccatcatctctcgtcatgttgtttttgatgaggaggtttttccccttgttgacccctcctccccaccccccgacgtcgatttccttctcgatgctgattgtgtcgatgctcgtcttccgttgccctatttcacgcaaccccgtgcggcctcgcccgcgccccgcacgaccctatcgattctgcctgtgtcggatgtggctccaccgactccgcctatgccatgcgcagccccgtcgccgcctccgccacatcgcgtggacccaacgtcccctgcgctgccaagcatggccccattgtcgttcgttgaggtagcctcttagccgcgcttcgcggtcctcgttcacatctaccagcgatgtggccgggtcgatgccccggctccctctcgcgaggagccgcctgtataccattcgattgctctccatcgggaccccaagcatgtccacccgatggttactcggcgtgctgttggtgtccttcaacctatcaaacgcctagttctcacggtgccctcctctctggtgctcccccctgtgccatcctctgtccgtagtgtgctcgtcgaccccacctggcggcgcgctatggaggagtatgaggccttacaggcaaaccacatctgggacctgtgccactccccttcggcgcaaatgtggtcaccgggaaatggatcttcaagcacaagctaaagacggatggctccttggatcggtacaagtctcgctaggtcctgtggggctccatccagcgtctcagggttgactatgacgagactttcagccccgtggtgaagcctgctaccatccggactgttctgactctggctctgtcatggtcctggccagtgcaacagcttgacgtcaagaatgccttcctccatggcactctgacggagacggtgtactacactcaatcggtcctggtcagtgcaacagcttgatgtcaagaatgccttactccatggctcactccgacatggtctgcaagcttaaccggtccttatacgacctcaagcatgcgccctgggcttcgtatagccgcttcgccagtcgccaccttcgtgctctcccatggttttgtcgaggccaaggcggatacctccctgttcgtcttccgtcgaggcctggacacgacgtacctcctctatgtcgacgacattgttctcacgacctcctccctcgagctcttgcggcgcatcatctcttccctcaagcaggaatttgcgcttaaggacttgggtgagctgcaccacttcttgggggtcaccgactcaccgtggaacaccagtcctagcgcctgtttctccaccagcggtattaaaccgtcgacatcctcgagcgcgcatgcatgattgactgcaagccctgtgtgactctggtggacaccaagggcaaggcttcctccgacgatggtggccctcggttgtcgatcccataggatacctgagtcttgccgaggcgctgcggtactcgtcttcacccggcccgacattgcctacgccgtctagcaggtatgcctccacatgcataccccgcgggagccgcatctcaccgccatgaagcggatcctgcggtacctccggggcaccctcgacttcggcctcctccgccactccttgaccactgacctcgtctacatcgacgctgactggatcggcttccccgacacgcgtaggtccactacaggctatgtcgtgttcctgggcgacaaccttgtctcttggtactcgaagcggcaaccagtcgtctctcgctctagtgctgaggctgaccgcgccgtggctagcggtgtggctccgtcagctgctccaggagctccatagttcgctgacatggagcacgctgggctactgtgatgtcagcgtcgtatatctctccatcaacctcgtctaacaccagcgcacgaagcatgtcgagctcgatctccacttcatgcgtgagcgtgtcgccattggagatgtgcgagttcatgtaccaaccacctctcagttcgccgacgtcttcaccaagggccatcccacgccggtgtttgaggagtttcggtccagtctcaacatctatcatggctagagttttgactgcggggggtgttagatgtatttgtgtgtggctgtcattgtattgggccaaggcccacctactctattattaatacatcacccaaccttattgagagagttagggtttcagtcttttccagaatgcaatattatctaagacacatatggatttgcttctctcctcaagttgatagacacatgttttttagaatgctaccttttttaatgaaaagtaggaagtattcctctgatcctataaccctatatattaatatacatgcatataaaagagtgattgtcacagtaagctacatttacattaaaatttgaatctttgtaaggtctactgttggcattggatgtcaagtagtatgatgaaagtttattttgttattatatctaagattgtgcttaaaactggtaggggcatttcacttctaggaaaagaaaaaaaaatcctactttgacctcttttttttatatcctggctggtttaggttatctgagatactgagaccagctagctatcagttagttatacttatgcacattctttgctccataagtattctttatcttcctatgttggcattttcaatttgagttgttgtcacctgaatttcaatacttcatattctataaataccccccccccccccctcaaactaacatatttcaagtatgtttgaacaatgaacagttggtagttctctaaaaaagtttaaggatcttgcaggtttcctgcttctgacaaggcctccaagatgaggaatcttgatgcctcgttgcttccgcaaaccaacaagaatgttcagcagcaaagtgaagtcgatgtgaagcttgcatcaatgctctatgaagctttacttagccttagagaacagataatggaggagtgtaacgaaggattcaatgcgtatcacatattcaaaacagacacgttgaaggaaatgagtatccgagtaccgagaacaaaagaagagcttttggatataaacggcctcggcaagacaaaggtcaagaagtacggggaccgcttgcttgcaaccatcgaggacttcctcagcaaacacccaaatccaaggagaaacagcggcggaggtggcggcggcaacgagcactccgatgcggcaaagaagcgaaggggctccaccgccatctctgcagcgagttacggcgactatgacttcgacgaacgcacgggccagcagtccaagaagcgcgcggccaagacgcgaactgtctctgcccacggcccccgctgcacggacgccgatctcgatgggcctgaggtggtggaggtggacggcgagctgcgcagcgtccggaagcccgtggcgtatggcaatggcagggttcttcccaagtgggcacccctctaacttattccaggaatttggttgtacattggaactgtggcgtcgaatgtacgtccagctggtacacgcgtcaaggacatacgagaccaggagcaagagttccgttgcttgcttccgtgggcagcatcgcgatcgcagtgtcggccacctgttgcccgaaacatcttggatgcaggtacatcttcgcacgcgtgtaccatcaagcgaccaaacttgaattaacatcatcgccatcatcatccgatggctactgtagtaatgtatgcatgtatgctgacgttggactgaccttaaacatttctcttgcatccagttgtcctaggctgtatataggtctagcaagtcttaagggtccgtttgtttcctcgcgggtattctggattatatagtctattttgtataatcttat

SEQ ID NO: 214825 - DNA, 4173 bp, Zea Mays
cgccacgttagcaaccagcgcgtctgccacaggtcgtggctcgcttctcccctgcttttccgcatcgccgcagcgccgacgacgactgggtgcgcagcgcggcgccgccgttctacgccgggcgcccaagtcctcgacgggaccttctctggcgacgagcgccccaccaggccctaagctcatatgagcacggagcatcaatgcaagctaataaaccaccaaaggtcaattggccgcaccacgaaaacgctgtccaaggctactctagcagagacgactttctgagttcaagctttctcttctccttgccgacacagaggccgaaccctgaagctcgtgagaggatgctttcgctaaggtcttctgcctgtaaaattcaaggcccagagcgtcttcaggctccgttgatcgagaaggcctggcgttccctatgcaacactcaggctgcctgcaagagctatttaagacctggtttatctgcaaaagcgagagactgtgatagaggtcatgctcgtacctatggagaaggctcatacaacaccaacaaaatgtctactgtgccaggaaacaggattctttccatggaaagcacaggccaacccagtgaaagagtttctctgcagaacaacagcagccatcaaacagttggcatctgctcctctatgagaagtcaccagaacaaccatgttgtgcaggaagatatgagagcaacaaatcaatacaattttgcaagaacaaacgctgcattacaccaatctatggctgctgataacatgtgctcttatgataaatttgatgccatggatgatgatattctagcgactattgacgtggaccaaatagttatggaacattatcaagcaacaaatgcacccagaggatcagcatcccataacatgtcaactccaccaggaaacaagtgtagcgtcaatggcatggatgaggctaatttaccacgagaactatctgaattatgtaaccatcaatgcaagctagctttttgcagagaggcaatgactcatctgcaggagatgaaggatgagctgcttgcagtagccaatgagcttcttgatgatgatggtgaactcaatcctcaacattcacaagaacttcataaaagacgattgcatcttaaaaaactggttcagctacttgaggaccatatgacaaggtcagcccaagatgaggagagacaaatatcacactctatggcatccacaacatctacacagcagcatctgccacctatgaccccaggaagcacttttacaatggatagcaatagattccaatctcaggtttacgttggaaatggacctagggatagtgatttatgctattctcctgccccatattcctgttcagataatttaagcacaccattaaattctgtatggaagagctataccccaaaggttatcgatattaactacactgaaggatctggtgatagaaagtggagtagtacaaatttcccatggactaaggaacttgaggccaagaacagaaataagtttggaaaccattctttccgccccaaccaacgagaaataatcaatgccacaatgagtgggcatgatgtttttgttttgatgccaactggtggtgggaaaagtttgacatatcagcttccagcacttataagttctggcttaacattagtagtttgccctcttgtctcactgatccaagaccagatcatgcacttgtcacaggctaatattcctgcaacttatttgagtggcaacttggactggtctgaacagcaagagataatgaaagatttaatgtcatgccgctacaagttgctatacgtcactccagagaaaatagctaagagtggtgctttatcgagactattggacaatttaaattcacaagggcacctttctagaattgttattgatgaagctcattgtgtaagccagtggggtcatgacttccgtcctgattacaagagcttaggtgttctaaaacaaaacttccccaagacaccagtcctggccttgactgcaacagcaactgctagggttaaggaagatgtcgtgcaagctttagcccttgaaaactgcattgttttcaaacaaagttttaatcgtgcaaatctgaggtactacttaagacccaagacaaagaaatgcgttgaggacattgatttatttatccgcacaaatcattctaaagaatgtggcattatatattgcctttcaagaatggattgtgaaaaagtggcagaaaaactaagggactgtgggcacaaagtatcacactaccatggtagcatggatcctatggatagaacacatatacagaagctttggagcaaggataagatcaacataatctgtgctacagttgcatttgggatgggtatcaataaacctgatgttcgctttgttattcatcattcactgcccaagtcaattgaaggatatcatcaggagtgtggacgtgcgggtagagatgggcaaccttcatcttgtgtgctatattaccagtattctgactatattcgggtccgacatatgattacacaaggagttacggagcaaacaggagcaccacgtgatttatcttcacatgagcaagcactgaagacacataaggacaatctcctgaggatggtcagttactgtgaaaatgacgtggactgcagacgcctacttcaactgatccactttggagagaagtttgacccttcgctttgtgcaagaacatgtgataattgcttgaaagagtcaggatgggtcgaaaaagatgttaccaacattgccaggcaattggttgagctagtcacaaggacagggcactcacattcatctacttacattcttgaagtttacagagggtctatgagccaaaatgtcaagaagcagcgtcatgatgctttagctcttcatggagctgggaggcatctagctaaaggtgaggcagcaaggataatgcgacatttagtaactgaggaaatacttaatgaggatgtgaaaaagagcgatatgtttcctgcttctgacaaggcctccaagatgaggaatcttgatgcctcgttgcttccgcaaaccaacaagaatgttcagcagcaaagtgaagtcgatgtgaagcttgcatcaatgctctatgaagctttacttagccttagagaacagataatggaggagtgtaacgaaggattcaatgcgtatcacatattcaaaacagacacgttgaaggaaatgagtatccgagtaccgagaacaaaagaagagcttttggatataaacggcctcggcaagacaaaggtcaagaagtacggggaccgcttgcttgcaaccatcgaggacttcctcagcaaacacccaaatccaaggagaaacagcggcggaggtggcggcggcaacgagcactccgatgcggcaaagaagcgaaggggctccaccgccatctctgcagcgagttacggcgactatgacttcgacgaacgcacgggccagcagtccaagaagcgcgcggccaagacgcgaactgtctctgcccacggcccccgctgcacggacgccgatctcgatgggcctgaggtggtggaggtggacggcgagctgcgcagcgtccggaagcccgtggcgtatggcaatggcagggttcttcccaagtgggcacccctctaacttattccaggaatttgggtacgtcaagtagagtagagtaccgctagggaataggaatgtaggcttgcacatatgtaatctcccaggttggctcgtgcacatgcagcgatgcagtgatgtcaagggttttctgtgatgcagttgtacattggaactgtggcgtcgaatgtacgtccagctggtacacgcgtcaaggacatacgagaccaggagcaagagttccgttgcttgcttccgtgggcagcatcgcgatcgcagtgtcggccacctgttgcccgaaacatcttggatgcaggtacatcttcgcacgcgtgtaccatcaagcgaccaaacttgaattaacatcatcgccatcatcatccgatggctactgtagtaatgtatgcatgtatgctgacgttggactgaccttaaacatttctcttgcatccagttgtcctaggctgtatataggtctagcaagtcttaagggtccgtttgtttcctcgcgggtattctggattatatagtctattttgtataatcttat

SEQ ID NO: 214826 - DNA, 4240 bp, Zea Mays
attccgcgccctgcctcgcggtcgcccttctgttttcttctccggccgcacccatttccgcggaatcccaccgccgccccgcccccgttcactcttcccccgcagccgccacgttagcaaccagcgcgtctgccacaggtcgtggctcgcttctcccctgcttttccgcatcgccgcagcgccgacgacgactgggtgcgcagcgcggcgccgccgttctacgccgggcgcccaagtcctcgacgggaccttctctggcgacgagcgccccaccaggccctaagctcatatgagcacggagcatcaatgcaagctaataaaccaccaaaggtcaattggccgcaccacgaaaacgctgtccaaggctactctagcagagacgactttctgagttcaagctttctcttctccttgccgacacagaggccgaaccctgaagctcgtgagaggatgctttcgctaaggtcttctgcctgtaaaattcaaggcccagagcgtcttcaggctccgttgatcgagaaggcctggcgttccctatgcaacactcaggctgcctgcaagagctatttaagacctggtttatctgcaaaagcgagagactgtgatagaggtcatgctcgtacctatggagaaggctcatacaacaccaacaaaatgtctactgtgccaggaaacaggattctttccatggaaagcacaggccaacccagtgaaagagtttctctgcagaacaacagcagccatcaaacagttggcatctgctcctctatgagaagtcaccagaacaaccatgttgtgcaggaagatatgagagcaacaaatcaatacaattttgcaagaacaaacgctgcattacaccaatctatggctgctgataacatgtgctcttatgataaatttgatgccatggatgatgatattctagcgactattgacgtggaccaaatagttatggaacattatcaagcaacaaatgcacccagaggatcagcatcccataacatgtcaactccaccaggaaacaagtgtagcgtcaatggcatggatgaggctaatttaccacgagaactatctgaattatgtaaccatcaatgcaagctagctttttgcagagaggcaatgactcatctgcaggagatgaaggatgagctgcttgcagtagccaatgagcttcttgatgatgatggtgaactcaatcctcaacattcacaagaacttcataaaagacgattgcatcttaaaaaactggttcagctacttgaggaccatatgacaaggtcagcccaagatgaggagagacaaatatcacactctatggcatccacaacatctacacagcagcatctgccacctatgaccccaggaagcacttttacaatggatagcaatagattccaatctcaggtttacgttggaaatggacctagggatagtgatttatgctattctcctgccccatattcctgttcagataatttaagcacaccattaaattctgtatggaagagctataccccaaaggttatcgatattaactacactgaaggatctggtgatagaaagtggagtagtacaaatttcccatggactaaggaacttgaggccaagaacagaaataagtttggaaaccattctttccgccccaaccaacgagaaataatcaatgccacaatgagtgggcatgatgtttttgttttgatgccaactggtggtgggaaaagtttgacatatcagcttccagcacttataagttctggcttaacattagtagtttgccctcttgtctcactgatccaagaccagatcatgcacttgtcacaggctaatattcctgcaacttatttgagtggcaacttggactggtctgaacagcaagagataatgaaagatttaatgtcatgccgctacaagttgctatacgtcactccagagaaaatagctaagagtggtgctttatcgagactattggacaatttaaattcacaagggcacctttctagaattgttattgatgaagctcattgtgtaagccagtggggtcatgacttccgtcctgattacaagagcttaggtgttctaaaacaaaacttccccaagacaccagtcctggccttgactgcaacagcaactgctagggttaaggaagatgtcgtgcaagctttagcccttgaaaactgcattgttttcaaacaaagttttaatcgtgcaaatctgaggtactacttaagacccaagacaaagaaatgcgttgaggacattgatttatttatccgcacaaatcattctaaagaatgtggcattatatattgcctttcaagaatggattgtgaaaaagtggcagaaaaactaagggactgtgggcacaaagtatcacactaccatggtagcatggatcctatggatagaacacatatacagaagctttggagcaaggataagatcaacataatctgtgctacagttgcatttgggatgggtatcaataaacctgatgttcgctttgttattcatcattcactgcccaagtcaattgaaggatatcatcaggagtgtggacgtgcgggtagagatgggcaaccttcatcttgtgtgctatattaccagtattctgactatattcgggtccgacatatgattacacaaggagttacggagcaaacaggagcaccacgtgatttatcttcacatgagcaagcactgaagacacataaggacaatctcctgaggatggtcagttactgtgaaaatgacgtggactgcagacgcctacttcaactgatccactttggagagaagtttgacccttcgctttgtgcaagaacatgtgataattgcttgaaagagtcaggatgggtcgaaaaagatgttaccaacattgccaggcaattggttgagctagtcacaaggacagggcactcacattcatctacttacattcttgaagtttacagagggtctatgagccaaaatgtcaagaagcagcgtcatgatgctttagctcttcatggagctgggaggcatctagctaaaggtgaggcagcaaggataatgcgacatttagtaactgaggaaatacttaatgaggatgtgaaaaagagcgatatgtatggatcaatatcatctgtcctcaaggtaaatcatttgaaagctagtggtcttctctctggcaagcacaacatcgtcctgaagtttcctgcttctgacaaggcctccaagatgaggaatcttgatgcctcgttgcttccgcaaaccaacaagaatgttcagcagcaaagtgaagtcgatgtgaagcttgcatcaatgctctatgaagctttacttagccttagagaacagataatggaggagtgtaacgaaggattcaatgcgtatcacatattcaaaacagacacgttgaaggaaatgagtatccgagtaccgagaacaaaagaagagcttttggatataaacggcctcggcaagacaaaggtcaagaagtacggggaccgcttgcttgcaaccatcgaggacttcctcagcaaacacccaaatccaaggagaaacagcggcggaggtggcggcggcaacgagcactccgatgcggcaaagaagcgaaggggctccaccgccatctctgcagcgagttacggcgactatgacttcgacgaacgcacgggccagcagtccaagaagcgcgcggccaagacgcgaactgtctctgcccacggcccccgctgcacggacgccgatctcgatgggcctgaggtggtggaggtggacggcgagctgcgcagcgtccggaagcccgtggcgtatggcaatggcagggttcttcccaagtgggcacccctctaacttattccaggaatttggttgtacattggaactgtggcgtcgaatgtacgtccagctggtacacgcgtcaaggacatacgagaccaggagcaagagttccgttgcttgcttccgtgggcagcatcgcgatcgcagtgtcggccacctgttgcccgaaacatcttggatgcaggtacatcttcgcacgcgtgtaccatcaagcgaccaaacttgaattaacatcatcgccatcatcatccgatggctactgtagtaatgtatgcatgtatgctgacgttggactgaccttaaacatttctcttgcatccagttgtcctaggctgtatataggtctagcaagtcttaagggtccgtttgtttcctcgcgggtattctggattatatagtctattttgtataatcttat

SEQ ID NO: 214827 - DNA, 441 bp, Zea Mays
agcggtagcggccagccgggtggaatcttctctccgtccctggtctagcaatcaagcgccctgccgctctaggcaccaaaacctcgcgaggcaaccgcccgccggcgccgccgacgtagcaagagggtgagctgaggactagaggagagggaagatgtcgttccgcgcgcgggagatgtacaagaaggtggtgcggcgcttgggtggcgaggggaagctgccggctgagctgatgaagtcggtgaaggacatactgccggacagcaacgtcgtcatggggcgggccaagcgcggcatcttcgcggggcgacacatccggttcgggaacaaggtctccgaggacggcggcaacaattcaattttgttgcttcggtatttcgagagatggctgagcttcaccgctgcgagatcatgctggagcatatgaagtgtggcactcgt

SEQ ID NO: 214828 - DNA, 476 bp, Zea Mays
ggcagggagggacctaaaaatcaagcccaaaggcccaagcttcttttcttccccgcaaagaaagaagggaagagttctcggcttctcgcgagtcgcgacagagagaggcggagttgcggagaatatgcagagcagcagcatgaagagggagatcagcgaggcccacgacaccattcgcttcggcatcaacgccggcgtcaaagccgacctcgccccgccgcacccgctccagtctaccatccaatcggagaccaagttctgggcggacaagaagaagttcgggacagatgccatatatggatccgccctcaacatccgcaaggatctcgatgcccaaatcctctccaggttccaaaggccccctggtgctttgccgtcatctctgcttggatacgaggcactgacaggttccctggatgattttggatttgaagattatcttaacagcacggccgcgcgggggatgtcggatgggg

SEQ ID NO: 214829 - DNA, 3200 bp, Zea Mays
aacaaagcaaactttccagtttcccttgattctctctcttcgaaaactaaaagcaaactttccggtttcccttgattttctctcttcgaaaactaaagagcatcgaaactgaaacatcagagcaaaacccccttctccccactccccagcaagtctctaccaccatctcttctgctactgcaactgagaaccccagcaactgaaaaccccattctccgcggagcagccccattgtagattaagcaatgctagtagacattgttgatctttccagtgatgatgacgaggtggctgttacagaagaacacagtgttgatggaaaaggtgtttatgcgaaggcaaatttttttgacttaactattgacgatggcattcttgaaggagagcatattgcttacgaacaagaacaaggagattctgctcagggcacatcattttataaacaagagttcattgcagatgatggacaagctgaagctgcccagtgcatagtaacattagagttgcaaaatcttggagcagatggtggatgctatgcttctcaatgcacagagacattgttggtgcaacaacttagaagaaatgatggacaaaatgatgctgcccactccacaggaacactaccgatacaagaacttagaacagatggtggacaacacgatgcggcccagtgcacaacaagtctacatatgcaagagcttagagcaactgatgtacaaggtgatgctgcctgtttcacaccaacattacagaggcaagaacatacagcagggaatgaacaaggtgacactgtccagtacacaacaacacaacagggtcaggaatctattgcagatgacacacgaggtgattttactcactgcacaacagcactgcaatggcaaggatctcataaagctcagtgcacaacaacattactaaggcaggagtttctagcagcaggtgatagaatgcaagatgctgcactgttgagaaattcagctgaagctaccacatccttgacaagtacacaacaagggagacacatgagaactgaattattcaatgtgtcaactgcaacaccatttccccggcaattttggaaagctggagagaaagctggagactatggattagcttctcaagctgatctcaacaatgaccacaaccgcttacagattcaccccaagtttcttcattctaatgctacttcacataaatggccattcggtgctattgcagaactgctcgacaacgctattgatgaggtgagcagtggggcaacctttgtgaaaattgataagatgaagcattctcctaagggggattattcattggtaatagaagataatggcggcggcatgagtccaaaatctctacgacaatgtatgagctttggattttcccagaaaagcacaacttcatccatcgggcaatatggaaatggcttcaaaactagcacgatgaggcttggggcagatgctattgtattcacatgcactaaagatgataggagattgacacgaagtatcgggttgctgtcttacacattccttatgagaagtaactgcaatgacatatttgtaccagtggttgattatgaattggatgccttgtcttcaactttcaagaggaaaatgaactgcggtgaaaaacattttttatctaatcttttcactattttgaagtggtctccattttcgacagaagatgaattattgaatcaattcagcaatatggagtgccatggcacaaaaatcattgtattcaacttgtggttgaatgatgcattggaaatggagcttgactttataactgataaagaggatattttggtctcaggagcaccggaaatacgagcagggcggaatacagtggaaagcttgacacagatgcatgtagcaaaccgtttccgatattcgcttcgggtgtatgcatctatactatacctacatgtacctgaaaactttcaaatcatcttgtgtggacgagctgttgaaccacattatgttgtcaatgatctcatataccgtgaatgtatcatatatcgaccacatgttcaagtaaccacagaggttgatgtcattactacaattggctacttaaaaggtgctccacgacttgatatctatggatttagtgtctaccataagaaccgtcttatactgccctattggcctgcaggttcatgtagtggacgtagaagaggcattgctggggttttggaggcaaacttcataagacctacacatgataagcaagattttgagaggacgggtcttttccaaagacttgagacacgattgaaagacatggcaaaagagtattggacttaccattgtcatatggttggttacactcgggtcatgaaaaagcctcctccagcacattatgtatcaactattgctgagaagggtgatgataacttagcagctcagtctaccacaaagacttatggttacaattcaagagccagggtaccggtagcattgcagccttgttccaatgcatataacacacaagatcctatgcatgctgatgttggtgtcgtgatggatcaaatgaactatggtgcatgcccttcaatgactataaatgtggggacaacattacattcactaagatatgcaccacaacaatctcaatctgaactatgcaaacgaagaaagtcttcggagattcactggagatctcaaaaaaagcagaacaccaatatttattcggataaacctgaaagcgatagtggaacagagatggcagagttcagagttgtacttgactcgtccaccatgctaaaggctgagtgctctgaacttgaggcagcaggaaagcagctggcctctaaggcagataaattgaggatagaactcgatgtgtggcagcggatgtaccagggcctaagtgacaaattgcgatcctacgatgggcttcaaaggttgcgttgcagtcgccattgcagcagctccagtattgggttcatatgagctaagagaagcaattccagcgttggattcacaatcaagttagaaatggcattagtccctcaaagtctatcttttcgtgactgtagatctggcagtatattatttgttagacctagtaagggtttttggggctagtccccttgtaattaactgcataccctgtgtaaggcagacccatctatacttagtctattaatacaactcctaaccctagttagggctagtttttccattctc

SEQ ID NO: 214830 - DNA, 1278 bp, Zea Mays
ggagactagaaatcgttctttcgtttcgctacgtccattgcctttcttcatcaagcaacaaacaaaaaaacaacaggagaacaggcaaaggcctccctccctcaactcaggaaaccatccaacttgtcgatcggccttgcttgccttggtactcctgcttccgccatggttcagatcaaagagttccggatcgtcatgcccatgtccatggaagagtacgagatagggctgagctacaccatcatgaagatggagcagcagaacaccaacagcaaggagggcgtggaggtgctgcagcaggccccgttccacgaggatgccaagcttggcaagggccacttcacttccaaagtttatcatctgcaaagcaagattccgtcatggatgaagggctttgcacctgccagcgccctcgcggtgcacgaggactcgtggtgtgcgtttccaaagagcagaacagtgatcaagtgcccgctcttcagcaagtgctcactcaccattgacactgtcaccaggcccgacaacggttgctctgaaaatgcgcacggtttgagcggcgagcagttagccgcgagagaagtcgagatcatcgacatcgcttccgtgtcgcgggactactggagcaaggcgatcggcgctccgagcgtcgacctgactgccttcaagtcacagcggacagaacgaggccctcttctcaagggatggatggactcgtgccatccggtgatgaccacgtacaagctggtgaccatggacgctcccatatggggcctcggcgaacgcctggaagactgcatcattgcgggggagagggcgttgttcttggcatgccaccggctgtgcttcgcgtggatcgacgagtggtacggcatgaccgtggagcagatccgcgagatggagcggcagacggacatgctgctcaagaagacgctgaagaaggccgggagcaataagcacgagggcaacacgaagacgctcaaagacgagctagtggccgtggggagctagtggccgtggggcatcaaacatgtcacagattaggcatgtgcaagtgtaatgtgtccacaattaactgaagaaaatatgcatcgctgtatgtatctatataggagtacaatgaaggcagccatctgtggtttgtctttaaccccctaaaactagcaagctagctcgtgcaaatagtattatttcactgcttcctgcattctatttctatcttttattaggtgagtgcccgtgcgttgcaacggaaccgtataataacacaataacttatgt

SEQ ID NO: 214831 - DNA, 1963 bp, Zea Mays
cggggagcccagtcgagcgccggggaagacgacgcagacaggcgcggtgcagacagtcggccgtggatccgttctaagaaacggactgccgtaacaacgatttgagcgccgactaaatcttacacagataccgaaattccaaagttcaacggattataatactaaaattccaattacgttgttcgggatatatattttcagaagcccaatgttaatgatatcacgtttccaaaaagctcagccatggcggcacgacgccacctgactccgttgaaagaaacccaccttggccacctctctgccccaccatgcggccccctggtcccatttgtctgacactaccccctacctccccgtcccaacctcgtctaatcgctgcggcgccagtgcccaaatctaaaccctagcgccgccaccgccatgctgcgccgcatcgccgccgtcgccccgcgggccttcttctcctcgtcacccccgcacgccccgtcgcttccggcgtcgggctacatcccgcgccgcgagtacggcctggtgcccatggtgatcgagcacacctcccgcggggagcgcgcctacgacatcttctcgcgccttctcaaggagcgcatcgtctgcatccatggccccatcaccgacgacacggcctccctcgtcgtcgcccagctgctcttcctcgagtccgagaaccccgccaagcccgttcacctctacattaactccccggggggcgtcgtcacggcgggcctcgccatctacgacacaatgcagtacatccgctcccccgtcaccacgctctgcatcggccaggccgcctccatggcgtcgctactcctcgccgcgggggcgagcggagagaggcgggcgctgccgaacgcgcgggtcatgatccaccagccctccggtggcgcgtcggggcaggcctcggacatcgccatccacgccaaggagatcctcaaggtgcgcgaccggctcaataagatctatgccaagcacacgggccaggccatcgaccgcatcgagcagtgtatggagagggacatgttcatggacccggaggaggcacatgaatgggggctcatcgacgaggtcatcgagcaccgccctgtctctcttgtgtctgatgctgttggcagtgatccgccaaacctcggtggaggcggaactgaggtgaataaagggacggacgagccatctccagcgtgatggcattgggcagtcacaagcacttgatagctttctataatgagaagctgatttcatagagttttctaccgagacgggagaactgagtgcagcttgcattttatctctgctatatgggattgagtgttggcggactaagagacgacatatccaacaactaagtgtcgcagagatgcgtatgttgtgttggatatatgggcacacaagattggaccgagtcagaaacgatgacatacacgatcggctagtagtaacgccaattgaaaaaaacttattcaacaccggttgagatggtttgggcatgtccaccagagaccccagaggcaccgctgtatagagacatcataagacgggacaataatgtgaagagaggtagaggtcgaccaaatttgacatgagaggaggcaatcaaaagggacttgaaggaatggattatcccaatggagctgtgtttggatagaggtgcttggaaagaagctatccacgtgcctgaaccgtgattaggtctttttccttttagtgctctcaaaagctttttcccttctctttctttctctttttggtgacatgttgggtttcaactttagcctactctaacttgtttgggactaaaatgctatgttgatgttggaggaactggatactgaattttctgtgtcagaaactaagaagggaccttggcattattatttttaagatagattataaaccatatgtaacattacccaataacaataatctttttaactgcttctcttat

SEQ ID NO: 214832 - DNA, 2414 bp, Zea Mays
ccaaaccctagacgggtaatctagggctactctccattcagtggttatggagcctcccaggaagaataagtccagtggcatgcaagtcaaggaggaagtgaagttagaagatggaaatgatttgttagtcaagcgcaggaggactgaacttccaggttccattgttcaactacaacagaaaattgaagtatttgacatggagaacaaagtgccagatggtctttcagttgaagattctactggcaaggatcccatggatgtgctcactagatatgcagcacagaactctggtcaagggaatagttgcagtaacgaacctgcaatctcgagactgacaaaaatatgcaaggcaattggctggaaagaaccatcatatgactttgaagaacaaggacctccgcataacagaatgacaacacagttccacttgttggaccctcactatgacgagcaccataggggacgactcatcgcagaagggcaggtgttgcccgttctgcggtccaggacccatgacaggtttctagacatgcggtacgacgacaggtacactcctctccttgagagggctggcttggacgtcgtatcgttccaggttcgccgcgggttgcccacaatcaacattgcggcgatcacagctttggtcgataggtggcggccggagactcacactttccatcttccttgcggcgagatgaccgtgacactgcgagacagccagaagcaacttggtctcagtattcgtgggcgtccagtgaccggtcaggcagcgcccggtggctggagacagagagtcgaggcctttcttggaagggaggttcccacagacacaccaggtagccacacatctggggtttctctcgcctggcttaggcagtcgttcggggagtgtccagctgcagcagatgaccagacgctgggcttctgcagtgctatccttcctgtacagacaactttgtgaggcttgtcgtcggacggcaaagaacgcaagtttaggcggttgcgtgtacctactccagttgtggatgtggtcgcacctaccggttggtcgccctattgagtttgctcctcgaccttggttcgacgtcgtcggcttgcgactacgaccgacggcggcttaccgttgggaccaggtccaggctccgttcgcacgtcaccagcgcgcctacgtcgagtactcaaacgagctggacgcacttacaccgtcgatggttagctggcaaccatatgatgagccaccgttgccacacattcagttgagctccgcgtgcacgacagatgaagacatttatttattaaggtgtccactgatttgtttctatgccgttgagtaccacttgcctcatagagtagcacgccagttcggtctacgtcaggagttccctgtggagcccttctcgacatcggtagaactccacaagttcgaccgccaaaagcagaagaagatcactgactttgaggcgcaccaccaagtgtacattgacgaatgggaccaaatgcatgacctcctctaccagagcgatcagtcccacaccaactacaactttcgcgagtacatctcttggtatgtcggtgtaactcggtgcaagttgaagggccagtggacatcagcggactacgccgaactagagtcttcagatgacgaagacacatcctatgacctagttactcggcatgggacacacgtggaggctgcaccaatcctagatagagtgggcaactccatgatgcagtctgtggtcgacatcgagcatttctctaagaccacttctgacgacaggacacttgcctttctctcaaggctatcacgtcgcctacgttgtgctgctgctcgttgtggttgcaggattagcgccgtagttaacatacaacatactctgcagcaccatggtgacacctcgctaggacttggagctatcaccgttgcacagggctcgtcacgtacgacacgagatgcgtttgcgagccacaaggaggacgaggatgacattaagattcctctcgacaagattggaccataggatgctcctaagacaaccttcacagcctataccacgcagacgatggcgacgatcgcgcaaccctaacaccccaggcatcaacgctcttggggccaagggcaacggtaactagaaggatgcgagggaaacatgatggtgcatgtcttctgctttggcttttttgtgctatggactatggatgacgatatagactttctgcgttgtacactttggttgatgatatagattatctgtggtatgcactttgtttgatctagttgtgtgatgcgctatttagagatatatatgctcatatcatattagttttttttataattgtggatgttactaaaaccatgtccagtagtctatccatactttagctgttgttctgcactgtagattgcactgttc

SEQ ID NO: 214833 - DNA, 1752 bp, Zea Mays
tctaatttgttcggtcctcggaataaaggaaccgttgcttcacttgcaagctagcactgctcatgggcatatgacttcggcatctagaacaacaacactttacacttcaggcatctagaacaacacagcgtgttaaagacgacgacgacgacaacgggggaagctttcatgctcatgggcaacacgtggccggtgggcatggcgggagggaacacggcggcgacgctgtggtgcagccactgcggcatgggcatcgcggcgccggcgcccgggtccggctctatcgtccggtgcgcgttctgccgcggggtgacgcgcgtcgagcaccagcgcggcggcgtgggcgagagagccatgacgacgaggacgctcgcggctgcagcctcgctgccgcggcagcttccggtctccgcggggcccgtcgagatcccggccagctaccccagggtgagcggcggcaacaagaagcgggcgctcctggtcggggtcagctacacgggcaccgcgcacgagctcaaggggacggtcaacgacgtcaaggagatgaggaggctcctctgcgacaggttcgggttcccgggcgcctgcatcctggagctcaccgagaaggagagtgaccccaccagggtgccgacgagggagaacctgctgcgggcgatgcggtggctcgtggaggggtccagcagcggcgactcgctggtgttccacttctccgggcacggcgtgcagaagctggacatgaacgacgacgaggtggacgggtacaacgaggcgctctgccccatggacttcgagcggagcggcaagatcctggacgacgagatcaacgacaccatcgtgcggccgctcggcaagggcgtgaagctgcacgccatcgtggacacctgccacagcggcaccatactggacctcccctacctctgccgcatgtccagtgggagaaccacgcccgcccttcgggcatgctgacgaagcgccccaacggaggcctggccatctccatcagcggctgcagcgacgaccagaagtccgccgacgccagcggattttccgatgagtcgtcttcgatcggcgccatgacggacagcttcatcaaggcggtggaggccgagccggggacgacgtacgggcggctgctgagcgcgatgaggacgaggatccgtgacggccaggggagccgccgcctccccggcaggcttggctccttcgtccgctggatgatcccgtccagcagcgtgcaggagcctcagctttgctcttcagagatgttcgacatctacaggaagccgttcctcctctgatttggtcgtcgtctcgtcggctgcgaattccaaacttgatctgagtgatattgttgtgctgtgtaactccatcagttcaacccttgtgcatatgtgccatgtaattatattttacgcgtgaatcaagtcatgcctctcgccaaacgcaccagcacctgccagatgcatgcactactagcagggtcagaaatttcgaactcacggcctttttgcagagctccaccgtccggctctaaattcatcatattcatctaaatccatcatgaaacagctacacgtggatctaagttttatgcaagtatttgcattggtacacctccaacttagggatgacaatgggtacggtggacgggcgggtaacgggtatctgccggatagcggatacccggtgggtacggttatgggtagagatccatactcacgaacgtttatgggcacgaatatggtttaa

SEQ ID NO: 214834 - DNA, 595 bp, Zea Mays
gaaggtccgcgtggttccatggaagtttaactataacagtggacaactagcaccaaagacgattattgatcaaatttatgggaacacactatcaatttcggaaataaaaacagcagacattcctgataatgtcctatcctctgttggagttgtaagcgatgaatgtgtttgacttccaacttatcaaggatttgcttttctcggcctgatttcagaatggtttcttctctgaactgatcgacttcaagggtgttgggttgcaatgctcctataatttcctgttatccagctagctctagcatcaatcatttacccctatgagatttagatgaggttgcagctacagaaatagtggtggtttgcatgctattatgaatagcaagctgaagaagctagcaaagaaggatgaagaagtggttgttgcatctggcatcccatgtacaacaatcagaactggttctctacaaagcgctcccggtggcgagagaggtttcaattttactgagcaaccaagggaagaaaacgcaaagaggatgctgctgccatatgtgtggaagctttgaatagcattccccaaaagacactcatttttgag

SEQ ID NO: 214835 - DNA, 3320 bp, Zea Mays
atgcctaggctctccctcaccgtcactgacgacgccgctgccatgccctttgtgcttcggcttggtggttccccagcgctccgccctggctcgcagtccccatcgtggctgcgctttggcggcagggccggggcgcggaaggcgctgttctgctccgccgaggacgctaggcggtgtggctcggacgatgatgcggaggcggaggagtgtcggaggagaggcgggagccgcgtgccatcagataggaggataaggggcaggaatgcggctgccacggtgatctgcagtcaggtgataacgtccagataacaggaccagtcggcaaagaaatgttgatgcccaaagaccccaacgctaccattataatgcttgccaccggtacaggtatcgctccgttccgatcgttactgtggaagatgttctttgagaagcatgacgagtacaagttacagttcaaaggtctgggctagctcttcctgggtgttccaacgagcagctcgttgctctacaaggaggagttcaggaagatgaaggagagagcgtcggagaacttccgggtcgactacgccgtcagccgggagcagacgaacgcggcgggggagaggatgtacatccagacccggatggcggagtacaaagaggaattgtgggagctcctgaagaaggacaacacctacgtctacatgtgtgggctgaaaggcatggagaacggtatcgatgacattatggtatcgctggctgaaaaagacggtatgcaaataatctttaattttgaacccttagttccaaataaagtagatatataaagcagcaggtgtgcagatgacgaaactaagccatatacttcctagcttcatctcaaaaatattcggtcacttttaagcacagcaaaagggctattaatttgcacttgatctctccgatgaccctttcgatccattcatgtttttgttgtgttcgctcaaacagttggatcaagaatctctcaaatataataatgtgaatggtagatcaagcaggtctgcatatgacgaaattaagttagacttctctcacttccttgatctgaaaataacttttattggtacggtaccttctaagcacagtaaaaaggctgtttcgctttatatctccgacgaccctttcgcctcatgttttcattgtgttcgctgaaacagtttggattcgatgcacccgaaatttttgcaatgattctaccgagactttgggggccttatttgggagcaacaacgcatgcgattttcgggtgcgcgcttccttcctgtcgctgcaggtggtctggtacagatactgtgcgctcgccttctccttcagctcagcacctgcttgtgcttctgatggcagaaaacctgagtgttcaaattcaacattggctacagagacaaccgtacggcggcagaagaacatcttcaggcggaaggaaatgtggcagccattattgttgcttagtgttctattattattattactgtctagctatagctcatagctggtgtttctttccctttaactgatgatgtttgtaacaaccatagctttactgaatgatgagtaaacaatcagacaatgagcagcaggtcatgacaaagaactaccttgtctagctagctaggtctactttctggacaaagtcatcacatcaagggcggtctcaataccacaggccgggtcatcaaattgtggccttgatgatcctttctgcgctttatttgtttctctctttccctttccatctcactctccatggagatatcaggaaccaaacgatgctgaccctgaaggtatgagctcttgctgtgaaattgatggtggcgctgagacttgtgtggcatatattgcttacttaaatgtcaagaatcgactggttcgactacaagaagcagctgaagaggggagatcaatggaatgtggaggtctactaaccgctgaattttgcaggtgacattttgtgttgtgcgtatctgtaagtgaggccagggtgtactgcgtatataatgtagatagtgagtgtgttctgcgtttttttactatggcagtctctgtttatagatttgtataagtactcttaatattatgcctattcgattttttgtatgagtaatgtgatcaagtgcccaagaatttctgtccccacatttttttttgatttgcaaagatcttgtagatatattatttttaagttttggtttatgacaatcctagagaaaattttattttattttgcatcgaaactgataccctacacaatgaacatttgcccctgacaaccaacagaagttacacaacaagcttactgcaatatcatagaccatactgtccctctctttttttcctgcacatttatcgtgtttcttcttttttcctgtgcagtaaatttatagttattatgctaatgcagaagcatgcataagaaaaaggcgaacagcaactgcgtactatatttgcaggaatattctgctctccagtattgcacacacactctactctgtatttctccagtattgatcgtcttgcttgataacgcagatgatacaatagtacaagttattatttgaccctgattgttgcctctgcaggtttggatgcgactggaagaagatcgaggagcatgtcggcaccaagacgacggtccagatacggagccacgcccagaaatacttcctcaaggtccagaagcttgggctggctgttgggctgccgctgatgtacccgaggcgccacttcgccatgcagcagcagcagcagagctcggtagccggtggtagcagcgcgaccgccatgccgctgctgcacggccggcaacctacttgcgcgccggtcgccatgccaggtctggccgagcccgacaccgtcgcccatcacggttccatcggatggagcagccccagtgtggtcgtccccgcggccagcggcggcggcgacaaggatgcaaggcttggacttggagtgggtggcagcattgatagaagtgattacaagtcgggcgaccagctggtcgtgctataggaccaaccaggcgcctaatcgtgattagggtaacgattaggacgcctaatcggtcttggtaagtgtgaactatgcaatctacatacatcctgtgaagtgtgaactataggattccagtggacagtggtaagagataggaaagggagagaaggaggggagcaggtgctaagggagtggtaactgcacataatcgttgtggcaaggtttttgaagcgagtagctaagcctcagcagtccgtaatttctgttgttgcttcgccaccctcagcacacgatgaagttgttgttctgaa

SEQ ID NO: 214836 - DNA, 3747 bp, Zea Mays
aaaaaacaaaaatagccaaccgagcgagacagaggcacacagccggacgcgcaccacggtaccagagcacacacggaggtgccaccgcgcgccgcagccggagcatggcgacgccgctggccgggaagggcccgatcgcggcggcgatcccgcggtccccacccccactggccgagggcggcgcgggagggtcggcggccgaggcgcccgtgctcatcttcgtctacttccacaaggcgatccgcgcggagctggagcggatgcacgccgcggcggtgcgcctcgccatggggcgcgcgggcggggacgtggccacgctcgaggcgcgctgccggttcctcttcaccgtctacaggcaccactgcgacgccgaggacgcggttatttttccagcacttgacattcgagtgaaaaatgtcgcagggacatattctcttgaacataaaggagaaaatgatcttttcgcacatctattcactctgctacagttggatgtgcagaatgataatgctattaggagggaacttgcatcctgtactggagcaattcggacgtttgtatcccaacacatgtccaaggaagaagaacaggttgttttcacgtggtttggagggaaatcagaaagcagttctacatgtgagtctagctctggccaaacagataaacatgcacattcacttgaacacaccaaaattggaaagaggaagtctatagaatcaagtcagcttgtcactcatccaattgatgagattctgtattggcacaatgctgttctgagagaactgagtgatatagcagaggagactaaaaggatacatcagtctggagatttttctgacatagcaggatttaatatgaggctgcaatttattgcagatgtgtgcattttccacagtattgccgaggatcaagttatattccctgcagtggatggtgaattgtcctttgtgcaggagcatgctgaagaagaacggcgattgaataaatttaggagtttaattgaacaaattcaactagcaggagccaagtcaactgtagttgattttcattcagagttatgctcacaagctgatcaaataatgcagaaaattgagagtcacttcaatgatgaggaaataaaggtacttcctaaagctaggataaagttctcaccggagaaacagagggaacttttatatcagagtctatgtgtcatgccactaaagctgttggagcgtgttctaccatggtttatagtgaaactgaatgatgcagaggcagtgtcttttcttcagaatatgcggttggcagcaccttcctctgaaactgcattggttactcttctctctggctgggcgtgcaaaggtcgtctggaggacacatccaaccctggaaagttcgtatgcatggcatcaggagcggtcacttgtgcgtcagatgggaatggtttcaaaacatgccagtcactctgtccatgttatgtaagtagcaatggagctttttcaaaaccagttaagagagcaagtcaaggagaatctagcacaaatactgacagaaatcatagctcacacaatgctgctactgaagcatcgcaatgtaacaacagagcctgttacattcccaggttaagagtagaaagtagctaccttggtgttcattcatctacccctacaaaatcctttcgccctctgtctttcaattatgttgcaccttcattatattcaagccttttctcatgggacacagatacactagtatccggcccagataacatttctaagccaattgataccatattcaaattccacaaggcaattcgcaaggatttagagtttttggatttggaatctggaaagcttattgacgggaacgagtcttgccttagccaattcattggaaggtttcgtttactgtggggtctatatagagcacacagcaatgctgaagatgagattgtatttcctgctcttgaatcgaaggaggcattgcacaatgttagtcattcatacactcttgatcacaagcaggaagaaaaattgttccaagatatatccactgtactatctgaactttctcaactacatgatggtttgagctatcctcttgatgttgaagctggaacaaatgatatttcaagtaatgagattgattgggctagaaagcgtaatgaacttttgacaaagcttcaaggattatgcaaatctatccgggtcacgttgtcaaatcatgttcatagagaagaacttgagttgtggccattgttcgataaacatttttctgtagacgagcaggataagattatcggtcatataattggaactactggtgctgaggttctgcagtcaatgttaccttgggttacatcagcacttagtttagaggaacagaacatgatgctggatacatggaagcaagcaaccaaaaacaccatgtttgatgaatggctaaatgaatggtggaagggaccttcaacttcatctgacccatcagacaaggcttctactccttcagaagaaagtcattttcaggagaatcttgaacaaaatgaccagatgtttaggcctggttggaaggacattttccgaatgaatcagagtgagctcgaggctgagattcgaaaggtctctcgagattctactcttgatccaaggaggaaggcctatctgatccaaaatctcatgaccagccgttggatagctgctcagcagaaatcaccacaaccaagcgtcgaaggacataatggatgtacacgacgacctggatgtgttgcttcgtaccgagacccagggaaacaaatatttggctgtgagcattacaaaagaaactgcaagcttgttgctgcatgctgcgataagttattcacttgcagattctgtcacgataaagttagtgaccatacaatggacaggaaatcagtgatggagatgatgtgcatgcaatgtctgaatgttcaacctgttggtccaaattgtcaatccccttcttgcaatggactgtccatggccaagtattattgtagcatatgcaagttcttcgatgatgaaaggagtgtctaccattgtcctttttgcaacttgtgtcgccttgggagcggattgggcactgatttttttcattgcatgaagtgcaattgttgccttggcataaagatgatagaacataaatgccgggaaaagatgctagagatgaactgtccaatctgctgcgactttttgtttacatcgagtgcaccagttaaaggccttccttgtggccacttcatgcattcggcttgttttcaggcatatacttgtacccactacacttgtccaatctgctgcaaatccttgggagatatgacggtgtattttggcatgcttgatggtttgctggctgcagaacagcttcctgaggaataccaggaccggtgccaggatatactgtgtaacgactgcgagagaaaaggcaggtcacggtttcattggctctaccacaagtgtggtttctgtggttcttacaacaccagagttatcaagactgatacggcagagtgttctcgccctctataatttcttttatgcaatccatttgtatatatatatcgacggggtagaaaccttgtgaccgtaggtgtgatagtttttttatagagtgaactgggggaggaaccccacctggatgtattatgaggaaaaagtgactgtgcacatgaggagtctgagaattactcgctcccgtcccaaactaactgtatttctacgatttgaaatatattcgctcatatatttc

SEQ ID NO: 214837 - DNA, 3621 bp, Zea Mays
atggcgacgccgctggccgggaagggcccgatcgcggcggcgatcccgcggtccccacccccactggccgagggcggcgcgggagggtcggcggccgaggcgcccgtgctcatcttcgtctacttccacaaggcgatccgcgcggagctggagcggatgcacgccgcggcggtgcgcctcgccatggggcgcgcgggcggggacgtggccacgctcgaggcgcgctgccggttcctcttcaccgtctacaggcaccactgcgacgccgaggacgcggttatttttccagcacttgacattcgagtgaaaaatgtcgcagggacatattctcttgaacataaaggagaaaatgatcttttcgcacatctattcactctgctacagttggatgtgcagaatgataatgctattaggagggaacttgcatcctgtactggagcaattcggacgtttgtatcccaacacatgtccaaggaagaagaacaggttgttttcacgtggtttggagggaaatcagaaagcagttctacatgtgagtctagctctggccaaacagataaacatgcacattcacttgaacacaccaaaattggaaagaggaagtctatagaatcaagtcagcttgtcactcatccaattgatgagattctgtattggcacaatgctgttctgagagaactgagtgatatagcagaggagactaaaaggatacatcagtctggagatttttctgacatagcaggatttaatatgaggctgcaatttattgcagatgtgtgcattttccacagtattgccgaggatcaagttatattccctgcagtggatggtgaattgtcctttgtgcaggagcatgctgaagaagaacggcgattgaataaatttaggagtttaattgaacaaattcaactagcaggagccaagtcaactgtagttgattttcattcagagttatgctcacaagctgatcaaataatgcagaaaattgagagtcacttcaatgatgaggaaataaaggtacttcctaaagctaggataaagttctcaccggagaaacagagggaacttttatatcagagtctatgtgtcatgccactaaagctgttggagcgtgttctaccatggtttatagtgaaactgaatgatgcagaggcagtgtcttttcttcagaatatgcggttggcagcaccttcctctgaaactgcattggttactcttctctctggctgggcgtgcaaaggtcgtctggaggacacatccaaccctggaaagttcgtatgcatggcatcaggagcggtcacttgtgcgtcagatgggaatggtttcaaaacatgccagtcactctgtccatgttatgtaagtagcaatggagctttttcaaaaccagttaagagagcaagtcaaggagaatctagcacaaatactgacagaaatcatagctcacacaatgctgctactgaagcatcgcaatgtaacaacagagcctgttacattcccaggttaagagtagaaagtagctaccttggtgttcattcatctacccctacaaaatcctttcgccctctgtctttcaattatgttgcaccttcattatattcaagccttttctcatgggacacagatacactagtatccggcccagataacatttctaagccaattgataccatattcaaattccacaaggcaattcgcaaggatttagagtttttggatttggaatctggaaagcttattgacgggaacgagtcttgccttagccaattcattggaaggtttcgtttactgtggggtctatatagagcacacagcaatgctgaagatgagattgtatttcctgctcttgaatcgaaggaggcattgcacaatgttagtcattcatacactcttgatcacaagcaggaagaaaaattgttccaagatatatccactgtactatctgaactttctcaactacatgatggtttgagctatcctcttgatgttgaagctggaacaaatgatatttcaagtaatgagattgattgggctagaaagcgtaatgaacttttgacaaagcttcaaggattatgcaaatctatccgggtcacgttgtcaaatcatgttcatagagaagaacttgagttgtggccattgttcgataaacatttttctgtagacgagcaggataagattatcggtcatataattggaactactggtgctgaggttctgcagtcaatgttaccttgggttacatcagcacttagtttagaggaacagaacatgatgctggatacatggaagcaagcaaccaaaaacaccatgtttgatgaatggctaaatgaatggtggaagggaccttcaacttcatctgacccatcagacaaggcttctactccttcagaagaaagtcattttcaggagaatcttgaacaaaatgaccagatgtttaggcctggttggaaggacattttccgaatgaatcagagtgagctcgaggctgagattcgaaaggtctctcgagattctactcttgatccaaggaggaaggcctatctgatccaaaatctcatgaccagaaatcaccacaaccaagcgtcgaaggacataatggatgtacacgacgacctggatgtgttgcttcgtaccgagacccagggaaacaaatatttggctgtgagcattacaaaagaaactgcaagcttgttgctgcatgctgcgataagttattcacttgcagattctgtcacgataaagttagtgaccatacaatggacaggaaatcagtgatggagatgatgtgcatgcaatgtctgaatgttcaacctgttggtccaaattgtcaatccccttcttgcaatggactgtccatggccaagtattattgtagcatatgcaagttcttcgatgatgaaaggagtgtctaccattgtcctttttgcaacttgtgtcgccttgggagcggattgggcactgatttttttcattgcatgaagtgcaattgttgccttggcataaagatgatagaacataaatgccgggaaaagatgctagagatgaactgtccaatctgctgcgactttttgtttacatcgagtgcaccagttaaaggccttccttgtggccacttcatgcattcggcttgttttcaggcatatacttgtacccactacacttgtccaatctgctgcaaatccttgggagatatgacggtgtattttggcatgcttgatggtttgctggctgcagaacagcttcctgaggaataccaggaccggtgccaggatatactgtgtaacgactgcgagagaaaaggcaggtcacggtttcattggctctaccacaagtgtggtttctgtggttcttacaacaccagagttatcaagactgatacggcagagtgttctcgccctctataatttcttttatgcaatccatttgtatatatatatcgacggggtagaaaccttgtgaccgtaggtgtgatagtttttttatagagtgaactgggggaggaaccccacctggatgtattatgaggaaaaagtgactgtgcacatgaggagtctgagaattactcgctcccgtcccaaactaactgtatttctacgatttgaaatatattcgctcatatatttc

SEQ ID NO: 214838 - DNA, 3830 bp, Zea Mays
atggcgacgccgctggccgggaagggcccgatcgcggcggcgatcccgcggtccccacccccactggccgagggcggcgcgggagggtcggcggccgaggcgcccgtgctcatcttcgtctacttccacaaggcgatccgcgcggagctggagcggatgcacgccgcggcggtgcgcctcgccatggggcgcgcgggcggggacgtggccacgctcgaggcgcgctgccggttcctcttcaccgtctacaggcaccactgcgacgccgaggacgcggttatttttccagcacttgacattcgagtgaaaaatgtcgcagggacatattctcttgaacataaaggagaaaatgatcttttcgcacatctattcactctgctacagttggatgtgcagaatgataatgctattaggagggaacttgcatcctgtactggagcaattcggacgtttgtatcccaacacatgtccaaggaagaagaacaggtcttcccgttactcatcaagaagttttcacacgaagagcaagcagatttagtatggcagttcttatgtagcatccctgtaaacatgatggcaaaatttcttccatggatttctgcttctgtttctacagatgagaatcaagatattcttgactgcctaagtaaaatagttcctgaagaaaaactcctccaagaggttgttttcacgtggtttggagggaaatcagaaagcagttctacatgtgagtctagctctggccaaacagataaacatgcacattcacttgaacacaccaaaattggaaagaggaagtctatagaatcaagtcagcttgtcactcatccaattgatgagattctgtattggcacaatgctgttctgagagaactgagtgatatagcagaggagactaaaaggatacatcagtctggagatttttctgacatagcaggatttaatatgaggctgcaatttattgcagatgtgtgcattttccacagtattgccgaggatcaagttatattccctgcagtggatggtgaattgtcctttgtgcaggagcatgctgaagaagaacggcgattgaataaatttaggagtttaattgaacaaattcaactagcaggagccaagtcaactgtagttgattttcattcagagttatgctcacaagctgatcaaataatgcagaaaattgagagtcacttcaatgatgaggaaataaaggtacttcctaaagctaggataaagttctcaccggagaaacagagggaacttttatatcagagtctatgtgtcatgccactaaagctgttggagcgtgttctaccatggtttatagtgaaactgaatgatgcagaggcagtgtcttttcttcagaatatgcggttggcagcaccttcctctgaaactgcattggttactcttctctctggctgggcgtgcaaaggtcgtctggaggacacatccaaccctggaaagttcgtatgcatggcatcaggagcggtcacttgtgcgtcagatgggaatggtttcaaaacatgccagtcactctgtccatgttatgtaagtagcaatggagctttttcaaaaccagttaagagagcaagtcaaggagaatctagcacaaatactgacagaaatcatagctcacacaatgctgctactgaagcatcgcaatgtaacaacagagcctgttacattcccaggttaagagtagaaagtagctaccttggtgttcattcatctacccctacaaaatcctttcgccctctgtctttcaattatgttgcaccttcattatattcaagccttttctcatgggacacagatacactagtatccggcccagataacatttctaagccaattgataccatattcaaattccacaaggcaattcgcaaggatttagagtttttggatttggaatctggaaagcttattgacgggaacgagtcttgccttagccaattcattggaaggtttcgtttactgtggggtctatatagagcacacagcaatgctgaagatgagattgtatttcctgctcttgaatcgaaggaggcattgcacaatgttagtcattcatacactcttgatcacaagcaggaagaaaaattgttccaagatatatccactgtactatctgaactttctcaactacatgatggtttgagctatcctcttgatgttgaagctggaacaaatgatatttcaagtaatgagattgattgggctagaaagcgtaatgaacttttgacaaagcttcaaggattatgcaaatctatccgggtcacgttgtcaaatcatgttcatagagaagaacttgagttgtggccattgttcgataaacatttttctgtagacgagcaggataagattatcggtcatataattggaactactggtgctgaggttctgcagtcaatgttaccttgggttacatcagcacttagtttagaggaacagaacatgatgctggatacatggaagcaagcaaccaaaaacaccatgtttgatgaatggctaaatgaatggtggaagggaccttcaacttcatctgacccatcagacaaggcttctactccttcagaagaaagtcattttcaggagaatcttgaacaaaatgaccagatgtttaggcctggttggaaggacattttccgaatgaatcagagtgagctcgaggctgagattcgaaaggtctctcgagattctactcttgatccaaggaggaaggcctatctgatccaaaatctcatgaccagccgttggatagctgctcagcagaaatcaccacaaccaagcgtcgaaggacataatggatgtacacgacgacctggatgtgttgcttcgtaccgagacccagggaaacaaatatttggctgtgagcattacaaaagaaactgcaagcttgttgctgcatgctgcgataagttattcacttgcagattctgtcacgataaagttagtgaccatacaatggacagtgatggagatgatgtgcatgcaatgtctgaatgttcaacctgttggtccaaattgtcaatccccttcttgcaatggactgtccatggccaagtattattgtagcatatgcaagttcttcgatgatgaaaggagtgtctaccattgtcctttttgcaacttgtgtcgccttgggagcggattgggcactgatttttttcattgcatgaagtgcaattgttgccttggcataaagatgatagaacataaatgccgggaaaagatgctagagatgaactgtccaatctgctgcgactttttgtttacatcgagtgcaccagttaaaggccttccttgtggccacttcatgcattcggcttgttttcaggcatatacttgtacccactacacttgtccaatctgctgcaaatccttgggagatatgacggtgtattttggcatgcttgatggtttgctggctgcagaacagcttcctgaggaataccaggaccggtgccaggatatactgtgtaacgactgcgagagaaaaggcaggtcacggtttcattggctctaccacaagtgtggtttctgtggttcttacaacaccagagttatcaagactgatacggcagagtgttctcgccctctataatttcttttatgcaatccatttgtatatatatatcgacggggtagaaaccttgtgaccgtaggtgtgatagtttttttatagagtgaactgggggaggaaccccacctggatgtattatgaggaaaaagtgactgtgcacatgaggagtctgagaattactcgctcccgtcccaaactaactgtatttctacgatttgaaatatattcgctcatatatttc

SEQ ID NO: 214839 - DNA, 3780 bp, Zea Mays
atggcgacgccgctggccgggaagggcccgatcgcggcggcgatcccgcggtccccacccccactggccgagggcggcgcgggagggtcggcggccgaggcgcccgtgctcatcttcgtctacttccacaaggcgatccgcgcggagctggagcggatgcacgccgcggcggtgcgcctcgccatggggcgcgcgggcggggacgtggccacgctcgaggcgcgctgccggttcctcttcaccgtctacaggcaccactgcgacgccgaggacgcggttatttttccagcacttgacattcgagtgaaaaatgtcgcagggacatattctcttgaacataaaggagaaaatgatcttttcgcacatctattcactctgctacagttggatgtgcagaatgataatgctattaggagggaacttgcatcctgtactggagcaattcggacgtttgtatcccaacacatgtccaaggaagaagaacaggtcttcccgttactcatcaagaagttttcacacgaagagcaagcagatttagtatggcagttcttatgtagcatccctgtaaacatgatggcaaaatttcttccatggatttctgcttctgtttctacagatgagaatcaagatattcttgactgcctaagtaaaatagttcctgaagaaaaactcctccaagaggttgttttcacgtggtttggagggaaatcagaaagcagttctacatgtgagtctagctctggccaaacagataaacatgcacattcacttgaacacaccaaaattggaaagaggaagtctatagaatcaagtcagcttgtcactcatccaattgatgagattctgtattggcacaatgctgttctgagagaactgagtgatatagcagaggagactaaaaggatacatcagtctggagatttttctgacatagcaggatttaatatgaggctgcaatttattgcagatgtgtgcattttccacaggagcatgctgaagaagaacggcgattgaataaatttaggagtttaattgaacaaattcaactagcaggagccaagtcaactgtagttgattttcattcagagttatgctcacaagctgatcaaataatgcagaaaattgagagtcacttcaatgatgaggaaataaaggtacttcctaaagctaggataaagttctcaccggagaaacagagggaacttttatatcagagtctatgtgtcatgccactaaagctgttggagcgtgttctaccatggtttatagtgaaactgaatgatgcagaggcagtgtcttttcttcagaatatgcggttggcagcaccttcctctgaaactgcattggttactcttctctctggctgggcgtgcaaaggtcgtctggaggacacatccaaccctggaaagttcgtatgcatggcatcaggagcggtcacttgtgcgtcagatgggaatggtttcaaaacatgccagtcactctgtccatgttatgtaagtagcaatggagctttttcaaaaccagttaagagagcaagtcaaggagaatctagcacaaatactgacagaaatcatagctcacacaatgctgctactgaagcatcgcaatgtaacaacagagcctgttacattcccaggttaagagtagaaagtagctaccttggtgttcattcatctacccctacaaaatcctttcgccctctgtctttcaattatgttgcaccttcattatattcaagccttttctcatgggacacagatacactagtatccggcccagataacatttctaagccaattgataccatattcaaattccacaaggcaattcgcaaggatttagagtttttggatttggaatctggaaagcttattgacgggaacgagtcttgccttagccaattcattggaaggtttcgtttactgtggggtctatatagagcacacagcaatgctgaagatgagattgtatttcctgctcttgaatcgaaggaggcattgcacaatgttagtcattcatacactcttgatcacaagcaggaagaaaaattgttccaagatatatccactgtactatctgaactttctcaactacatgatggtttgagctatcctcttgatgttgaagctggaacaaatgatatttcaagtaatgagattgattgggctagaaagcgtaatgaacttttgacaaagcttcaaggattatgcaaatctatccgggtcacgttgtcaaatcatgttcatagagaagaacttgagttgtggccattgttcgataaacatttttctgtagacgagcaggataagattatcggtcatataattggaactactggtgctgaggttctgcagtcaatgttaccttgggttacatcagcacttagtttagaggaacagaacatgatgctggatacatggaagcaagcaaccaaaaacaccatgtttgatgaatggctaaatgaatggtggaagggaccttcaacttcatctgacccatcagacaaggcttctactccttcagaagaaagtcattttcaggagaatcttgaacaaaatgaccagatgtttaggcctggttggaaggacattttccgaatgaatcagagtgagctcgaggctgagattcgaaaggtctctcgagattctactcttgatccaaggaggaaggcctatctgatccaaaatctcatgaccagccgttggatagctgctcagcagaaatcaccacaaccaagcgtcgaaggacataatggatgtacacgacgacctggatgtgttgcttcgtaccgagacccagggaaacaaatatttggctgtgagcattacaaaagaaactgcaagcttgttgctgcatgctgcgataagttattcacttgcagattctgtcacgataaagttagtgaccatacaatggacaggaaatcagtgatggagatgatgtgcatgcaatgtctgaatgttcaacctgttggtccaaattgtcaatccccttcttgcaatggactgtccatggccaagtattattgtagcatatgcaagttcttcgatgatgaaaggagtgtctaccattgtcctttttgcaacttgtgtcgccttgggagcggattgggcactgatttttttcattgcatgaagtgcaattgttgccttggcataaagatgatagaacataaatgccgggaaaagatgctagagatgaactgtccaatctgctgcgactttttgtttacatcgagtgcaccagttaaaggccttccttgtggccacttcatgcattcggcttgttttcaggcatatacttgtacccactacacttgtccaatctgctgcaaatccttgggagatatgacggtgtattttggcatgcttgatggtttgctggctgcagaacagcttcctgaggaataccaggaccggtgccaggatatactgtgtaacgactgcgagagaaaaggcaggtcacggtttcattggctctaccacaagtgtggtttctgtggttcttacaacaccagagttatcaagactgatacggcagagtgttctcgccctctataatttcttttatgcaatccatttgtatatatatatcgacggggtagaaaccttgtgaccgtaggtgtgatagtttttttatagagtgaactgggggaggaaccccacctggatgtattatgaggaaaaagtgactgtgcacatgaggagtctgagaattactcgctcccgtcccaaactaactgtatttctacgatttgaaatatattcgctcatatatttc

SEQ ID NO: 214840 - DNA, 5240 bp, Zea Mays
taatttctgaaatgcccatagattggttatttttccagcacttgacattcgagtgaaaaatgtcgcagggacatattctcttgaacataaaggagaaaatgatcttttcgcacatctattcactctgctacagttggatgtgcagaatgataatgctattaggagggaacttgcatcctgtactggagcaattcggacgtttgtatcccaacacatgtccaaggaagaagaacaggtcttcccgttactcatcaagaagttttcacacgaagagcaagcagatttagtatggcagttcttatgtagcatccctgtaaacatgatggcaaaatttcttccatggatttctgcttctgtttctacagatgagaatcaagatattcttgactgcctaagtaaaatagttcctgaagaaaaactcctccaagaggttgttttcacgtggtttggagggaaatcagaaagcagttctacatgtgagtctagctctggccaaacagataaacatgcacattcacttgaacacaccaaaattggaaagaggaagtctatagaatcaagtcagcttgtcactcatccaattgatgagattctgtattggcacaatgctgttctgagagaactgagtgatatagcagaggagactaaaaggatacatcagtctggagatttttctgacatagcaggatttaatatgaggctgcaatttattgcagatgtgtgcattttccacagtattgccgaggatcaagttatattccctgcagtggatggtgaattgtcctttgtgcaggagcatgctgaagaagaacggcgattgaataaatttaggagtttaattgaacaaattcaactagcaggagccaagtcaactgtagttgattttcattcagagttatgctcacaagctgatcaaataatgcagaaaattgagagtcacttcaatgatgaggaaataaaggtacttcctaaagctaggataaagttctcaccggagaaacagagggaacttttatatcagagtctatgtgtcatgccactaaagctgttggagcgtgttctaccatggtttatagtgaaactgaatgatgcagaggcagtgtcttttcttcagaatatgcggttggcagcaccttcctctgaaactgcattggttactcttctctctggctgggcgtgcaaaggtcgtctggaggacacatccaaccctggaaagttcgtatgcatggcatcaggagcggtcacttgtgcgtcagatgggaatggtttcaaaacatgccagtcactctgtccatgttatgtaagtagcaatggagctttttcaaaaccagttaagagagcaagtcaaggagaatctagcacaaatactgacagaaatcatagctcacacaatgctgctactgaagcatcgcaatgtaacaacagagcctgttacattcccaggttaagagtagaaagtagctaccttggtgttcattcatctacccctacaaaatcctttcgccctctgtctttcaattatgttgcaccttcattatattcaagccttttctcatgggacacagatacactagtatccggcccagataacatttctaagccaattgataccatattcaaattccacaaggcaattcgcaaggatttagagtttttggatttggaatctggaaagcttattgacgggaacgagtcttgccttagccaattcattggaaggtttcgtttactgtggggtctatatagagcacacagcaatgctgaagatgagattgtatttcctgctcttgaatcgaaggaggcattgcacaatgttagtcattcatacactcttgatcacaagcaggaagaaaaattgttccaagatatatccactgtactatctgaactttctcaactacatgatggtttgagctatcctcttgatgttgaagctggaacaaatgatatttcaagtaatgagattgattgggctagaaagcgtaatgaacttttgacaaagcttcaaggattatgcaaatctatccgggtcacgttgtcaaatcatgttcatagagaagaacttgagttgtggccattgttcgataaacatttttctgtagacgagcaggataagattatcggtcatataattggaactactggtgctgaggttctgcagtcaatgttaccttgggttacatcagcacttagtttagaggaacagaacatgatgctggatacatggaagcaagcaaccaaaaacaccatgtttgatgaatggctaaatgaatggtggaagggaccttcaacttcatctgacccatcagacaaggcttctactccttcagaagaaagtcattttcaggagaatcttgaacaaaatgaccagatgtttaggcctggttggaaggacattttccgaatgaatcagagtgagctcgaggctgagattcgaaaggtctctcgagattctactcttgatccaaggaggaaggcctatctgatccaaaatctcatgaccagccgttggatagctgctcagcagaaatcaccacaaccaagcgtcgaaggacataatggatgtacacgacgacctggatgtgttgcttcgtaccgagacccagggaaacaaatatttggctgtgagcattacaaaagaaactgcaagcttgttgctgcatgctgcgataagttattcacttgcagattctgtcacgataaagttagtgaccatacaatggacaggaaatcagtgatggagatgatgtgcatgcaatgtctgaatgttcaacctgttggtccaaattgtcaatccccttcttgcaatggactgtccatggccaagtattattgtagcatatgcaagttcttcgatgatgaaaggagtgtctaccattgtcctttttgcaacttgtgtcgccttgggagcggattgggcactgatttttttcattgcatgaagtgcaattgttgccttggcataaagatgatagaacataaatgccgggaaaagatgctagagatgaactgtccaatctgctgcgactttttgtttacatcgagtgcaccagttaaaggccttccttgtggccacttcatgcattcggcttgttttcaggcatatacttgtacccactacacttgtccaatctgctgcaaatccttgggagatatgacggtgtattttggcatgcttgatggtttgctggctgcagaacagcttcctgaggaataccaggaccggtgccaggatatactgtgtaacgactgcgagagaaaaggcaggtcacggtttcattggctctaccacaagtgtggtttctgtggttcttacaacaccagagttatcaagactgatacggcagagtgttctcgccctctataatttcttttatgcaatccatttgtatatatatatcgacggggtagaaaccttgtgaccgtaggtgtgatagtttttttatagagtgaactgggggaggaaccccacctggatgtattatgaggaaaaagtgactgtgcacatgaggagtctgagaattactcgctcccgtcccaaactaactgtatttctacgatttgaaatatattcgctcatatatttcctgtgttgcccttcagctgtttcctgggaacatctcggtttgtatcagcgatacagttggagaccttctgaacactgtccccaactcaagccgactcagttgagctgaagagcaaataaatactcaggttgcgattgacatgggcgtgaaaatgtcaacaagctctttgaaagaacccaatgtttctcaatcaaaagacgtggagaatggaaatgacaattctgtgaaatcctgcattagcaagcctgtgttgaatggcaacaaatgtgccaacaaggaacaaaatgttccgtcttgttgccctggcgctgtgacaaatggaaacgaggctggaaatgcagacgtggagtacattgattctgagaatctagtggatctaccagatgttgatgcagctctatgtaccttagttaaaaggttggattcaaaggactgggttatgacatgtgaagctctcaacaatgttcgtcagttggcgatgtatcacaaggaaagattgcaggagctgctggagcctctagttcctcttatcgtgaaatctgtgaagaacccaagaagtgctgtatgcaaaacagcactgatgacttgtgctgacatctttaaggtctatggtgacctactggttgagtctattgatccactgctagtgcagctgtttctaaaggcttcacaagataagcgttttgtctgtgaagctgctgaggcagctcttacatcgatgacaagttggatctccccattactactgttaccaagaatgcagccctacctcaagaacaggaatccgcgggttcgagcaaaagcatcagtgtgtttgagcaagagtgtaccttgcttagatgtgcagggaatcagagaatatggaatggataagctcgtccagattgcagcaacccaactcagtgaccagcttcctgaatcaagagaggctgctcgcaacctggcactggaactacaggtattatatgagaagtctcaggcctccacctctgacgaaaatgagggtgaaccttctgtctcacaagatgctgagtcatgggaggctttctgtcagtccaagctttctgccttaagcgcccaagccatccttcgcgtgacctctactactccaaaagagggtgtcgcctctacttcaaatgctacaaaagagggtgtcacggcggccccaaaagaaggtttggatgtggattgctagcatgaggcacacaagcccacaatgagtttgtagatgcgatcagagcgcgattgtccacccccttcggtttttttgatgtacatgcttatggctggtccttggttacatccagttgggaatcggttgattattggttcgggaattcaggtgtgaccgcggtgttaatattggttgggacatatatctgctatagttgattgtataatcattttgttccactacttggtatttgtttcgccaggtgaacgtagaatttgacccacggtcagtgttatatacagtcctctttctgccacatcgggtgcaggttatgttatttttgaaggagatgtcattggcattcgtgcgccacccttatgttgtactctctctccgttttaaatcataagtcgttttgacttttttttaagtatatagcttttgttatgcatctagatataagttgtctataaaaggcc

SEQ ID NO: 214841 - DNA, 1577 bp, Zea Mays
caccagatcacagatctgagatcgagcgaagctaagctttttcatcgagatggtgcttgtactgcatgctaacagtggtaacaaaaatgcattcaaaacactaattgccgcagaatacagcggtgtcaaggttgagttggtgaaggactttcaaatgggtgtctccaacaaaactccagagttcctcaagatgaaccctattgggaagattcctgtcctggagactcctgatggtcctgtttttgagagcaatgcaattgcaagatatgttactcgcttgaaggctgataacccactttatggatcttcactgattgattatgcccatattgagcaatggattgactttgctgcaacagagattgatgcaaacattggaaagtggttgtacccacggatggggttttatccccatgctggtgtggtagaagaatcaactattgctgccttgaagagagcattgggttctctgagcacccatcttgcatcaaacacattccttgttgggcattcagtgactctcgcggatatcgtgatgacatgcaatctctgtatgggatttagccgtatcttgactaagagttttacctcagagttccctcatgttgagaggtatttctggaccatggttaaccaaccaaacttcaaaaaggtcattggtgacgttaagcaggcagaagctgtgccacttgttccacagaaggctgctccagccaaagtgcagaagcctaaggaaaccaaaaaggaggctccgaagcccaaggtaactgagaaatcagcagaagaagaggaggcaccaaagcctaagccaaagaaccctcttgatttgcttcctcctagcaagatgattcttgatgattggaagaggctgtactctaacacgaaaaccaacttccgtgaggttgctattaaaggtttctgggatatgtacgacccagagggctactccctgtggttctgtgactacaagtacaatgatgagaacacagtgtcgtttgtgaccatgaacaaggttggtggcttcctgcagcggatggacctgtgccgcaaatacgcctttggcaagatgcttgtggtaggctctgagccccctttcaaggtcaaggggctctggctcttcaggggctcagaaattcccaagtttgtcatggacgaagtctatgacatggagctttatgagtggaccaaggttgacctctctgatgaggcacagaaggagcgggtcaatgccatgattgaggaccaggagccattcgagggcgaggccttgctggatgcaaaatgcttcaagtgaggaaagagtttttgggtccaattctaaaacagccatggatgatagcttttgatatggcgtgctggttatgattatgctgtggagttttggccatgttaacgggaggtcgtgctcgcgaaaccttctgcattatcgcatcggaatcgtttgtcatgtgcatcctagtgaatagatatattatgaaaatatatctcctgaaatttaatgatatttattttattttataacgatttatactttttatttaatatatattagtcaaacttgacatgctttaattcaa

SEQ ID NO: 214842 - DNA, 2845 bp, Zea Mays
agccacccaatcattgccccccaactgcgcgtacccgtccccgcctcctcctggatggatctcttttttgttcgcttctccgcccgtcgcgtccacactccccctcacgtagtgcgagactgcgagggatgatcacgcgtttccacaccatcagctcctgctgcccttttgtcttcccctctggatgctctcgtcgtcatcacttgttcttcttcgagctaccagctgcctatcatggtcatcatggtcgagctgctgcccccacttgcctctctaatcctcagtcctctgtagagctggtcctcctacccctcactttgccttgagcaatttggtttctagcatctgtggggtggcttgtgggtggtcgccttggactgctccttcctccacctgccgcgccggcagggcgacgaggtccaaaagcctggtggggctcatcatcaagaacaccgaagcggcgagagtggcatgggatctgatccgaggcggagctcgaggagctgaggggctgtacgtgctcttggatccggtagagattccgtgccctcgtgttcgtccccggccgccgcgatggggaacacgtgcgtcggccccagcatcaccatgaacggcttcttccagtccgtgtccacggcgctgtggaagacgccgcaggacagcgacgcgctgcccgccgccgccgccaatggccccggcggcgccagcccgggccggtcgcagtcggcgctgccgaagccggcgtccgacgtgcaccaccacatcgccgtgctgagcgaggcccctgagcccgtcaagatcggcgcctaccactcggagccggcgcccgccgtgcagagcgaggcccctgagcccgtcaagatcgccgcctctcactcggagccggcgcccatggccgccaagcctggcgccgccgccgccaacgccagccccagccccagccccaggccgcgtccgcaggtgaagcgcgtgtcgagcgccgggctgctggtgggctcggtgctgaggcggaagacggagaacctcaaggacaagtacagcctggggcggcggctcgggcaggggcagttcggcacgacgcacctgtgcgtggagcgcggcacggggaaggagctggcgtgcaagtccatcctgaagcgcaagctggccaccgacgacgacgtggaggacgtgcggcgggagatccagataatgcaccacctggcgggccaccccagcgtggtcgccatccgcggcgcgtacgaggacgccgtggccgtgcacctcgtcatggagctctgcggcggcggcgagctgttcgaccggatcgtgcggaggggccactacaccgagaggaaggccgccgagctcgcccgcgtcatcgtcggcgtcgtggaggcctgccactccatgggcgtcatgcaccgggacctcaagcccgagaacttcctcttcgctgaccactcggaggaggccgctctcaagaccattgacttcggactctccatcttctttcgccctggccaaatcttcaccgacgtcgtgggcagcccttactacgtggcgccggaggtactgaagaagagatacgggccagaggcggacgtctggagcgctggcgtaatcatctacatcctgctgtgcggagtgccgccattctggagaacgagcagggcatattcgaggaggttctgcacgggaggctggacttcgagtcggagccgtggcccagcatctccgacggcgccaaggatctcgtgaggaggatgcttgtcagggacccgaggaagagactgaccgctcacgaagttctacggcatccgtgggttcaggtcggtggagtggctcctgacaggccgctggactcggccgttctgtctcgcatgaagcagttctcggctatgaataagctgaagaagatggctcttagggtgatcgccgagaacctgtcggaggacgagatcgccgggctgagggagatgttcaagatgatcgacgcggacaacagcgggcagatcacgttcgaggagctcaaggttgggctggagaaggtgggcgccaacctgcaggagtcggagatctacgcgctcatgcaagccgcggacgtggacaacaacggcacgatcgactacggcgagttcatcgcggccacgctgcacctgaacaaggtggagcgggaggaccacctgttcgcggcgttccagtacttcgacaaggacggcagcggctacatcaccgccgacgagctgcaggtggcgtgcgaggagttcggcctgggcgacgtccagctggaggacttgatcggggaagtggaccaggacaacgacgggcgcatagactacaacgagttcgtggcgatgatgcagaagccgacggtgggggtgctcccgaagaaggccgacctgcagaacagcttcagtatcgggttcagggaggcgctcaggatggcctagacctctctgtctctgctcccctgctgcctgcgtgtaggtgtagatgattgaattgagtgcatgtcagtgcagttgctgtagagaccaccgtagcatagagagctgatgagatgcgagttgaggcgggccaggagacgtgtacatgtgccatagtccatagccatacaggcggccctgcagcggtttggctgcttggttccaaacggttctgtttcatgtcgcgtgcactggagcacatgtgccatatctgcctgctgctgctactgctatatgccgtgcacgtgcacgtcggtgacctgaaacctggctgtccgccggccaccgagctctaacggaattctgccatgctctccggccaccgagcccaacaagccgcctgagaatttatcgctctcgcggcatggcacggtcac

SEQ ID NO: 214843 - DNA, 3769 bp, Zea Mays
cggctcgttcgagctcgagctggctcgttaagctaatgagctggctcggctcggctcgttaaggtagcgagccacaaagtcagctcggctcggctcgtttacgagctcgagctggctcgtttagctcgcgagccagagtagaaaaaataatatgtgtataataatcaatttctagttaattttaaactaatttaacaacagaaaatagtaattatactcatagtttcacagtccgcatcaatataacaccaaattaacaccacttatcactcatcaattcactattcacacacatgtttagcagtttaacccacacttatattcgcatagaccatattcatacatagacataattcatcaatcattagtttaacttataggttatagacaccacacatacatataacatatccatcaattattacgtacatgatatgtatatagttttgttttgctgaaatgtgatagctcgtttagctcgcgagctggctctttaacaaaccgagctggctcgttaacgaaccgagctaggatgccagctcagctcgtgaaaaaatttaaacgagccgatccgagccgagccgagctggtcacgaaccgagcgagccgacgagccacgagtattttgtccagccctacgtgcagcgtagaatccgaactaatccttcgtacgcattgattgttcactcgtctttcatgatgagctgttgggtggtcaagccgggtgctgtgttgtcctcctcgcagcagagtattttccgttcacgtgtggttgactggttcttcttcttcctgaaagctaccgctcggcacctatgcaatcggacgtgcacctaaattagatgtccaaacgggccgcccggcccgggcccggtgaagcccggcccgccagacacgattaaaaaaccgggccgggccggctaagcacgcaggctcaatttcttgtccgagtccagcccgtaacgggcctaaacgggtcgggtcggcccgtttagcacgagaaaacggaccgaaaagcgggctatgcgggccaaaaagcacgttttagtgtaaaaaagcgggcttagagctaaacgggccgtgccgggctagcccaccgtgtctaatttcctgtccgagcccggtccgcttattcgtgccggaccggcccgggcccgcatataatcgggcccaaaaagtgggcttcgtgccgggctctcgggcctcgtacttattggacatctattgacctaatttggaatatttccggcgcagctgaagcttggatgttagccgacacctgccgcggcagggagagaagctggctaccaggcccggtgggacggcgacgcgctttggactctgcacagagcggagcggcgcgacccggtcggtcggccacccacgcgcgcgatcaaggaagaaccggggcaacaggacaaaacaattcacgggcgtcgtgccccctcgccgccccccacttcgcgccctcttcctcccggctcctgctccggctctttcctcgccgcgccatgtcaaactcaacagctaggcacccacgagtagccagccacccaatcattgccccccaactgcgcgtacccgtccccgcctcctcctggatggatctcttttttgttcgcttctccgcccgtcgcgtccacactccccctcacgtagtgcgagactgcgagggatgatcacgcgtttccacaccatcagctcctgctgcccttttgtcttcccctctggatgctctcgtcgtcatcacttgttcttcttcgagctaccagctgcctatcatggtcatcatggtcgagctgctgcccccacttgcctctctaatcctcagtcctctgtagagctggtcctcctacccctcactttgccttgagcaatttggtttctagcatctgtggggtggcttgtgggtggtcgccttggactgctccttcctccacctgccgcgccggcagggcgacgaggtccaaaagcctggtggggctcatcatcaagaacaccgaagcggcgagagtggcatgggatctgatccgaggcggagctcgaggagctgaggggctgtacgtgctcttggatccggtagagattccgtgccctcgtgttcgtccccggccgccgcgatggggaacacgtgcgtcggccccagcatcaccatgaacggcttcttccagtccgtgtccacggcgctgtggaagacgccgcaggacagcgacctgttcgaccggatcgtgcggaggggccactacaccgagaggaaggccgccgagctcgcccgcgtcatcgtcggcgtcgtggaggcctgccactccatgggcgtcatgcaccgggacctcaagcccgagaacttcctcttcgctgaccactcggaggaggccgctctcaagaccattgacttcggactctccatcttctttcgccctggccaaatcttcaccgacgtcgtgggcagcccttactacgtggcgccggaggtactgaagaagagatacgggccagaggcggacgtctggagcgctggcgtaatcatctacatcctgctgtgcggagtgccgccattctgggcagagaacgagcagggcatattcgaggaggttctgcacgggaggctggacttcgagtcggagccgtggcccagcatctccgacggcgccaaggatctcgtgaggaggatgcttgtcagggacccgaggaagagactgaccgctcacgaagttctacggcatccgtgggttcaggtcggtggagtggctcctgacaggccgctggactcggccgttctgtctcgcatgaagcagttctcggctatgaataagctgaagaagatggctcttagggtgatcgccgagaacctgtcggaggacgagatcgccgggctgagggagatgttcaagatgatcgacgcggacaacagcgggcagatcacgttcgaggagctcaaggttgggctggagaaggtgggcgccaacctgcaggagtcggagatctacgcgctcatgcaagccgcggacgtggacaacaacggcacgatcgactacggcgagttcatcgcggccacgctgcacctgaacaaggtggagcgggaggaccacctgttcgcggcgttccagtacttcgacaaggacggcagcggctacatcaccgccgacgagctgcaggtggcgtgcgaggagttcggcctgggcgacgtccagctggaggacttgatcggggaagtggaccaggacaacgacgggcgcatagactacaacgagttcgtggcgatgatgcagaagccgacggtgggggtgctcccgaagaaggccgacctgcagaacagcttcagtatcgggttcagggaggcgctcaggatggcctagacctctctgtctctgctcccctgctgcctgcgtgtaggtgtagatgattgaattgagtgcatgtcagtgcagttgctgtagagaccaccgtagcatagagagctgatgagatgcgagttgaggcgggccaggagacgtgtacatgtgccatagtccatagccatacaggcggccctgcagcggtttggctgcttggttccaaacggttctgtttcatgtcgcgtgcactggagcacatgtgccatatctgcctgctgctgctactgctatatgccgtgcacgtgcacgtcggtgacctgaaacctggctgtccgccggccaccgagctctaacggaattctgccatgctctccggccaccgagcccaacaagccgcctgagaatttatcgctctcgcggcatggcacggtcac

SEQ ID NO: 214844 - DNA, 667 bp, Zea Mays
tgcagaagtgcatatgccctgcaaagattccttttctaagcactgcgccaaatcgaagaaggtgcaaattgttcagcagataaatcatgatggagaggtcaatcgagctcgctatatgccccaaaattcatttataattgctactaagacagttagtgcagaagtatatgtcttcgactacagcaagcacccatctaagcctccactagatggtgcatgcaaccctgatttacggctgaagggacataattctgaaggatatggcttatcatggagtatttttaatgagggacatttgttaagtgggtctgaagatgctcaaatttgcttgtgggacattaaagcaaatagtagaaacaaaagtcttgatgccctgcagatttttaagcatcatgatggtgtcgttgaagatgttgcttggcacttgaggcatgggtacttatttgggtcagttggtgacgatcatcatcttttaatttgggacctgcggtctccctcgcctgctaggcctgttcagtctgtggtggcacaccagggcgaggtgaactgcctggctttcaacccgttcaatgaatgggttgttgcaactggttctactgacaagactgtcaaattatttgatcttaggaagattcatacttctctgcacacctttgactgtcacaag

SEQ ID NO: 214845 - DNA, 1149 bp, Zea Mays
ccagctagctcgtagcccattatctgctagtagcctggcagttccgacgctgcttgcggcggcgcttggcaaggccgacaaacggcgaccaggcaggcgagctcgtcgcctcgggggcagggaggaccggagcccctcgcctcggaggaagggaggacctgagttctgtttctcagctttatgatcaagcaggagctctgattaacagaattttttgaattctccccaaattgaagggtgcacctgaagggagttatggatcggaagaatcaaactcctcaaggtcaaatagcacaggtggttgtggaatttcttgaggtagcaatcagctgcatcgtcttcctcaaaggcttctatcctcctcgtgcctttgagaggagaaggtacatgaatgtggtggtccagaaagcactgcatcctgagcttactagctatattcactctgtgactttcggtcttctacctttcattcagaagggattggtagagagggtcgtggtcatcttctatgacaaagggcatgtaccgaccgagaagttcgtcttcaagcttgcagtcaaccagtcataccgttccaagttagaggaggcgaacctggagttcgctctgcgagcattcttgatcaagctgactgttgctgagcctgttaccagaccccttccaccagatggtagctgggaggtgaccgcctacttccggtccctccccggcgacggtgaccgagaagctcagctgtggattcctacggacgccgagctgtggatgcagcctccgcagatcacccccatcaagtcagtcagctgtgaccctctgacgatgcagctctacttggagcaccctagcgtcacggaaccgaaggagccaccggcataatgacaggagcctgcacctgtgggctgtgatacactgcaatgtatagaatttttttttgcaaggcaactttggcacgaaccctcgagtcagtgaaaccttttttgttcagacagaggcaaggaaactacttctatccagtggcttcaacttctggctagagaaggcgacactgtaacaatcttgggccttgggattttggctgaggctgaggctgaggggggtggcagagacggacgacacatgggtgagaagcacatggctagaagaagagtgggg

SEQ ID NO: 214846 - DNA, 1076 bp, Zea Mays
ccagctagctcgtagcccattatctgctagtagcctggcagttccgacgctgcttgcggcggcgcttggcaaggccgacaaacggcgaccaggcaggcgagctcgtcgcctcgggggcagggaggaccggagcccctcgcctcggaggaagggaggacctgagggtgcacctgaagggagttatggatcggaagaatcaaactcctcaaggtcaaatagcacaggtggttgtggaatttcttgaggtagcaatcagctgcatcgtcttcctcaaaggcttctatcctcctcgtgcctttgagaggagaaggtacatgaatgtggtggtccagaaagcactgcatcctgagcttactagctatattcactctgtgactttcggtcttctacctttcattcagaagggattggtagagagggtcgtggtcatcttctatgacaaagggcatgtaccgaccgagaagttcgtcttcaagcttgcagtcaaccagtcataccgttccaagttagaggaggcgaacctggagttcgctctgcgagcattcttgatcaagctgactgttgctgagcctgttaccagaccccttccaccagatggtagctgggaggtgaccgcctacttccggtccctccccggcgacggtgaccgagaagctcagctgtggattcctacggacgccgagctgtggatgcagcctccgcagatcacccccatcaagtcagtcagctgtgaccctctgacgatgcagctctacttggagcaccctagcgtcacggaaccgaaggagccaccggcataatgacaggagcctgcacctgtgggctgtgatacactgcaatgtatagaatttttttttgcaaggcaactttggcacgaaccctcgagtcagtgaaaccttttttgttcagacagaggcaaggaaactacttctatccagtggcttcaacttctggctagagaaggcgacactgtaacaatcttgggccttgggattttggctgaggctgaggctgaggggggtggcagagacggacgacacatgggtgagaagcacatggctagaagaagagtgggg

SEQ ID NO: 214847 - DNA, 1067 bp, Zea Mays
ccagctagctcgtagcccattatctgctagtagcctggcagttccgacgctgcttgcggcggcgcttggcaaggccgacaaacggcgaccaggcaggcgagctcgtcgcctcgggggcagggaggaccggagcccctcgcctcggaggaagggaggacctgagctttatgatcaagcaggagctctgattaacagaattttttgaattctccccaaattgaagggtgcacctgaagggagttatggatcggaagaatcaaactcctcaaggtcaaatagcacaggtggttgtggaatttcttgaggtagcaatcagctgcatcgtcttcctcaaaggcttctatcctcctcgtgcctttgagaggagaaggtacatgaatgtggtggtccagaaagcactgcatcctgagcttactagctatattcactctgtgactttcggtcttctacctttcattcagaagggattggtagagagggtcgtggtcatcttctatgacaaagggcatgtaccgaccgagaagttcgtcttcaagcttgcagtcaaccagtcataccgttccaagttagaggaggcgaacctggagttcgctctgcgagcattcttgatcaagctgactgttgctgagcctgttaccagaccccttccaccagatggtagctgggaggtgaccgcctacttccggtccctccccggcgacggtgaccgagaagctcagctgtggattcctacggacgccgagctgtggatgcagcctccgcagatcacccccatcaagtcagtcagctgtgaccctctgacgatgcagctctacttggagcaccctagcgtcacggaaccgaaggagccaccggcataatgacaggagcctgcacctgtgggctgtgatacactgcaatacagaggcaaggaaactacttctatccagtggcttcaacttctggctagagaaggcgacactgtaacaatcttgggccttgggattttggctgaggctgaggctgaggggggtggcagagacggacgacacatgggtgagaagcacatggctagaagaagagtgggg

SEQ ID NO: 214848 - DNA, 3395 bp, Zea Mays
ccagctagctcgtagcccattatctgctagtagcctggcagttccgacgctgcttgcggcggcgcttggcaaggccgacaaacggcgaccaggcaggcgagctcgtcgcctcgggggcagggaggaccggagcccctcgcctcggaggaagggaggacctgaggtttcagtgttgggtgacagttccccatatcctccaagcgcgtgcttgcctgcagcaacagatcgcttgtcaactccattggctttaatgggtgcaccttcacaaatatttgttgggaagtcaaaagccttctgcattgccaaaagctcttttcctgaacacaaatatgccctttcaattttaatcccacgactctcccattgccatattcccctcctcctctcccagtcaattgtttcaggtcttctcctcaaagctcccccttgtccactctgtcctccgatctctctctttggggcatttcccatctctatccctcgatttactcgccctgctacgccattctggatgtatgaccctcgatagctactccctcaacattgctttctatgccactgcccgcctcccatctgtttctgttggtgcccagcttcattccctttctgtcaaacttggcttggtttcagatacatttgtccttaattctcttatcaacatgtactcgtcttgtagctatccaacaactgcaagacaagttctcgattctgctccccaaggagcttgtgacacagtttcttggaacacaataatttctggatacctacgatgtgggatgcctaataaggctctgcaggcttttggccagatggtcaaggagccagttagactggatgatgtcacattgctgaacgcactcgttgcttctgccaaggcaggcaaagcgaaggtcgggaggctgtgtcacagtttagttgtggtgaacggggctggaattaattgttatatgggatcctctctgattagtatgtatgccaagtgtggattggttgaggatgcccgcaaggtatttcacggaatgcatgagagaaacgtcgtttgctggacatcaatgatttctgggtacacacagttgggtaagtttaaaaaggctgtcgatcttttcagggatatgcaaattactggaatgaaggctgatgatgggacgattgctactgttgtgtcttcatgtgcccaaatgggagcacttgacttgggacgatatgttcatgcttactgtgatgttcatggtttagggaaggagctttctgttaagaattcactgattgatatgtactcgaaatgtggggatataactaaggctcatgagatattctgtggattgaccaagagagatgtgttttcttggacggcaatgataatgggctttactgttaatggcttatgtaatgaagcacttgatttgtttgctcagatggaaggagagggtaaggttatgccaaatgaggtcacttttttgggtgtccttacttcttgtagccatggagggttagtggaacaagggttccatcacttccagcgtatgtccatggtctacaatcttgcaccgaggattgaacactatggatgcatggttgatctcttgggacgtgcaaagctattgacagaggcagaacaatttattaacgggatgcctattgccccagatgttgtagtatggcggtctttattgtttgcctgcagagcttgtggagaggtgggacttgcagaatttgtagcagaaaggatcctagaactggagccaaaaaagtgtgcaggacatgttttactttctaatgtctatgctgccacatcaaggtgggttgatgtgaataaattgcggacatctatggacagttgtaggatgagtaagcaacctggatgctctttcattgaagtggacggatgtgtgcacgagttctttgcaggagatgaatcacaccttgagatagatgctatatataacattcttttggggatcaatgaactgttagtagcagagtccttgtatgaaagttgtgatatttttttgtcaattaagtaggtaggttcaaaatgtaataagctgtcattttatgtggagcagaaagaatgtttacatttttgtatttctccagaaggcgggaaatttcatttttctgctagacacatcccttcctgtatatgcttttgctagaacatactgggttgtccactagcgttatttcatttttctgctagacacatctcttcctgtatatgcttttgctagaacatgctgggttggccactagcgtcattgatgagaaatgggttcttatatggcatgttttacctcgagtattgactgctatgcttctgtcatctagctgtctattgcattgctttcctggtccttttctcgtgcttatgtaattggccatatactaacatttgatttaaaactgaagttctgtttctcagctttatgatcaagcaggagctctgattaacagaattttttgaattctccccaaattgaagggtgcacctgaagggagttatggatcggaagaatcaaactcctcaaggtcaaatagcacaggtggttgtggaatttcttgaggtagcaatcagctgcatcgtcttcctcaaaggcttctatcctcctcgtgcctttgagaggagaaggtacatgaatgtggtggtccagaaagcactgcatcctgagcttactagctatattcactctgtgactttcggtcttctacctttcattcagaagggattggtagagagggtcgtggtcatcttctatgacaaagggcatgtaccgaccgagaagttcgtcttcaagcttgcagtcaaccagtcataccgttccaagttagaggaggcgaacctggagttcgctctgcgagcattcttgatcaagctgactgttgctgagcctgttaccagaccccttccaccagatggtagctgggaggtgaccgcctacttccggtccctccccggcgacggtgaccgagaagctcagctgtggattcctacggacgccgagctgtggatgcagcctccgcagatcacccccatcaagtcagtcagctgtgaccctctgacgatgcagctctacttggagcaccctagcgtcacggaaccgaaggagccaccggcataatgacaggagcctgcacctgtgggctgtgatacactgcaatgtatagaatttttttttgcaaggcaactttggcacgaaccctcgagtcagtgaaaccttttttgttcagacagaggcaaggaaactacttctatccagtggcttcaacttctggctagagaaggcgacactgtaacaatcttgggccttgggattttggctgaggctgaggctgaggggggtggcagagacggacgacacatgggtgagaagcacatggctagaagaagagtgggg

SEQ ID NO: 214849 - DNA, 1104 bp, Zea Mays
ccagctagctcgtagcccattatctgctagtagcctggcagttccgacgctgcttgcggcggcgcttggcaaggccgacaaacggcgaccaggcaggcgagctcgtcgcctcgggggcagggaggaccggagcccctcgcctcggaggaagggaggacctgagaattttttgaattctccccaaattgaagggtgcacctgaagggagttatggatcggaagaatcaaactcctcaaggtcaaatagcacaggtggttgtggaatttcttgaggtagcaatcagctgcatcgtcttcctcaaaggcttctatcctcctcgtgcctttgagaggagaaggtacatgaatgtggtggtccagaaagcactgcatcctgagcttactagctatattcactctgtgactttcggtcttctacctttcattcagaagggattggtagagagggtcgtggtcatcttctatgacaaagggcatgtaccgaccgagaagttcgtcttcaagcttgcagtcaaccagtcataccgttccaagttagaggaggcgaacctggagttcgctctgcgagcattcttgatcaagctgactgttgctgagcctgttaccagaccccttccaccagatggtagctgggaggtgaccgcctacttccggtccctccccggcgacggtgaccgagaagctcagctgtggattcctacggacgccgagctgtggatgcagcctccgcagatcacccccatcaagtcagtcagctgtgaccctctgacgatgcagctctacttggagcaccctagcgtcacggaaccgaaggagccaccggcataatgacaggagcctgcacctgtgggctgtgatacactgcaatgtatagaatttttttttgcaaggcaactttggcacgaaccctcgagtcagtgaaaccttttttgttcagacagaggcaaggaaactacttctatccagtggcttcaacttctggctagagaaggcgacactgtaacaatcttgggccttgggattttggctgaggctgaggctgaggggggtggcagagacggacgacacatgggtgagaagcacatggctagaagaagagtgggg

SEQ ID NO: 214850 - DNA, 3010 bp, Zea Mays
ccagctagctcgtagcccattatctgctagtagcctggcagttccgacgctgcttgcggcggcgcttggcaaggccgacaaacggcgaccaggcaggcgagctcgtcgcctcgggggcagggaggaccggagcccctcgcctcggaggaagggaggacctgaggtttcagtgttgggtgacagttccccatatcctccaagcgcgtgcttgcctgcagcaacagatcgcttgtcaactccattggctttaatgggtgcaccttcacaaatatttgttgggaagtcaaaagccttctgcattgccaaaagctcttttcctgaacacaaatatgccctttcaattttaatcccacgactctcccattgccatattcccctcctcctctcccagtcaattgtttcaggtcttctcctcaaagctcccccttgtccactctgtcctccgatctctctctttggggcatttcccatctctatccctcgatttactcgccctgctacgccattctggatgtatgaccctcgatagctactccctcaacattgctttctatgccactgcccgcctcccatctgtttctgttggtgcccagcttcattccctttctgtcaaacttggcttggtttcagatacatttgtccttaattctcttatcaacatgtactcgtcttgtagctatccaacaactgcaagacaagttctcgattctgctccccaaggagcttgtgacacagtttcttggaacacaataatttctggatacctacgatgtgggatgcctaataaggctctgcaggcttttggccagatggtcaaggagccagttagactggatgatgtcacattgctgaacgcactcgttgcttctgccaaggcaggcaaagcgaaggtcgggaggctgtgtcacagtttagttgtggtgaacggggctggaattaattgttatatgggatcctctctgattagtatgtatgccaagtgtggattggttgaggatgcccgcaaggtatttcacggaatgcatgagagaaacgtcgtttgctggacatcaatgatttctgggtacacacagttgggtaagtttaaaaaggctgtcgatcttttcagggatatgcaaattactggaatgaaggctgatgatgggacgattgctactgttgtgtcttcatgtgcccaaatgggagcacttgacttgggacgatatgttcatgcttactgtgatgttcatggtttagggaaggagctttctgttaagaattcactgattgatatgtactcgaaatgtggggatataactaaggctcatgagatattctgtggattgaccaagagagatgtgttttcttggacggcaatgataatgggctttactgttaatggcttatgtaatgaagcacttgatttgtttgctcagatggaaggagagggtaaggttatgccaaatgaggtcacttttttgggtgtccttacttcttgtagccatggagggttagtggaacaagggttccatcacttccagcgtatgtccatggtctacaatcttgcaccgaggattgaacactatggatgcatggttgatctcttgggacgtgcaaagctattgacagaggcagaacaatttattaacgggatgcctattgccccagatgttgtagtatggcggtctttattgtttgcctgcagagcttgtggagaggtgggacttgcagaatttgtagcagaaaggatcctagaactggagccaaaaaagtgtgcaggacatgttttactttctaatgtctatgctgccacatcaaggtgggttgatgtgaataaattgcggacatctatggacagttgtaggatgagtaagcaacctggatgctctttcattgaagtggacggatgtgtgcacgagttctttgcaggagatgaatcacaccttgagatagatgctatatataacattcttttggggatcaatgaactgttagtagcagagtccttgtatgaaagttgtgatatttttttgtcaattaagtagttctgtttctcagctttatgatcaagcaggagctctgattaacagaattttttgaattctccccaaattgaagggtgcacctgaagggagttatggatcggaagaatcaaactcctcaaggtcaaatagcacaggtggttgtggaatttcttgaggtagcaatcagctgcatcgtcttcctcaaaggcttctatcctcctcgtgcctttgagaggagaaggtacatgaatgtggtggtccagaaagcactgcatcctgagcttactagctatattcactctgtgactttcggtcttctacctttcattcagaagggattggtagagagggtcgtggtcatcttctatgacaaagggcatgtaccgaccgagaagttcgtcttcaagcttgcagtcaaccagtcataccgttccaagttagaggaggcgaacctggagttcgctctgcgagcattcttgatcaagctgactgttgctgagcctgttaccagaccccttccaccagatggtagctgggaggtgaccgcctacttccggtccctccccggcgacggtgaccgagaagctcagctgtggattcctacggacgccgagctgtggatgcagcctccgcagatcacccccatcaagtcagtcagctgtgaccctctgacgatgcagctctacttggagcaccctagcgtcacggaaccgaaggagccaccggcataatgacaggagcctgcacctgtgggctgtgatacactgcaatgtatagaatttttttttgcaaggcaactttggcacgaaccctcgagtcagtgaaaccttttttgttcagacagaggcaaggaaactacttctatccagtggcttcaacttctggctagagaaggcgacactgtaacaatcttgggccttgggattttggctgaggctgaggctgaggggggtggcagagacggacgacacatgggtgagaagcacatggctagaagaagagtgggg

SEQ ID NO: 214851 - DNA, 2997 bp, Zea Mays
ccagctagctcgtagcccattatctgctagtagcctggcagttccgacgctgcttgcggcggcgcttggcaaggccgacaaacggcgaccaggcaggcgagctcgtcgcctcgggggcagggaggaccggagcccctcgcctcggaggaagggaggacctgaggtttcagtgttgggtgacagttccccatatcctccaagcgcgtgcttgcctgcagcaacagatcgcttgtcaactccattggctttaatgggtgcaccttcacaaatatttgttgggaagtcaaaagccttctgcattgccaaaagctcttttcctgaacacaaatatgccctttcaattttaatcccacgactctcccattgccatattcccctcctcctctcccagtcaattgtttcaggtcttctcctcaaagctcccccttgtccactctgtcctccgatctctctctttggggcatttcccatctctatccctcgatttactcgccctgctacgccattctggatgtatgaccctcgatagctactccctcaacattgctttctatgccactgcccgcctcccatctgtttctgttggtgcccagcttcattccctttctgtcaaacttggcttggtttcagatacatttgtccttaattctcttatcaacatgtactcgtcttgtagctatccaacaactgcaagacaagttctcgattctgctccccaaggagcttgtgacacagtttcttggaacacaataatttctggatacctacgatgtgggatgcctaataaggctctgcaggcttttggccagatggtcaaggagccagttagactggatgatgtcacattgctgaacgcactcgttgcttctgccaaggcaggcaaagcgaaggtcgggaggctgtgtcacagtttagttgtggtgaacggggctggaattaattgttatatgggatcctctctgattagtatgtatgccaagtgtggattggttgaggatgcccgcaaggtatttcacggaatgcatgagagaaacgtcgtttgctggacatcaatgatttctgggtacacacagttgggtaagtttaaaaaggctgtcgatcttttcagggatatgcaaattactggaatgaaggctgatgatgggacgattgctactgttgtgtcttcatgtgcccaaatgggagcacttgacttgggacgatatgttcatgcttactgtgatgttcatggtttagggaaggagctttctgttaagaattcactgattgatatgtactcgaaatgtggggatataactaaggctcatgagatattctgtggattgaccaagagagatgtgttttcttggacggcaatgataatgggctttactgttaatggcttatgtaatgaagcacttgatttgtttgctcagatggaaggagagggtaaggttatgccaaatgaggtcacttttttgggtgtccttacttcttgtagccatggagggttagtggaacaagggttccatcacttccagcgtatgtccatggtctacaatcttgcaccgaggattgaacactatggatgcatggttgatctcttgggacgtgcaaagctattgacagaggcagaacaatttattaacgggatgcctattgccccagatgttgtagtatggcggtctttattgtttgcctgcagagcttgtggagaggtgggacttgcagaatttgtagcagaaaggatcctagaactggagccaaaaaagtgtgcaggacatgttttactttctaatgtctatgctgccacatcaaggtgggttgatgtgaataaattgcggacatctatggacagttgtaggatgagtaagcaacctggatgctctttcattgaagtggacggatgtgtgcacgagttctttgcaggagatgaatcacaccttgagatagatgctatatataacattcttttggggatcaatgaactgttagtagcagagtccttgtatgaaagttgtgatatttttttgtcaattaagtagctttatgatcaagcaggagctctgattaacagaattttttgaattctccccaaattgaagggtgcacctgaagggagttatggatcggaagaatcaaactcctcaaggtcaaatagcacaggtggttgtggaatttcttgaggtagcaatcagctgcatcgtcttcctcaaaggcttctatcctcctcgtgcctttgagaggagaaggtacatgaatgtggtggtccagaaagcactgcatcctgagcttactagctatattcactctgtgactttcggtcttctacctttcattcagaagggattggtagagagggtcgtggtcatcttctatgacaaagggcatgtaccgaccgagaagttcgtcttcaagcttgcagtcaaccagtcataccgttccaagttagaggaggcgaacctggagttcgctctgcgagcattcttgatcaagctgactgttgctgagcctgttaccagaccccttccaccagatggtagctgggaggtgaccgcctacttccggtccctccccggcgacggtgaccgagaagctcagctgtggattcctacggacgccgagctgtggatgcagcctccgcagatcacccccatcaagtcagtcagctgtgaccctctgacgatgcagctctacttggagcaccctagcgtcacggaaccgaaggagccaccggcataatgacaggagcctgcacctgtgggctgtgatacactgcaatgtatagaatttttttttgcaaggcaactttggcacgaaccctcgagtcagtgaaaccttttttgttcagacagaggcaaggaaactacttctatccagtggcttcaacttctggctagagaaggcgacactgtaacaatcttgggccttgggattttggctgaggctgaggctgaggggggtggcagagacggacgacacatgggtgagaagcacatggctagaagaagagtgggg

SEQ ID NO: 214852 - DNA, 1690 bp, Zea Mays
gaacgggctcaaggtaatcatcttctcctatcgtgtagaaacgtttctgcgcttggacttagcaaaaatcactgtaagttctacttgtcgtttggtttctactggtttcctttagatagtcttgaggaaatttctctgcctttagatagtctcgagaaataccttttacctagtacaccattagagtttcgtgctttctgtttcttctgctgccagtccccccttgttaattccattttttcttatctcgtgcactctgtgtctctgagattaattgttgatgtactctaaaatgcatttaacttccttaaagaatggagcgctaaattgttaataggatatacagaattaccctgtagtgaggtaaatttttttttgctccttaccctttctttgttacctatgacctgtccaatttccttcctttcttttcactcaagaagttacttctccatccctagtggatactgttgcaaacttttgtgcaggtatatgataccaagatgagaaaaccttccaagggatgcaaggagagggacgcgaattaccaccggaatgatcacacagatgaccatggcggcaagcacttcttcaaggttttggttggtgatttccacaaaagattggtcataccgggtaaatttgctaaacatttcgcagacaaggtagaaggaagtattacgcttgaatcacttggtgggtatacttttgatgtccaagttgcaaaggatctgggcagagtagtgcttcaatccgccgggtggaagtcgtttgttagtgcccattacttgaaaaagatggacttcttggtattcaagtacgacgggatgtctcggatgaaggttctaatattcgatcctagtggttgcgagaaagtaccaccaagttttgtcgcagaaaatgctagtagtggtggagttaagagagaagcacccattggcctttcaggcagctatgctcgtcttcccatgaaagcaccagaaactaaaaggaaatcatggaagcaaatggacaggagtaggatcattatgaatgcatcaagctccctgtccaactcatcaggaggcatggcatcttcagaagatgatgaagcacatcctgttccgagttacatgctcccacaaggcaccaggcttgatagattacaaaagaagattctgaaagagcgactccgagacatttgttctgaaatccccatctatgtgtgtgtcttgaagaagacaaacatttctggacactctcaagccctgagagttgattcttcggtgccatggcaatagctgggaagtgctgttacgcgttaagcttccgggagctccacgcaaatgcaaaaggctttgcaaagggtgggcacggtttgcaggcgacaacagtttgcagctgggagatatctgcctctttgagccacttgataccaagaatggcacgatgaatgtgcatatcattcgcagagactgagatttggggaatgctttctgctgctgtttcgactaatgctgcagtggcagtagtgcttttggtcttgataagagtggcttatggtcatgtcagccattgatgccaacttttgtagtggtggtattaacgcttatatgcttggccttgacaaggttccagcttagtctgttgagtggtgattggtgaacaatataatctatggtctatccatcgccctgattagttaaacgat

SEQ ID NO: 214853 - DNA, 2236 bp, Zea Mays
atattttctgtctgtagcactgaacatcatcagtctatcttacttgctgtgttggactttgccacagtgactggtataatcttgagaaatctaaacgtgtgaagtcatttcgttgtggagaatatgatgaatgtatagaaaaagccaaggctctagttcgccggcaaaagaagacacatactgaagggagatatgttcgcagagaggatgccattatgcatgcccttgaaatcgaaaggtctcattttccaaataactgtgatgatcttgaagaggacgcggacaatgatatatgtgcatcccagaatatatgttctgcaaagtctataaatataaatgggctcagcaaaaaatctcgtggtgcaaggagtttgtatgatatagaaataaattcagctcaagagttgtctcaaacattgacactgtataaacagccacaaaatttatcctcttcaagcactaggtatgcatcgtcaaaaaggaagaagtggaagggacataaagatcatgaggatgattcagttcatggattccagcgtatgagagatcttagggagattggaacaaaaaatgttttcaagcagaagtctggttcaggaattgtttcagatgtacctcttcttgaaagtggatcaagctttggctatgatttgtccagtgccgatgggataaaattgggtgagcagtcccagtcatccataaaaaagaaacggtccaatattgggcaatcctatgatagtttgagtaagaaagataagcatcaccctctatcactgttatgtgaagattcagaagtgtctggaacttattatcattgggacccttcaggccagtcttgtagtcaatacccaggaggccagatacccaatttggttgaatcaagtaggagggcaaaaactatttttccaactgatgtaaataactgttcctacagctcaggcacttcaagtttggatacattattagatacatcacacatcaatcataaacgttctctaaatgctgttactcccaagaatgctgacccatgcacagctagatttctcaatgatgactgccctgattgtgatggatttcttgatgctgttactttggaggaggatgttctagaggaaggtaaaagccatttggatacttatggatcttgtgcatccataaaggatcaaatttcaaaactgggtaatcaaagtactggctgtggcataggtggcacatcttcaactcggcataatcgaaattctaagaaaaacataacggctgtcaattttttgatacctaaaggaagccacaagagggatacaaattcgctgctgcaacatgaagggattataaaatcggaaggtactgtctttaggcctgctgaacttgaggataatgcacatgtgactcctgagcatgacgagtcctctgaaactataagcaatctttcaaactatgagaagaacacaacatcattccccaattatgttccacttcaattactaccaccgcctggacagcggcctgatcctaaacctccaggatgccctgtaacgaatccaaccaggagagcacgtgcagattatagactatatgatgttgaggtgactgtccaaagaagctacaagggtcatcatgcgccccttatttccctcatgagtaaatggacaggtaaaccaattgtggggtaccctgtcaccctggaggttttgaaggatagccgtcacacaacaagtagagatgagcaccgcccggtgatgggcagtctggactccttactaaagagcagagtttcagagccacggcaagcaagatcttcacatgcatcacgatcaaaatttaaatccagtggacgtaaaaaggccacagagcatgatttggacaggtcttggtggccccataccaagaaaccagcatcttcgccgaggaaaatgcggaggctatcatctttcgccggcagccggagagagagtgcagaccaaaagcccgtagttgcaaaaactggcggaccagcagtcgcgtgcgtcccgcttcgtctcgttttcagtaggatcaatgaagcactaagctttcccttgagacaagaaaagaccacctgaggttgttgtggcatttttgctatgcagagatagaatgtgggcaggcatatacatttgctaggttttctttgtatattagttttgtattatctaaaaacttattgtgtggtatatttatatccggtacataactatgcaaccaagatataagaatagag

SEQ ID NO: 214854 - DNA, 2884 bp, Zea Mays
ggatttgggagaggaatggtgggagatagcgccgtaccccgtggtcagccgccagtgtttcgcactttgctattcagcttcgttcttcaccggttcaccctagccgccaccccaacccccagcgacagggaccttcgccgccaggccgcccccaatccctagcgactgcgagcaccgtcgccaggcgccgtgcagcgagcgtcgccgcctggcgaagtcgcgcgactcgtgccctgcagcgagcgccgctgtcccgcacccaccgtcgaacggctgccgatgcccaacgccctgcagcgagttgcgccgtcgtccgcttcctctcgctggtaacctcgtgtttcgatttggacagattgctcgtgacttggtgttgcgccgccgaccgagcctccttcccctaagtccctaaccgtaagtcctaaatcttggcctaccctagtccaccacctgccgcagctctcgcctccgtcaagatccgaacccctcgcacgcggcacgaccaaatcctagacacctgatcccaatgcgcagggccctcggcagagagacgttactgcgccggcaccgtggatcggcactgctgtggctagctgtaacggcactggtcacaggcaccatctgcctctggtcgtccttctccgttggcctcctcagcacctacagggtccaggatgttgttgcaaatgagttgtggagaaccgtagattcaaatggttggagagcatcttctgcaccacgcatctgttggcctcccccaccagctgaatctgagagcaatgggtacttgcgtgtctggtgcaacggcggcttgacccaacaacgcagtgcaatatgtaatgctgttgtcgtagcacgaatcatgaatgctacactagtgctgccagagttagacacaaattcattttggcacgatgagagtggttttgtagatatatatgatgttccccacttcatcaacacattgaaatatgatgttcgaattgtcatgagcattccaaaaatcactgcacaaggaaagaccaagaagctcaaagcatataagattttacctcctagagatgcacccgttacttggtacagaacaactgctttggagagactaaggaagtatggtgcaatatatttaactccattttcacaccgtttggcagaaaaaattgatgatccagagttccagagattgagatgcagggtgaattatcacgcactacgatttaagccaagtatcatgaaaacaagtagtgatatagcgaataagctccattcagaaggccatttcatgtcaattcatcttcggtttgagctggatgtgcttgcatatgctgggtgcttcgacatattcacacctgaagaacaggaaatcctgttgaggcatcggaacaaatattttccattgctgttgaggtattggggcaaatattttccaggaaacacacctgactacagggaaagaaggctcattggaaagtgccctttaactccagaagaggtaggtcttattctacgtgctacgggatttgataactcaacatggatttaccttgctcctggcaagctctttggtgggaaacacttcatgaagccattcaaggctatgtttccacgtcttaaaaaccatagtatgatcagaagtggaaagctggaagaaaatatccgagggctagcagggtcagcagttgattacatggtctgtctcctgtcggacatttttatatatgatggtccgagcaacttcgcagacaatctcatgggtcatcgtctatactatggtttccgaaccacgatcacaccaaacaagaaggcccttgctcggatattcatggacagggaggaagggcacacatctgcatttgaggagagggtcaggcaggtcatgctcacccattttggcgccccccacaagcgcatccatccagagtctttctacacaaacccatggccagagtgcttctgccagacgaaagctaggaatcatgctgaccggtgcccacacaacagtgtaaatgatgtccttgaaagttggttccataataaagaagatgtagaagtggaagctactaatcaaactgactccaccagctaaaccgagagttggctggtggaactgagttatcaaaggtttattgattgagaacagattgtttgtcacagacctgcgaatgacatcattggaggaaggattgatggctccagatctctgtaggcgattatgttcgactcaagatttagttgttgagattcttagtctgggagggtcagaaccagattttggataggtttacattgtcatgtagagttctgtggaagaaaaatcatacgaacgtcatgaactatgtggctactacaattggagatctttaccccatatgctatagctgagtgtttggtggcttcagttctgttggagttatttgctgttcctcactatacatatctggttgaattcatgcgttcctggtcctggaactggaacttccccagttttgatttttgcaattcaccgtaatgctaaaaagtcgactatctccaggctccctatcccactccctatttcaaagttctctctgcaacaatacatctatagtgcaaaacagtgttatacacgcctgcatgcacgacgttgctggagttggcctaattccgggttgctggagttggcctaattccgggctccttcgaggtccatggcagcatgtaactgtattgatttgttctccttgtttgtagcctcacacttggttgaatatttcgaaaaatctagaattccaatattttttcttatttttattttgtttttttagtttctttagaaagagataacagtcctttgtacttgtatatatgtacacaacacatattaatgcaaaccatgtattgtgtc

SEQ ID NO: 214855 - DNA, 2891 bp, Zea Mays
ggatttgggagaggaatggtgggagatagcgccgtaccccgtggtcagccgccagtgtttcgcactttgctattcagcttcgttcttcaccggttcaccctagccgccaccccaacccccagcgacagggaccttcgccgccaggccgcccccaatccctagcgactgcgagcaccgtcgccaggcgccgtgcagcgagcgtcgccgcctggcgaagtcgcgcgactcgtgccctgcagcgagcgccgctgtcccgcacccaccgtcgaacggctgccgatgcccaacgccctgcagcgagttgcgccgtcgtccgcttcctctcgctggtaacctcgtgtttcgatttggacagattgctcgtgacttggtgttgcgccgccgaccgagcctccttcccctaagtccctaaccgcctaccctagtccaccacctgccgcagctctcgcctccgtcaagatccgaacccctcgcacgcggcacgaccaaatcctagacacctgatcccaatgcgcagggccctcggcagagagacgttactgcgccggcaccgtggatcggcactgctgtggctagctgtaacggcactggtcacaggcaccatctgcctctggtcgtccttctccgttggcctcctcagcacctacagggtccaggatgttgttgcaaatgagttgtggagaaccgtagattcaaatggttggagagcatcttctgcaccacgcatctgttggcctcccccaccagctgaatctgagagcaatgggtacttgcgtgtctggtgcaacggcggcttgacccaacaacgcagtgcaattacttctgccttgattttgtagatatgtaatgctgttgtcgtagcacgaatcatgaatgctacactagtgctgccagagttagacacaaattcattttggcacgatgagagtggttttgtagatatatatgatgttccccacttcatcaacacattgaaatatgatgttcgaattgtcatgagcattccaaaaatcactgcacaaggaaagaccaagaagctcaaagcatataagattttacctcctagagatgcacccgttacttggtacagaacaactgctttggagagactaaggaagtatggtgcaatatatttaactccattttcacaccgtttggcagaaaaaattgatgatccagagttccagagattgagatgcagggtgaattatcacgcactacgatttaagccaagtatcatgaaaacaagtagtgatatagcgaataagctccattcagaaggccatttcatgtcaattcatcttcggtttgagctggatgtgcttgcatatgctgggtgcttcgacatattcacacctgaagaacaggaaatcctgttgaggcatcggaacaaatattttccattgctgttgaggtattggggcaaatattttccaggaaacacacctgactacagggaaagaaggctcattggaaagtgccctttaactccagaagaggtaggtcttattctacgtgctacgggatttgataactcaacatggatttaccttgctcctggcaagctctttggtgggaaacacttcatgaagccattcaaggctatgtttccacgtcttaaaaaccatagtatgatcagaagtggaaagctggaagaaaatatccgagggctagcagggtcagcagttgattacatggtctgtctcctgtcggacatttttatatatgatggtccgagcaacttcgcagacaatctcatgggtcatcgtctatactatggtttccgaaccacgatcacaccaaacaagaaggcccttgctcggatattcatggacagggaggaagggcacacatctgcatttgaggagagggtcaggcaggtcatgctcacccattttggcgccccccacaagcgcatccatccagagtctttctacacaaacccatggccagagtgcttctgccagacgaaagctaggaatcatgctgaccggtgcccacacaacagtgtaaatgatgtccttgaaagttggttccataataaagaagatgtagaagtggaagctactaatcaaactgactccaccagctaaaccgagagttggctggtggaactgagttatcaaaggtttattgattgagaacagattgtttgtcacagacctgcgaatgacatcattggaggaaggattgatggctccagatctctgtaggcgattatgttcgactcaagatttagttgttgagattcttagtctgggagggtcagaaccagattttggataggtttacattgtcatgtagagttctgtggaagaaaaatcatacgaacgtcatgaactatgtggctactacaattggagatctttaccccatatgctatagctgagtgtttggtggcttcagttctgttggagttatttgctgttcctcactatacatatctggttgaattcatgcgttcctggtcctggaactggaacttccccagttttgatttttgcaattcaccgtaatgctaaaaagtcgactatctccaggctccctatcccactccctatttcaaagttctctctgcaacaatacatctatagtgcaaaacagtgttatacacgcctgcatgcacgacgttgctggagttggcctaattccgggttgctggagttggcctaattccgggctccttcgaggtccatggcagcatgtaactgtattgatttgttctccttgtttgtagcctcacacttggttgaatatttcgaaaaatctagaattccaatattttttcttatttttattttgtttttttagtttctttagaaagagataacagtcctttgtacttgtatatatgtacacaacacatattaatgcaaaccatgtattgtgtc

SEQ ID NO: 214856 - DNA, 1480 bp, Zea Mays
cgtcacatctcccctcgggcctcgccgcctcgccgcctcgcaccttttactgaaggtttgacctcacctgcccctcctctcctctctccgccccctgctcctccgagtgaccgtacgccgtagctcgacccggccgatccccgaaaccctagacgcgccgctggtcgccggaggccgggccatggacgtcggcgcggagctgcgcgaggcccaccgcctgacgggccacgccgaccgcgtgtgggcgctcgcttggaaccccgccccgggccccggctccagccccgttctcgcctcctgcagcggcgacaagaccgtccggatctggaagcgcgcccctgacggcgcctggcagtgctcggatgtgctggaagacacgcacaaccgcacggtgaggtcctgcgcctggtcccccaacgggaagctgctcgccaccgcgagcttcgacgccaccacggcagtgtgggagtacaacggcgccgactttgagtgcgtcgccacgctggaggggcacgacaacgaggtgaagagcgtgtcatggagcccgtctgggtcactgctcgccacatgcagccgggacaagatggtgtggatatgggaggtgctgccagggaacgagttcgagtgtgtctcggtgctgccgggccacacgcaggacgtcaagatggtgcagtggcacccaattcttgacattttggtctccgtcagctatgataattccatcagggtctgggctggtgatggagacgatgagtggcactgtgtgcagacactaactgaagccaataactgtggtcattcatcaacagtatgggcattatcctttaaccttaaaggtgacaggatggtcacatgcagtgatgaccaaacgttgaaaatatgggacacaagtgctgatttgtctcaaccaaaaactggcgaaggtcatgactcttgcgaggatattatagctagtggtgcgggcgatgatgcaatctgcttttttactgaggagaagggtagcatggttgaaaagccctcatacagattaatattaaagaaagagaaggcacatgtcatggacataaactgtgtgcgatggtgtcctcaggacccaaggttattggcatctgcgagcgacgacggcacggtgaaattgtgggaactgagagggaatgtgcttgattgagttctgttgtaatcactgtagcgtgcgttgagataatagagcagattaggtatcacctttggatttctgttctactgagctcggctctctgtagttcatacttgtatatcgagagggtattttatgatggtcttttacaagatttaccgtgcaaactatgaaccgtgccatcctctcagagacatggtattgatcgtgtatacattatggaagggacagccgaacatgtccaaccattttttaaagttcaattcatgtacaatgatgagtgatgaataatgaataaagatttgcagcttcttgtatgcggaa

SEQ ID NO: 214857 - DNA, 958 bp, Zea Mays
cgtcacatctcccctcgggcctcgccgcctcgccgcctcgcaccttttactgaaggtttgacctcacctgcccctcctctcctctctccgccccctgctcctccgagtgaccgtacgccgtagctcgacccggccgatccccgaaaccctagacgcgccgctggtcgccggaggccgggccatggacgtcggcgcggagctgcgcgaggcccaccgcctgacgggccacgccgaccgcgtgtgggcgctcgcttggaaccccgccccgggccccggctccagccccgttctcgcctcctgcagcggcgacaagaccgtccggatctggaagcgcgcccctgacggcgcctggcagtgctcggatgtgctggaagacacgcacaaccgcacggtgaggtcctgcgcctggtcccccaacgggaagctgctcgccaccgcgagcttcgacgccaccacggcagtgtgggagtacaacggcgccgactttgagtgcgtcgccacgctggaggggcacgacaacgaggtgaagagcgtgtcatggagcccgtctgggtcactgctcgccacatgcagccgggacaagatggtgtggatatgggaggtgctgccagggaacgagttcgagtgtgtctcggtgctgccgggccacacgcaggacgtcaagatggtgcagtggcacccaattcttgacattttggtctccgtcagctatgataattccatcagggtctgggctggtgatggagacgatgagtggcactgtgtgcagacactaactgaagccaataactgtggtcattcatcaacagtatgggcattatcctttaaccttaaaggtgacaggatggtcacatgcagtgatgaccaaacgttgaaaatatgggacacaagtgctgatttgtctcaaccaaaaactggcgaaggtcatgactcttggactgcgcagtggtgatcgcag

SEQ ID NO: 214858 - DNA, 6694 bp, Zea Mays
ccgcctcgcaccttttactgaaggtctgggctggtgatggagacgatgagtggcactgtgtgcagacactaactgaagccaataactgtggtcattcatcaacagtatgggcattatcctttaaccttaaaggtgacaggatggtcacatgcagtgatgaccaaacgttgaaaatatgggacacaagtgctgatttgtctcaaccaaaaactggcgaaggtcatgactcttggtaagaagttagttttcttttaaggattgtgttctctgcatgaatttggtaacccaggagtagcataacttagcccagaagcttaggctgtagaagaacctgtagctcaccagccctcagaacttctactttacagtactactatgtatcaaaaatattaatgtccttataccattttttattaatgctgattttgtgcatcaaaatttcacattttctgtttatcttgtcctgttgcaaatgcagaactaactagggtgtagctttgctttgcagagaagtgtttctcttatattgtcctttcaactcggctaaagttgacaagctgagaaatacttcccaccatgatacacttaatggctatggattgacttaagcattaactcttgtagttctcttgatggtgtatagtatgttttaggtaatcttgacaattaattcctatatattaaaccgctgtggaacaacctgcagcgaagtcatccacgtcgtctaaattatttacattgttccgttacgaaacgtactctgcacacttcccttgcacgtgggtctggaactttcccttcaaagacatccgtgccaggctaaggaggataaggcactaggaggataaggcgaggcgccacagggcagccatcgtgcgctctcgccgtcccgcgcagatccagcttccttgcgcggacgcccgtggttgctgctgtcatgctgccggatcccggcctagggttgcagctgtttcagatccagcgtcaccaggcgggaatcagacattgatgccaaagcgcaagtgtatagcccgaacatcaatacctttgatgtgaagctggggacctttgtgccgtcttaaaatgtcatcatctaaatgacgatatgttcggaagagatttcgagcagagcctgattccgtgcgggatctgctcaaggagccatattttgcagcccctgtttgtatcagtcggtcacctacctacaaaaccccggcctgaaccgtgtacagtgttatctgaagctgcagtgtttaagcagtgtgaagctattttgaagaagattatggaaatgtagtaatatattcaatgttccggttgatgttgagaagctgcaaattcctgattagtttgacattgtcaagatcccaatggatcttggtaacagtccacaagaagctccaatctggctcatgcacaagtccatctgattttgctgcggatgccaggctgacctttaacaacgctatggcttataatccttgggggcatgctgtgcacgacatgaccattcagttgaacaagatgtttgagagtcgatggaggccaaatgagaagaaactagcttttgctgccactgagaaatttgaagaggaagacaatacctcctatggactgcagtgagacatggagtgtgtatagcatgaaaaaccaaacatgacagttgaagagacaagcatttgagaactgtttggtttctatatcccattagttatctgctgcaacaatgcaacgacagcaatactgtcagtgactacatgctatttgagttgaagaaacatttgttattttctattattatatatattatgacatattaaacagtgcagcaacctcatcctaattatttaatactgtatttggtatgaaatgtcctattctgtttggacacttcactggcatgacacatgcgtctgaacatttctcgttggagatacgagatatatatgcgcgcactagcgcgcgctaatgactatttattattaagtgatatgttgtgggcgcctaggactgcgcagtggtgatcgcagcaaggcttgggattgtggaaggtatctcagtgggtagggggatcggccagaggaggagctggttctgtcagctggcccaaggtgcgccaggacgaccaaggaagctctaccggccaggtaaaacttcttttgataaccctaatacaaactacatcaactcctttatagattaggcaccactttattctcaaccacctctaacaactgagagctaatctctccactaaaataggagggctaactgactccctctttatctcttcttatcttctaaacaaatagcccagttaggacttatcctttgtggcgcctggcatactgccggcccacaaaggtgtctacaacatttccccccctcgccgacaaagagctcgtcctcgagcgtcatggtcgggtatctaagcttgaagtcttccagctgctcccaagaagtatccgtctctgctcggcctgtccacttgatcagaacttcccacacccccaattcagccttgcatggaggactttttctggtgtagggatgactctgccgatgaggagctcgggcagtggtataacttgggttggagcctcccctatgaatttcttaagtagagaaatgtggaacacatcatgtattctggccctaggaggaagctggagcttgtaagagacagtgcccaccctcgatagcacttgataaggcccaaagaactttgagccaagcttgtgaggtgtagcagaagtgacaccaactgttgtgcgctgctgtaagcgtagccatacccaatcgccctcatggaactccacttcacgtcggtgcttgtcctggtagcttttcattgtaacctgtgacatcaatcggtcacgaatatccgccaagaattcatcgcgagcatgtagttgtttgtcaatatcagccacctgtgatgttcctggatggtagggcagaagagcaggaggttctcggccatataccaccttgaatggagagcatcgaagagcagtttggaaggaagtgttgtagcagaattcagcccatggaagccatttaagccactctcttggtctatcccctgccaggcaccgaagatacatggtgataattcgattgaccacttccgactgtccatcagattgggggtggaatgctaaactcatgggcaacttgactcctgccagctggaacaattctgaccagaatgtgctagtaaatattgtatctctatcactgacaatggagtaaggcaacccatggagacggacaatgttatcaaagaaggcctttgctaccgatgctgctgtgtaagggtgtcccagagcaataaagtgtgcgaacttggagaaacaatcatcaaccgtgagaatcaccgacttgtcgcccacttttgggaacccctcaatgaagtacatagaaatatcactccatacttctgaaggcactgatagaggttgcaggagaccaccgggatggagatgttcagttttattgcgctggcagactgaacaacctttgatgaactccttaactctctgtaatgcatgaggattatcgaatgacgaccggaacctgtgaattgtcttttggattccttcatgtcctgtgtcatgggcactggcaatagtatcggccaaagagtagaggcatatggcacatagactttaccttcgaaaaggagcaacccatccaaatctgtccaacccgatgaaacagtgtcggcagcaagctgctggcgcacatcttggatttgtgggtccgttgcagcctcggctcgcaaactgtcaaacagctcaaaaggtgtagagatggtgttgagcgccatgcctggctcgacacgacgtgagagagcatcaactgcgccattgagtttgccaggcttgtactccaccacaaaatcatatccgaatactttgctcacccatgtatgttggggaattgtggtcagtcgctgatctaacagatatttaaggctgtagtgatcggtgcggaccagaaactggcgcccccagatataaggcctccagtgacggactgctttcactaacccaatcagttctcgttcatatgccgacaacttttgatgctgaggtgctactgccctgctgaagaaagcaatagctccacctccctggtgtaacacgacaccaaaaccagaccctgatgcatcacaatcaacgatgaaactgcggtcgaagtcgggcatatgtagtaatggtgcagacattaaggcttgtttgagcagattaaaaggctcctctgcttcttctgtccatctgaatgcctctcgttttaacagtgttgtcaagggggctgctacaatgccataaccagcgatgaatttccgatagtacccggttagacccaaaaatcctctgagcaccggatggagcgcggtggtggccatgactccactgcttcaaccttggaagggtccatcacaactcccttatcagagatgatgtggcctaagtaacccacctgtgtttcgccaaaggaacacttggtgcgcttgagggctaacttctgctctcttaacaattggaatacatgccgcatatgttgaagatgctcggtccaggaagagctatagattaatatgtcatcgaagaataccagtacaaacttacggatgaacggcttgagtacaccattcataagcacctggaatgtcgatggtgcattagtcaagccaaaaggcatgactaagaactcgtagtggccatgggagagattctgatatttgccatcagcaagaaacaggtttgtaaaattgccatcaggcccacatttcatagacccagctggacccataattcatagacacactggtaattataacaagaagacaacattgtgagtggcaaaaatccaattatctctggccatggtgcgtgcggaaggtcgtcttatcgatgtcctctgggtgcatgcgcacctgatggtagcctctacgcaagtcaagcttggtgaagaaccgggctccctgaagctcatccaagagttcatccactactaggataggaaatttgtccttgaccgtcttcgtgctgagctcacggtagtcaatgcagaagcgccatgtgttgtctgatttcttcacaagcagcactggtgatgagaacgccgaagtacactcccggatgataccttgggacatcatctggtcacactgtcattcaatctcatctttgagcaactgagggtagcggtacggtcgtaccgccactggtactgtccctggcagaagacggatgcgatgatcatggcggcgaggtggaggaagtccctggggctcgacgaagaggtcttcaaaggatagcagcaaggtatcgaacaagttgtccacgcaccatgtgtccgtggcgccaaaaagacatcatcaacttctcaaagttgcagatgaaaggacccaaagaatgcaaccattccaccccgagcaccacatcaaagccatccaggggaagagtgtagcaggttgtggtaaaggtctcttcgccgacagtgaatggggtctgagaacagacgtccccactcaacaccttctcaccatttgcaaccttgacaggcagttcagctgttggagtcacatgcagtcccagtcttggcacaatagcatcgcggatgaatgtatgggtggatcccgaatccacaagagcaatgagggccacaccattgatagactttcaatttcagtgtgtcggcgatgtcaatcccagtgagagcatgaagtgatatgcccagttcctctgccagtgcattagttgtcctggtatctttgccatccaattccaacagaaaaaccccgcaagcagggcacttgtgatcgactgtatatttttcagagcagtggtagcattcactgctggcccgtttggcggcaacctcctccgaggagagcctgcgcaaacggggtttgctggtagccgataacgagggctttgttgcgtttgcagatgtcgttggttttgatgtagcagatggcgtccttacggcattcataggcgtgtgccaggtgcatggctcgctgcagtgtagttggagtcagcggttcaacatcagtccgaagcggttcacccaagcctacggtaaacatctgagtttgctggagctgcgtcatatcctcgcaacgacagagaatggacagaaactgacgttgatagtcttcgacagtgctggtgcgccgaaggtccttgagatcagccatatcgttggaccgtagaggtggtccaaaccgcatacgggtgaactcaacgaagcgggaccaagtgagcacgtcgcccgtgtcccgctccagagtgtagaaccactctgccgccacaccgtccaaatggagtgatgcctgccacaccttctcatcggatggagtcctcatgcccctgaagtaagtctcacatttattgatccatggcagggggtcggactcaccatcgtagtggggaaaggagacattgggtcttcgatagccaccatcgtcgacgcggtcacgaggagcagatcttgtgctagccatgaccccgacaggcgccgtcggactcaccatcgtagcgtgatccgctgtccatgcagttcgaggcgtgagttaatggtggagagctgcgccaatatttgatccaatttggctgagtcgaaggaggtcttcgcaggatcgtgatcgacgccggacatgttggtcgatgcgttggag

SEQ ID NO: 214859 - DNA, 870 bp, Zea Mays
gaacaaataaaaatatataattaatttagtgcacacggagtggggaaacgaaaaggaaagctctctcattgccaaattgcccccgactcaagccccccgcgccgccggcgttggtggaatcgatcgacccggcctcgccggacaatccaccagcgttggtttcacctcaggtttttgtgcatggaagatgacaatgaggtcactggagagtcacctgtggctgatgaatgggatatgttgtccctgacttcatcaatatatgctagcccattattccgaagaggatttgatccaattaatttgcctggatatgggaatgtgattaatattcaggaaggcacacaaactggattagtcatgtcagatggcttcgtgttccctccaagtgagcatgaaaatttgccaatagaaccagagcatgaggatttgccaatagaaccagggcatgatgaatcaaatacaaacagcgttgaaaaggaaagtagttgtgctggaaataacgatgatgactggtgtcatgtttcacctgaagaaatcgatgacgtaagtaatgaaaatctagctgacaacagtgacttgcctactgccagtgaagctacggtaccagattcccagcctacagaaataaatgctaagcgagagaaagatcataggacatgcaaggctgatcatacttgtgaaagatggtggaaaaagaaaaccacgtatctatttcatcatataaaaggagtgactacactctgctcagttgtggcagctggtgctgttgttggttttgttgtaatgggtcagaggtggcagcaggaccattggcaccttcatcaatttaagttcagtgtcagcggtgagactaatcatatggttcactga

SEQ ID NO: 214860 - DNA, 1746 bp, Zea Mays
gaacaaataaaaatatataattaatttagtgcacacggagtggggaaacgaaaaggaaagctctctcattgccaaattgcccccgactcaagccccccgcgccgccggcgttggtggaatcgatcgacccggcctcgccggacaatccaccagcgttggtttcacctcaggtgggaatcgtatccctggacgacgaggggcttggggctagctaccacaacgttctgagatggtcttgtcgtacaccagctgtttgctgaattttctctgggctcatggtgttcccttttcttttgagacgacttttgcccctttgtccccagccatgagaacatcgtctgaaaaaactcggttgaatgtgggacttcactgtccatgctacctctgtgacgccactcaacttcatttggataggttttgcaacctaatttgctcaagcagggcagatagcatgactggtatcgtaagagtcttagcaagtgaaactcaggacaaggataagcccgtcgcaggaggatatcatggcatgcccatgtcttcgaatggttaggtttttgtgcatggaagatgacaatgaggtcactggagagtcacctgtggctgatgaatgggatatgttgtccctgacttcatcaatatatgctagcccattattccgaagaggatttgatccaattaatttgcctggatatgggaatgtgattaatattcaggaaggcacacaaactggattagtcatgtcagatggcttcgtgttccctccaagtgagcatgaaaatttgccaatagaaccagagcatgaggatttgccaatagaaccagggcatgatgaatcaaatacaaacagcgttgaaaaggaaagtagttgtgctggaaataacgatgatgactggtgtcatgtttcacctgaagaaatcgatgacgtaagtaatgaaaatctagctgacaacagtgacttgcctactgccagtgaagctacggtaccagattcccagcctacagaaataaatgctaagcgagagaaagatcataggacatgcaaggctgatcatacttgtgaaagatggtggaaaaagaaaaccacgtatctatttcatcatataaaaggagtgactacactctgctcagttgtggcagctggtgctgttgttggttttgttgtaatgggtcagaggtggcagcaggaccattggcaccttcatcaatttaagttcagtgtcagcggtgagagcatgaatcgagtcattggagcattcagtcgtttgaaggatgggcttcctgggagtgagcaactaagatctatgctgccgactcgcgtactcccacaacagccgctgagcgcttgagtacatgcaccaaattttggtgggctgcttctagtgtcaatttttgttgcttatatgatcttgagaaagttcattctttttcttgtgctacttgattttatgttactgtaaattagtggtcgagacttctcacggtgctgttctttaaaacatagcaaccgtgaagggacatggtggaaacacagagggcactataacaatatgtatccatatcacctgttttactttctatctcaatgacatgtgcttgtagtttggcttgttcgtgctcttacgcttgtgaagctgtgtccagtggtgacgattttgaaatcaatagttctaaatttcaagccaaagttgtcttttttatttaatgccctggagggttgtacatcttttgtattagagaggaaaggag

SEQ ID NO: 214861 - DNA, 2171 bp, Zea Mays
ggagcatgcagagcagcgccgtcaccggcgataaaggcccaattcgcggtgaccactagctcgccgctgccaaccacgcccacacatgttttatctctagccggcttcacatacagccaagaggccaagaccgtagaaaagccaaggccatcgatcgataatgccgcttctccctacgcagttccgtctcctcccgctgtccctccccgacgcccgccagcgccgcggtattctcccgccggcggcggcagcgtccttgttgccatcgtggtcttgttcgccgccattgtctcggcttcgatcacgggggcggcaggctaaaacgaggctgcgagtcgtctctcccgagacctccagcaccgctgccaccgacgctgcgacgacgaccgccggcgcgccgccagataacagcaagtgggcagagttcgcgacgcgagtgtccggcgagtgggacggcttcggcgcggacttcacggcgtccggcgaccccgtggagctgccggagaaggtggtcccggaggcgtaccgggagtggggcgtgcaggtggtggactggcagacgcagtgccccacgctggcggacccgggcgcgccgtgcgcgctgcactaccgcctggtccgcctgctccccacggtggggtgcgaggccgacgccgccaccgtgcacacctcccaccagcgccacgcctcctccgccgccgccttcgcgtacgccgccgcggggtcctacgtcgccgcgtggcccaggggccccgcgctcgtgctcgaggtggagcactgcgtcgtgcgccccgacgcgcccgccgaggaggccggcagggtccgggtggtgcagaccgtggcgctgggcagggaggcgcgtctccgcgggctcaaggtcttcgccgagcagtggtacggcccgttccgcgacggcgagcagctcggcggctgcgccgtcggggagaccccgttcgcggccggggagaagctcgacgtcgccgaggtgatcgggcagtgggagaccacggacgccgccgccgcgaggttctccggcgacctggaccccgagacgggaaagttcgcggagctgtcgccggaccagccgaggaagctggtgagggacgcggagggcgtcgtgacgctgccgaagcagctgtggagcgcgttcaaggagctcggcgacggcgagttcctgtgcgaggtcggctgggctctgggcggcggcggcgccgtcacgtcgcgctgcgttctgtccaaggacggagacgtcaaggagatcgctgccgcccacgagcgccgggtgtcggagaccacttgacttcggggccaattggccatacccgatccaacagagaacaaaacgcgctgctcgatgagccaactcaatttggtatcttcgaatcgaaggtacaacgactgcttggccgtctaacctcaacactcttcgccttaacaatcatcatttagacgattgcaacatttctgttcatttggccgtttcatgcacccggctctgcctttccctgctacggctgctttgcaaactggtttcccgctgcgtgcctagcaactgccaaactggtctggctcatggagcccagactgcaaagacagcggctgccagaacatgcgcctgcaggcgtagagcgtcgtgtggagaaacgatgaacacgagaagagaacaaaatctgtacatggcgagcgcatcagtgacagtgtacttgaggtgcatctctcaaggttacattcagagtggtttccatttgttgccacccaagtccaactttgctgccttgcatcatggctacgaattcggcgtagtcaatctgaccgtcctgaaaagcagatgcaagcaaggaacatcagtgcatgcattagttaaacagcacaataaaactcggcataggcactgttactacctggtagtcccaacaactgtatcgtggttttcaccatatatttaactctgtaacgtactcctatttactttctcctaccctttatttatggttgctgaaatcgacagctgtgggttaggtgtgactatgtggttgatgcccagacaccaaaggtgtttatatattctataagtaaaatgtcattcaggataaggaaccattgcaaccttttcctacaaagcaaccccacatgactcgaaaggtctagaatgaggttgacatgtttaggaa

SEQ ID NO: 214862 - DNA, 2750 bp, Zea Mays
ctgattttttcggaaaaaggatcgaaataaaaaaaattcgggtcaacggttcacacggtcataattggaagagttcgagttgcttgattgcttctgcggatgcgcttcccccatcctcacccaaaacctaccggcaaaacctacagcccttcgtctcccacacgcactctgccactcatctctaggttgtgtacgatcatcagcgagaggagctccctcgcttatttgtctctgaaacagacatcattgcttcagttagggaatgaagggagattccagcagacaaaatagcttagaggacaactcacaaatactaagtgcatttccaagggaaccaaagctagaattcctaaaaaacatcacgaaagacttctcaagtgaacgagtgattggacatggtgtctttggagtggtttataagggcatacttcagaatggacaactggttgctgtgaagaagcttgtgcaaacatccggagttcatgatagacggtttcagaatgaggcaggcaatctccagtttctggagcacagaaatatagtcaagttacttggttcttgttaccaagtagaaaagaaattggtggagagaaacaacaaacattttctatcagatgttccagaaaagtttctatgctatgaatatctgtctaatggaagccttgacaactatatttacgatgaatcttctggaattgattggaccatgcgcttcaaaataatcttggggatatgcaatgggttacattttctgcatgaggagcgaagtgaagccatagttcatttgaaccttaaacctagcaacataatgttgggtgacgacatggtgccgaaaattgcagattttgggctttcaaggttgtttggtgaagaacaaaccagaactctcaccaaaaacgttgtgggatggataggatacattgccccggaataccattacagaggagaaatatcagttaagtcagacatattcagtttgggtgttcttattcttgaaatagtgacaggactgaagagggacctcaatattcaagacatttcttctgagttactaattgacaatgtatctaaaaattggacagaaatgtcgcatatagaatcaaagtatccatccttggaagaacaacacctactacaagtaaaaagatgcattgaacttggtttgaactgtgtggagtctgatccaaagaaaaggcctactgtaggatcaataattggtaaactcaaagaaatcagtcatgaagctagcatacacaaatttatggagaagaaactgcaactgataactgaattcccaagggaaccaaagctacacttcatagaggttatcacaggggactttgccaatgaacgtgagattggtaaaggttcttttggggtagtttataagggagtgcttcaaaatggagaagtggttgcggtcaaaaggcttttggtagttgcaaaaactaatctggataagcaatatctgaatgaagtatctagtctgattgatctcaaccatagaaatatagtgaagctatttgggtattgtaatgaaatacaacggaaactggtggagtcccatggaacatatgtttttgcagacacagaagaaaggatactctgctatgaatatttgcctaggggaagccttgacaagtatctttacggtgcatctcatgagcttaactggaatatcagcttcaaaataatacaaggaatttgtcatggtttacagttcttacatgaatcgcaaagacccataattcacatggatctcaaacctggcaatatattgttggatgataacttaatgcccaaaattgccgattttggtttatcaaggctctttggcgaagagcaaacacgtgcactcacttcaaatgttgtgggatcaagagggtacatggctccagaatattactacagaggtgaagtctcaaccaaatcagatatatacagtctgggcatccttataatcgagatagtaacagggttaaaagtcgattctaacactgtagacttatcgtctaagaaccttatcgacaatgtacaaaggatttggacaaaaatgccgcagatagcttctaagtacccgacgttggaagcaagcaacctccaacaagttaaaagatgcattgatgctgggttaaattgtgtgagcgaaaaaccaagagaaaggccatccgcaggggaaattatcaagcagcttaacggaagcagctttccatctcgcaactagatgcttagggcctttggtctttttctagtttctgaccactaaaagctgatgcggaccgtcaatcgccttggcttttcaatcaccttttatgagaatcgtttcagtaaaaaccatctaaaattaacataaacacataaccgattaagtcgtcacaatagtaggaatatgtcactttctagattatgaactctttggaccacttcattttcttccatacgtgatctctacgatacttagattctcttcacaaccagattctttctgcagccagattctcaaaaaagctggtcagaaaaaaatgaaccaaataggccttagatcttgatctaaatcaaattcttagggcaaattttgtaaccctatttttctaatagatttctattttactaaggcttcgtttgtttcgttggaattgaattccattctaatgatcataatttagacacaaactaattgaattaaaatatttgtatatgtaatatatttgtatagtatcttaaatcatatgagagatagttatatacta

SEQ ID NO: 214863 - DNA, 1172 bp, Zea Mays
aggtagcgccgccggcccgcgcgccatattcaacgcgacggacatgctggagcggagccgggacggcaggatcgtctttgccggggactcgatcgggcgcaaccagtgggagtccatggtgtgcatgctcgccgccgccgtgccggccgcgtcgtcgtccagggtgtacgagcggtccgggaagccgatcagccggcacaagggctacctcgccatggttttcgccgactacaacctctccgtcgagtactaccgcgcgcccatgatcgtgatggtccaccgcttcccggcggcaaacaacgcgacggcaggcagcgtgagggggggcgtccgccttgacgcgctgccacggcacgccgaccggtgggccgccgccgacgtgctcgtgctcaactccggccactggtggaaccagcacaaaaccgtcaaggcaggaaactatttcatggtcggcgaccgcttgaacaaaaccatggacatcaaggaagcttttcaacggtccctgcagacggtgaaagattgggaattgagtagtgctcagctttcggaaagctatttcttcttcaggagtttttctccctcgcattacagcaacggcacctggaacactggcggttcgtgcgccggccagcgagagccaccgaccacaaacaatggccgctccgaggaagagtactcatggatgaacgcgatgattgcgaagatgacggaggatatcaagagccacgggaggaaggcgaggtttctgaacatcactcacatgacggagctcaggcctgatggccacccggcagggcacagggagcccggaacgccgccggacgcgccggaggactgcagccactggtgcctccccggcgtgccggacgtttggaatcagatcctctacgcacacctcttgtccgcagggtatggcacgcgcaggaaccagagataactatttgtacgtattggtacgtgtatatgtagattattgcgccgtcttagcgtgctgtcgtataaattaattaaagctagctaaagtaggttcctttgtacagtactgcagttatattgcttagttttacaatgacttagaacgtatctttcactatcgctagtgataagattttagaaattttgtatttaatttagtcccgaaatataatattatagctgtgagttgtgacgat

SEQ ID NO: 214864 - DNA, 1155 bp, Zea Mays
gttcgtttcgttggcccgtgccggcgtgccctccggtcctcttctcgttctcccccgagcggctctcgatctggtttgctccgcgtcgtcgctccctggacgtcgccgccctagtggttcgcttcgccgcttctcgcgctctccggcttctacgctggtggtcggttgttcgagagcggctccggcgggcggcgtagatcggcggtccaggtggtgtattagacatgtctttcaggaagcgccaaccttccagtaacggagcttccattaatttagctcccctgggttttccaagtcaggaacttgagaaggttaatcctgtaaattcagtgatgtcaaccgattttgaatccatggatggtgttgatattgatatgagggaagtttactttctcattatgcattttttatctcatggtccattcaaacggacctttggagaattgtgcaatgaactcctagaacatcaactgctacctagaagataccatgcttggtattcacgtggtggtttccatagtggcgaagaaaatgatgatggcatatcactccctttggattatgtaaagctagctgagaggtacccccacattggtaaagaccacttggtgaagctattaaagcaactgatggctagttcttatcacccacacaacttgattggaagagtttctccaaatgctgctgatgtcccaacacttcttggctccaactccttttcacttcttccatctgacaggcaagataagggaactcccaggctgccaagttatcttcgttggcctcacattcagactgatcaagttcatggtctaagtttgagagagataggtggtttcactaagcattgtcgagctccctctgtacgtgcatcttgctatgccatcgcgaagccatccacccttgttgaaaagatgcaaatcataaagagattgagggggcatcaaaatgctgtgtattgtgctacctttgatcgcacagggcgttatgttattactggttctgatgaccgccttgttaaaatatgggcgatggaaacagcgttctgcctggctagctgccggggccatgaaggtgatattaccgatcttgcagtgagttccaataattctgtggtagcatcttcatctaatgatttcattattagagtgtggc

SEQ ID NO: 214865 - DNA, 8180 bp, Zea Mays
tcccacttccgtccgcagtccgctgcattgctcgcgtgtgttctgtctgtcactctcgcccagtcgccctcctcttgctctccgacgactggtgggccgccgctgccgccgccgccgccgccgccctacgccaggctatccatgatttttgcctacaaaaggtgattgaaaaggggggaggatggaaggggagggacaccacggagttgttttggcatgcagcatctgtgggttcctcttcgctgtccttagccctttcagcttttgggttttatgggctgtgaattggaggccatggaggttatacagttggatatatgcaaggaaatggccaacatatgttcaaggacctcaattgagcacactttgcagccttttgactctttgtgcatggcttgttgtcatttcccctatagcagttctgctcgtgtggggaagcgtccttattgctcttatggaaaggaatataattggtttagctgttataatggcgggtgttgctttgctcctgtcattctactctataatgctctggtggagaacacaatggcaaagctcccaggctgttgcttaccttctcctcctggcagtatgcctgctatgtgcctacgatttttgtgctatttatgtgacagctggtgctagtgcttccgagcttaattctccatcagggttcttcttcggggtgtctgtaatatcattggccatcaatatgctttttatatgtaaaatactgtttaatgtaagtggatttgatgttgatgaatatgtgcggaggtcatacaaatttgcctattctgactgtgttgaagtggctcctgtttcatgctctcctgagccaccggatcctagtgaattatacatgacaaaatccagcagggtcaagcatttagggcttctgtacattagctctctgcttgtgcttgttggttattccatcttgtacggtcttacgtcaaaagaagctcgttggttgggtgctttaacttcagttgcagttgttatccttgactggaatctgggcttatgttcatttagatttgagcttcttaaaagtaggatgatagtgttatttgtggctggaacatcaagggctttccttgtatcctttggagtgcattactggtaccttggccattgcatcagctatgcttttgtagcatctgtgcttttatctgctgctgtttcttcctggctttctatttcaaacccctcagttgcaaggatagacgctctaagaagtacggtaataaagctacgagagggatttcgaagaaaaggacaaaatagttcttcaaattcatcagaaggctgtggctctagtgtgaagcgtagtagcggtagtgttgaagctggtcaaaatggtaatgcaatggattctatgtacagaagcaactcacaaagcgatggtgtcaattggagcagtattccttttgatcgatcaaacagttgtcaagaaggccggagctccgacaagaacatagatagtgcacgtgcaagcttagctcatcggagtaattcatgcttatctgccgtccaagactctgaaaccgctgttgtttcagtagataggcatggagatcccattacttcacttgtttgttctagcagtggtttggaaagtcatggctgtgagcctagtggatcagccaccacctcaggtaatcaacagctattggatttgaacctggcagcgatatttcaggacagattaaatgatccaaggatttcatctatgctaaaaaagaatggtggacttggagatgtagaactggctaatcttcttcaggataaaggactagatccaaatttttcgtacatgctgaaagacaaagttatggatccacgtattttagctttgctacagaggagcagcttggatgcagatagagagcatcaagatgacgtagatgtcacagctactgattcagatagattggataccactattgcaaatcagatttctctgtcagaagaactaaggagaagtggtctagaaaaatggttgaacatttcaaggctaatattccatcatttagctggatctccaatacgtgcttttattgttttcacagtaatgtttataatagagactgctactgtggctatctatcggccagagaccatcaaggtgataaatgcaacacatgaacagtttgaatttggtttctcgatactgcttctgtcaccagttgtctgctccattatggcattcatttggtctctgcgtgctgaagaaatgttgatgacatccaagccccagaagtatggtttcattgcatggctactgagcacatgtgttggtttgtttctctctttcttaagcaaatcatctgttatattgggcctgtctctcacggtaccacttatggtggcttgcctctcatttgctgttcccatatggatacgcaatggttacagtttctggattcctggaagggagtttgcaaatcgtgaaaatgttagtcaagctccaggagagaaagagcgggctctctttgttatcaccattgctgttttcactgcatcaattattggccttggtgcaatagtgtcagcaaagcctttagacgctctaggctataaaggatgggatgctgataagaacagctcctattctccctatgcaacatcaatgtatcttggatgggcattgtcttcaacaattgctgtgattaccacagggttgatacctattgttgcttggtttgcaacataccggttttcaccttcatcagctatatgtgttggcctctttgcaactgttcttgtgtctttttgcggtgcatcctactggggagtggtaaattcacgagaggatggtgttcctctaaaggctgatttccttgcagcattacttcccttgctttgcattccagcatttttctcactgttcactgggctttacaaatggaaggatgatgattggaagatttctcgtggtgtttacctttttgttggcatgggaatgttgctgttgtttggtgcagttgcagctgttattgtcacaatcaggccctggactgttggagttgcttgcctcgtagccattctgttccttgtatttgttattggggtcatccactactggacatctaacaacttctatctaacgaggactcagatgttgcttgtttgttccattgcttttctcttagccttggctgccttcctgatgggtttatttcacggaaagccttttgttggagcatctataggttatttctcatttatatttcttctcactggaagggctttgactgtccttctatcaccgccaatcgtagtgtattcgccaagagtattgcctgtatacgtttatgatgctcatgcagactctgctaaaaatgttagctatgcctttcttattctgtatgggattgcattagcaactgaagtttggggtgttattgctagtctaataatgaatccaccatttgttggggctggcgtttctgctactactcttgtaattgctttcagttttgctgtttctcgaccatgcctgactcttaagatgatggaggatgcagttcattttctcagcaaggatacagttgtgcaagcgatgtcacggtctgctaataaaactagaaatgctatatctgggacttactcagcacctcagaggtccgcaagttctgctgctcttttggttggagatcctgctcttacattggacagggctgggaactttgtgcttcctagggctgatgttatgaaactgagagatcgtttgagaaatgaagaaattgctgcaggatctttcttatgtggagtaaaagattgtttactaatttgcccccagtccctgtcaaacatagattatcggaggaatatgtgtgcccatgcacgtattttggctttggaagaagcaattgatacagaatgggtgtatatgtgggacaaatttggtggttatttacttctgttgcttggattgactgccaaagctgaacaaatacaggatgaagttcgtctaagactctttttggatagcataggcctttccgatttgagtgccaaagaaattaagaaatggatgcctgaagatcggaggcaatttgagcttattcaagaaagctacataagggaaaaagaaatggaagaggaggctttgatgcaaagacgagaggaagaagggaagggaagagaaaggaggagggcattgctagagagagaggagcgaaaatggaaggagctcgaaatatcattgctttcttccattccaaatactggaagcagggatgctgcagctatggcagcagctgtcagagctgttggaggtgattctgccctggaagattcttttgcaagagatagggtctcttcaatagccaatcacatacgaaaggcacaattggctcggcgagcagaacagactggtattccaggcactatatgcatactcgatgatgaaccgaggagtactggtcgtcattgtggagaacttgacttgtgcctctgtcaaagtcaaaaggttactttgtctattgctgtcatggttcagcctgtatctggcccagtgtgtctttttggaagtgaattccaaaaggtttgttgggaaatcttagtggcaggatcagaacagggtatggaagctggacaagttggtcttcgattagtaactaagggtgaaaggatgactactgttgctaaagagtggaatattggtgcgtctagtattgcagatggcaggtggcatcttgtcactgtaactttagatgccgacctaggtgaagcaacttctttcattgatggagtttatgatggatatcagaatgggttgccgttgccaacagataacggtatttgggaacctggaactgatatttgggttggtgctaggccacccatggacttagatgcctttggtaggtcagatagcgaaggttctgactcaaagatgcagatcatggatgcttttctatggggaagatgtctcagtgaagatgaggttactgttttacatactgccatgtctcctgctgagtatggattttttgaccttgcacccggcgatgcttggcatggaagttattctgcaagggtggatgactgggaaagcgaagaagcttatgagctttatgatcaaggggatgtcgaatgggatggacagtactcaagtggtaggaaacgtccggtacatgatgctgtagctattgaccttgactcctttgctaggagaccaagaaaaccaaggtttgagacacgtgatgaagtcaaccagcgtatgctttctgttgaaagggctgtcagggatgctcttatcgcgaaaggagagagaaacttcactgatcaagagttccctccagaggatcgttctttatttgtagatccgatgaatccacctctgaaactgcaggttgtttctgagtggatgaggccttctgacatagcaaaggatatatctatcagttgtcagccttgcttgttttcgggttctgtgaattcctcagatgtgtgtcagggtcggttgggagactgttggttcctaagtgcagtcgcagttttaactgagatgtctcggatatcagaagttataatcactcccgagtacaatgatgaagggatttatacagtcagattctgtattcagggtgagtgggtggccgtggttgttgatgattggattccttgcgagtctccggggaaaccagcatttgctactagtagaaagcaaaacgagctttgggtatccattcttgagaaggcttatgcaaaacttcatggctcttatgaggcattggaaggtgggcttgttcaagatgctctagtcgatctcacaggaggagctggtgaagagattgatatgcgaagtcctcaagcccaacttgatcttgctagtggaagattgtggtcgcagttgttgcatttcaaacaagaaggttttcttcttggtgctggaagtccttctggatctgatgctcacatctcatcaagtggcattgttcagggacatgcgtactcaattttgcaggtaagagaagttgatggccacaaactcatccaaatcagaaatccatgggcaaatgaagttgaatggaatggaccatggtcagactcgtcaccagagtggacggaacggatgaagcataagctcatgcatgttccacagtcgaagaatggggtattctggatgtcttggcaagattttcagattcactttcggtcaatatatgtttgtcgtgtttatccacctgagatgcgttactctgtccatgggcaatggcgtggctacaatgcaggtggttgccaagattatgactcgtggcaccaaaatccacagtatcgacttagagtaacaggacgtgatgcactataccctgttcacgtttttattacccttactcagggtgttggtttctctagaaagacgaatggttttcggaactaccaatctagccatgattcttcaatgttttacattggaatgaggatactcaagacacagggctgccgtgctgcttacaatatctacatgcatgaaagcgctggtggaacagattacgttaactcgagggagatatcatgcgaactggtcttggatccttatcccaaagggtacacaattgtgccaactaccatccaccctggggaggaagcaccttttgttttgtcagttttttcaaaagcatcaatcagactagaggctgtttagttcaagattgagatcccatgtgtttgatggtagctgcgtctgctgggcacccgtgcacgcaggatccagctgtgggttctcgggaactagataatgggtataggaattgcctcctggacaacttcaatcaatcttgctgcatgcaagtacctaagttcggttgcttgttgcagatctgacaaacggcaatgcttcttgtgctgaagggaaaggagagaaggcatgatccatggttctttggtagctgcgcaaagtgcagggtgagaggcttggttcaatgtttgtagatagccgtggtaactgacctggtagcccatcctatgtataggtgtcccgtttaccctgtaaatgctatagagttaggttaggtagcctgtcgttcctgttaacgcatagggctcttatgcagctgtgaaatgtcttgttagcaagctgcagttttgctgatttgagcgtggagtagtcggccatagctgttcccattggtttgccatgttagtgccacgtcatatcgacaacgcagcctgccgatcatatatcatcttccttagatgtcagtgtatcctgcccgattgctgctgcggcagcagccccgggatgaatggcacgccgagctgtgggagccagtgctggccctggatgaagctctcgacggtgtacttctgcagcgcgtgctggtaggtgatgttcttgatacccctccacttgacgcgtctggtcatgttggcgccgggcccgtggttttccacctcggcgtagtagcaggtgctgaggccgaagtcgccgagccacggcagccagccctgcgggtcgatgaacccgccgatctccgactggatgtagagcgtgcgcgagtgctccttccacgggcggcccaggaaggtcctgaaccggccgacgctcttctcgaactccgggtgcggcgcgacggtgcagttgtggatgacggtgccgcccaccgaccgcctctccttgcggccctgcgccgtgacgatgttctgctggttgtccatgcacttgcgcacctggatgaggcagttctggaacaccacctgcgcgttgccgaagatgaagtcgatggtgcccgtgatgacgcagtcgcggtagtactggcggctcgtgtgcgtgtacagcgtgtcctggtacccgtcgaaccggcactcgtagaacgccgacatgtcgctctgcacccgcagcgccaccgcctggtggttcttggctcccgccgtgttcttcacgccgatcccgcgcatcaggaacccgttcccgatcgcctccatcgtggccgtgtccttggtggtgatgttcatcatgaagctcttgtggcccgtgatcaccgtcttggtggcgccgtcgccgaccatcaccaggttcgtcacgttccgggccacggacacgtactccctgtacttgccggccttcacgtacatgacgtacgtggtggcgctcttcagcggcaccttggccagcgccgcgttgatggtcctgaagtcgccgctgccgtccttggccaccgtca

SEQ ID NO: 214866 - DNA, 6178 bp, Zea Mays
cgcgtgtgttctgtctgtcactctcgcccagtcgccctcctcttgctctccgacgactggtgggccgccgctgccgccgccgccgccgccgccctacgccaggtgctgaggctttcatcggtctcttcgccggtgtctttgccggcgtcgagcacccgccaggctatccatgatttttgcctacaaaaggtgattgaaaaggggggaggatggaaggggagggacaccacggagttgttttggcatgcagcatctgtgggttcctcttcgctgtccttagccctttcagcttttgggttttatgggctgtgaattggaggccatggaggttatacagttggatatatgcaaggaaatggccaacatatgttcaaggacctcaattgagcacactttgcagccttttgactctttgtgcatggcttgttgtcatttcccctatagcagttctgctcgtgtggggaagcgtccttattgctcttatggaaaggaatataattggtttagctgttataatggcgggtgttgctttgctcctgtcattctactctataatgctctggtggagaacacaatggcaaagctcccaggctgttgcttaccttctcctcctggcagtatgcctgctatgtgcctacgatttttgtgctatttatgtgacagctggtgctagtgcttccgagcttaattctccatcagggttcttcttcggggtgtctgtaatatcattggccatcaatatgctttttatatgtaaaatactgtttaatgtaagtggatttgatgttgatgaatatgtgcggaggtcatacaaatttgcctattctgactgtgttgaagtggctcctgtttcatgctctcctgagccaccggatcctagtgaattatacatgacaaaatccagcagggtcaagcatttagggcttctgtacattagctctctgcttgtgcttgttggttattccatcttgtacggtcttacgtcaaaagaagctcgttggttgggtgctttaacttcagttgcagttgttatccttgactggaatctgggcttatgttcatttagatttgagcttcttaaaagtaggatgatagtgttatttgtggctggaacatcaagggctttccttgtatcctttggagtgcattactggtaccttggccattgcatcagctatgcttttgtagcatctgtgcttttatctgctgctgtttcttcctggctttctatttcaaacccctcagttgcaaggatagacgctctaagaagtacggtaataaagctacgagagggatttcgaagaaaaggacaaaatagttcttcaaattcatcagaaggctgtggctctagtgtgaagcgtagtagcggtagtgttgaagctggtcaaaatggtaatgcaatggattctatgtacagaagcaactcacaaagcgatggtgtcaattggagcagtattccttttgatcgatcaaacagttgtcaagaaggccggagctccgacaagaacatagatagtgcacgtgcaagcttagctcatcggagtaattcatgcttatctgccgtccaagactctgaaaccgctgttgtttcagtagataggcatggagatcccattacttcacttgtttgttctagcagtggtttggaaagtcatggctgtgagcctagtggatcagccaccacctcaggtaatcaacagctattggatttgaacctggcagcgatatttcaggacagattaaatgatccaaggatttcatctatgctaaaaaagaatggtggacttggagatgtagaactggctaatcttcttcaggataaaggactagatccaaatttttcgtacatgctgaaagacaaagttatggatccacgtattttagctttgctacagaggagcagcttggatgcagatagagagcatcaagatgacgtagatgtcacagctactgattcagatagattggataccactattgcaaatcagatttctctgtcagaagaactaaggagaagtggtctagaaaaatggttgaacatttcaaggctaatattccatcatttagctggatctccaatacgtgcttttattgttttcacagtaatgtttataatagagactgctactgtggctatctatcggccagagaccatcaaggtgataaatgcaacacatgaacagtttgaatttggtttctcgatactgcttctgtcaccagttgtctgctccattatggcattcatttggtctctgcgtgctgaagaaatgttgatgacatccaagccccagaagtatggtttcattgcatggctactgagcacatgtgttggtttgtttctctctttcttaagcaaatcatctgttatattgggcctgtctctcacggtaccacttatggtggcttgcctctcatttgctgttcccatatggatacgcaatggttacagtttctggattcctggaagggagtttgcaaatcgtgaaaatgttagtcaagctccaggagagaaagagcgggctctctttgttatcaccattgctgttttcactgcatcaattattggccttggtgcaatagtgtcagcaaagcctttagacgctctaggctataaaggatgggatgctgataagaacagctcctattctccctatgcaacatcaatgtatcttggatgggcattgtcttcaacaattgctgtgattaccacagggttgatacctattgttgcttggtttgcaacataccggttttcaccttcatcagctatatgtgttggcctctttgcaactgttcttgtgtctttttgcggtgcatcctactggggagtggtaaattcacgagaggatggtgttcctctaaaggctgatttccttgcagcattacttcccttgctttgcattccagcatttttctcactgttcactgggctttacaaatggaaggatgatgattggaagatttctcgtggtgtttacctttttgttggcatgggaatgttgctgttgtttggtgcagttgcagctgttattgtcacaatcaggccctggactgttggagttgcttgcctcgtagccattctgttccttgtatttgttattggggtcatccactactggacatctaacaacttctatctaacgaggactcagatgttgcttgtttgttccattgcttttctcttagccttggctgccttcctgatgggtttatttcacggaaagccttttgttggagcatctataggttatttctcatttatatttcttctcactggaagggctttgactgtccttctatcaccgccaatcgtagtgtattcgccaagagtattgcctgtatacgtttatgatgctcatgcagactctgctaaaaatgttagctatgcctttcttattctgtatgggattgcattagcaactgaagtttggggtgttattgctagtctaataatgaatccaccatttgttggggctggcgtttctgctactactcttgtaattgctttcagttttgctgtttctcgaccatgcctgactcttaagatgatggaggatgcagttcattttctcagcaaggatacagttgtgcaagcgatgtcacggtctgctaataaaactagaaatgctatatctgggacttactcagcacctcagaggatctttcttatgtggagtaaaagattgtttactaatttgcccccagtccctgtcaaacatagattatcggaggaatatgtgtgcccatgcacgtattttggctttggaagaagcaattgatacagaatgggtgtatatgtgggacaaatttggtggttatttacttctgttgcttggattgactgccaaagctgaacaaatacaggatgaagttcgtctaagactctttttggatagcataggcctttccgatttgagtgccaaagaaattaagaaatggatgcctgaagatcggaggcaatttgagcttattcaagaaagctacataagggaaaaagaaatggaagaggaggctttgatgcaaagacgagaggaagaagggaagggaagagaaaggaggagggcattgctagagagagaggagcgaaaatggaaggagctcgaaatatcattgctttcttccattccaaatactggaagcagggatgctgcagctatggcagcagctgtcagagctgttggaggtgattctgccctggaagattcttttgcaagagatagggtctcttcaatagccaatcacatacgaaaggcacaattggctcggcgagcagaacagactggtattccaggcactatatgcatactcgatgatgaaccgaggagtactggtcgtcattgtggagaacttgacttgtgcctctgtcaaagtcaaaaggttactttgtctattgctgtcatggttcagcctgtatctggcccagtgtgtctttttggaagtgaattccaaaaggtttgttgggaaatcttagtggcaggatcagaacagggtatggaagctggacaagttggtcttcgattagtaactaagggtgaaaggatgactactgttgctaaagagtggaatattggtgcgtctagtattgcagatggcaggtggcatcttgtcactgtaactttagatgccgacctaggtgaagcaacttctttcattgatggagtttatgatggatatcagaatgggttgccgttgccaacagataacggtatttgggaacctggaactgatatttgggttggtgctaggccacccatggacttagatgcctttggtaggtcagatagcgaaggttctgactcaaagatgcagatcatggatgcttttctatggggaagatgtctcagtgaagatgaggttactgttttacatactgccatgtctcctgctgagtatggattttttgaccttgcacccggcgatgcttggcatggaagttattctgcaagggtggatgactgggaaagcgaagaagcttatgagctttatgatcaaggggatgtcgaatgggatggacagtactcaagtggtaggaaacgtccggtacatgatgctgtagctattgaccttgactcctttgctaggagaccaagaaaaccaaggtttgagacacgtgatgaagtcaaccagcgtatgctttctgttgaaagggctgtcagggatgctcttatcgcgaaaggagagagaaacttcactgatcaagagttccctccagaggatcgttctttatttgtagatccgatgaatccacctctgaaactgcaggttgtttctgagtggatgaggccttctgacatagcaaaggatatatctatcagttgtcagccttgcttgttttcgggttctgtgaattcctcagatgtgtgtcagggtcggttgggagactgttggttcctaagtgcagtcgcagttttaactgagatgtctcggatatcagaagttataatcactcccgagtacaatgatgaagggatttatacagtcagattctgtattcaggtacccaatattccaatgtttaaaccatttgactgataagtatctgctcaacttgaattgctccttttctattaatatactagccttgtgtcatctggtcagtatgttatctaggaaggttcagttgattcattttgcaaagtttataatacagttatcttaaaatgttagaccaaaaaatcacggtgaagtttaccatttgacaatcatatgtccagtttaatattagagttctatttctgaagcaaatgtgtacatcatgctacatgcatcgataacatatttaactgtgtcaggaaaaataaattattttattagttttttttgaagggaaaaccgtaggaaattccctacagtgaaatatattgaattaaattaggaaaaataaggacgaccgctgtacaaaaccgaaaaataggaaaaaggaaaggggggaaaggcaaagaacatcccaaattacaactccaataactagcaagatataagggataattattttattaatagttcattggtctgcaatatttactggagccatgctggagtcatcttggatgtgcactgctctatggagatatatactgcatgattggttggttgggccccgcgccgaggtcccgtgcatgcgttgactgcgcttggccgtgtgcttgattggctgcacggcagcgaccgagcctgt

SEQ ID NO: 214867 - DNA, 6275 bp, Zea Mays
gttctgtctgtcactctcgcccagtcgccctcctcttgctctccgacgactggtgggccgccgctgccgccgccgccgccgccgccctacgccaggtgctgaggctttcatcggtctcttcgccggtgtctttgccggcgtcgagcacccgccaggctatccatgatttttgcctacaaaaggtgattgaaaaggggggaggatggaaggggagggacaccacggagttgttttggcatgcagcatctgtgggttcctcttcgctgtccttagccctttcagcttttgggttttatgggctgtgaattggaggccatggaggttatacagttggatatatgcaaggaaatggccaacatatgttcaaggacctcaattgagcacactttgcagccttttgactctttgtgcatggcttgttgtcatttcccctatagcagttctgctcgtgtggggaagcgtccttattgctcttatggaaaggaatataattggtttagctgttataatggcgggtgttgctttgctcctgtcattctactctataatgctctggtggagaacacaatggcaaagctcccaggctgttgcttaccttctcctcctggcagtatgcctgctatgtgcctacgatttttgtgctatttatgtgacagctggtgctagtgcttccgagcttaattctccatcagggttcttcttcggggtgtctgtaatatcattggccatcaatatgctttttatatgtaaaatactgtttaatgtaagtggatttgatgttgatgaatatgtgcggaggtcatacaaatttgcctattctgactgtgttgaagtggctcctgtttcatgctctcctgagccaccggatcctagtgaattatacatgacaaaatccagcagggtcaagcatttagggcttctgtacattagctctctgcttgtgcttgttggttattccatcttgtacggtcttacgtcaaaagaagctcgttggttgggtgctttaacttcagttgcagttgttatccttgactggaatctgggcttatgttcatttagatttgagcttcttaaaagtaggatgatagtgttatttgtggctggaacatcaagggctttccttgtatcctttggagtgcattactggtaccttggccattgcatcagctatgcttttgtagcatctgtgcttttatctgctgctgtttcttcctggctttctatttcaaacccctcagttgcaaggatagacgctctaagaagtacggtaataaagctacgagagggatttcgaagaaaaggacaaaatagttcttcaaattcatcagaaggctgtggctctagtgtgaagcgtagtagcggtagtgttgaagctggtcaaaatggtaatgcaatggattctatgtacagaagcaactcacaaagcgatggtgtcaattggagcagtattccttttgatcgatcaaacagttgtcaagaaggccggagctccgacaagaacatagatagtgcacgtgcaagcttagctcatcggagtaattcatgcttatctgccgtccaagactctgaaaccgctgttgtttcagtagataggcatggagatcccattacttcacttgtttgttctagcagtggtttggaaagtcatggctgtgagcctagtggatcagccaccacctcaggtaatcaacagctattggatttgaacctggcagcgatatttcaggacagattaaatgatccaaggatttcatctatgctaaaaaagaatggtggacttggagatgtagaactggctaatcttcttcaggataaaggactagatccaaatttttcgtacatgctgaaagacaaagttatggatccacgtattttagctttgctacagaggagcagcttggatgcagatagagagcatcaagatgacgtagatgtcacagctactgattcagatagattggataccactattgcaaatcagatttctctgtcagaagaactaaggagaagtggtctagaaaaatggttgaacatttcaaggctaatattccatcatttagctggatctccaatacgtgcttttattgttttcacagtaatgtttataatagagactgctactgtggctatctatcggccagagaccatcaaggtgataaatgcaacacatgaacagtttgaatttggtttctcgatactgcttctgtcaccagttgtctgctccattatggcattcatttggtctctgcgtgctgaagaaatgttgatgacatccaagccccagaagtatggtttcattgcatggctactgagcacatgtgttggtttgtttctctctttcttaagcaaatcatctgttatattgggcctgtctctcacggtaccacttatggtggcttgcctctcatttgctgttcccatatggatacgcaatggttacagtttctggattcctggaagggagtttgcaaatcgtgaaaatcgggctctctttgttatcaccattgctgttttcactgcatcaattattggccttggtgcaatagtgtcagcaaagcctttagacgctctaggctataaaggatgggatgctgataagaacagctcctattctccctatgcaacatcaatgtatcttggatgggcattgtcttcaacaattgctgtgattaccacagggttgatacctattgttgcttggtttgcaacataccggttttcaccttcatcagctatatgtgttggcctctttgcaactgttcttgtgtctttttgcggtgcatcctactggggagtggtaaattcacgagaggatggtgttcctctaaaggctgatttccttgcagcattacttcccttgctttgcattccagcatttttctcactgttcactgggctttacaaatggaaggatgatgattggaagatttctcgtggtgtttacctttttgttggcatgggaatgttgctgttgtttggtgcagttgcagctgttattgtcacaatcaggccctggactgttggagttgcttgcctcgtagccattctgttccttgtatttgttattggggtcatccactactggacatctaacaacttctatctaacgaggactcagatgttgcttgtttgttccattgcttttctcttagccttggctgccttcctgatgggtttatttcacggaaagccttttgttggagcatctataggttatttctcatttatatttcttctcactggaagggctttgactgtccttctatcaccgccaatcgtagtgtattcgccaagagtattgcctgtatacgtttatgatgctcatgcagactctgctaaaaatgttagctatgcctttcttattctgtatgggattgcattagcaactgaagtttggggtgttattgctagtctaataatgaatccaccatttgttggggctggcgtttctgctactactcttgtaattgctttcagttttgctgtttctcgaccatgcctgactcttaagatgatggaggatgcagttcattttctcagcaaggatacagttgtgcaagcgatgtcacggtctgctaataaaactagaaatgctatatctgggacttactcagcacctcagaggtccgcaagttctgctgctcttttggttggagatcctgctcttacattggacagggctgggaactttgtgcttcctagggctgatgttatgaaactgagagatcgtttgagaaatgaagaaattgctgcaggatctttcttatgtggagtaaaagattgtttactaatttgcccccagtccctgtcaaacatagattatcggaggaatatgtgtgcccatgcacgtattttggctttggaagaagcaattgatacagaatgggtgtatatgtgggacaaatttggtggttatttacttctgttgcttggattgactgccaaagctgaacaaatacaggatgaagttcgtctaagactctttttggatagcataggcctttccgatttgagtgccaaagaaattaagaaatggatgcctgaagatcggaggcaatttgagcttattcaagaaagctacataagggaaaaagaaatggaagaggaggctttgatgcaaagacgagaggaagaagggaagggaagagaaaggaggagggcattgctagagagagaggagcgaaaatggaaggagctcgaaatatcattgctttcttccattccaaatactggaagcagggatgctgcagctatggcagcagctgtcagagctgttggaggtgattctgccctggaagattcttttgcaagagatagggtctcttcaatagccaatcacatacgaaaggcacaattggctcggcgagcagaacagactggtattccaggcactatatgcatactcgatgatgaaccgaggagtactggtcgtcattgtggagaacttgacttgtgcctctgtcaaagtcaaaaggttactttgtctattgctgtcatggttcagcctgtatctggcccagtgtgtctttttggaagtgaattccaaaaggtttgttgggaaatcttagtggcaggatcagaacagggtatggaagctggacaagttggtcttcgattagtaactaagggtgaaaggatgactactgttgctaaagagtggaatattggtgcgtctagtattgcagatggcaggtggcatcttgtcactgtaactttagatgccgacctaggtgaagcaacttctttcattgatggagtttatgatggatatcagaatgggttgccgttgccaacagataacggtatttgggaacctggaactgatatttgggttggtgctaggccacccatggacttagatgcctttggtaggtcagatagcgaaggttctgactcaaagatgcagatcatggatgcttttctatggggaagatgtctcagtgaagatgaggttactgttttacatactgccatgtctcctgctgagtatggattttttgaccttgcacccggcgatgcttggcatggaagttattctgcaagggtggatgactgggaaagcgaagaagcttatgagctttatgatcaaggggatgtcgaatgggatggacagtactcaagtggtaggaaacgtccggtacatgatgctgtagctattgaccttgactcctttgctaggagaccaagaaaaccaaggtttgagacacgtgatgaagtcaaccagcgtatgctttctgttgaaagggctgtcagggatgctcttatcgcgaaaggagagagaaacttcactgatcaagagttccctccagaggatcgttctttatttgtagatccgatgaatccacctctgaaactgcaggttgtttctgagtggatgaggccttctgacatagcaaaggatatatctatcagttgtcagccttgcttgttttcgggttctgtgaattcctcagatgtgtgtcagggtcggttgggagactgttggttcctaagtgcagtcgcagttttaactgagatgtctcggatatcagaagttataatcactcccgagtacaatgatgaagggatttatacagtcagattctgtattcaggtacccaatattccaatgtttaaaccatttgactgataagtatctgctcaacttgaattgctccttttctattaatatactagccttgtgtcatctggtcagtatgttatctaggaaggttcagttgattcattttgcaaagtttataatacagttatcttaaaatgttagaccaaaaaatcacggtgaagtttaccatttgacaatcatatgtccagtttaatattagagttctatttctgaagcaaatgtgtacatcatgctacatgcatcgataacatatttaactgtgtcaggaaaaataaattattttattagttttttttgaagggaaaaccgtaggaaattccctacagtgaaatatattgaattaaattaggaaaaataaggacgaccgctgtacaaaaccgaaaaataggaaaaaggaaaggggggaaaggcaaagaacatcccaaattacaactccaataactagcaagatataagggataattattttattaatagttcattggtctgcaatatttactggagccatgctggagtcatcttggatgtgcactgctctatggagatatatactgcatgattggttggttgggccccgcgccgaggtcccgtgcatgcgttgactgcgcttggccgtgtgcttgattggctgcacggcagcgaccgagcctgt

SEQ ID NO: 214868 - DNA, 8201 bp, Zea Mays
gttctgtctgtcactctcgcccagtcgccctcctcttgctctccgacgactggtgggccgccgctgccgccgccgccgccgccgccctacgccaggtgctgaggctttcatcggtctcttcgccggtgtctttgccggcgtcgagcacccgccaggctatccatgatttttgcctacaaaaggtgattgaaaaggggggaggatggaaggggagggacaccacggagttgttttggcatgcagcatctgtgggttcctcttcgctgtccttagccctttcagcttttgggttttatgggctgtgaattggaggccatggaggttatacagttggatatatgcaaggaaatggccaacatatgttcaaggacctcaattgagcacactttgcagccttttgactctttgtgcatggcttgttgtcatttcccctatagcagttctgctcgtgtggggaagcgtccttattgctcttatggaaaggaatataattggtttagctgttataatggcgggtgttgctttgctcctgtcattctactctataatgctctggtggagaacacaatggcaaagctcccaggctgttgcttaccttctcctcctggcagtatgcctgctatgtgcctacgatttttgtgctatttatgtgacagctggtgctagtgcttccgagcttaattctccatcagggttcttcttcggggtgtctgtaatatcattggccatcaatatgctttttatatgtaaaatactgtttaatgtaagtggatttgatgttgatgaatatgtgcggaggtcatacaaatttgcctattctgactgtgttgaagtggctcctgtttcatgctctcctgagccaccggatcctagtgaattatacatgacaaaatccagcagggtcaagcatttagggcttctgtacattagctctctgcttgtgcttgttggttattccatcttgtacggtcttacgtcaaaagaagctcgttggttgggtgctttaacttcagttgcagttgttatccttgactggaatctgggcttatgttcatttagatttgagcttcttaaaagtaggatgatagtgttatttgtggctggaacatcaagggctttccttgtatcctttggagtgcattactggtaccttggccattgcatcagctatgcttttgtagcatctgtgcttttatctgctgctgtttcttcctggctttctatttcaaacccctcagttgcaaggatagacgctctaagaagtacggtaataaagctacgagagggatttcgaagaaaaggacaaaatagttcttcaaattcatcagaaggctgtggctctagtgtgaagcgtagtagcggtagtgttgaagctggtcaaaatggtaatgcaatggattctatgtacagaagcaactcacaaagcgatggtgtcaattggagcagtattccttttgatcgatcaaacagttgtcaagaaggccggagctccgacaagaacatagatagtgcacgtgcaagcttagctcatcggagtaattcatgcttatctgccgtccaagactctgaaaccgctgttgtttcagtagataggcatggagatcccattacttcacttgtttgttctagcagtggtttggaaagtcatggctgtgagcctagtggatcagccaccacctcaggtaatcaacagctattggatttgaacctggcagcgatatttcaggacagattaaatgatccaaggatttcatctatgctaaaaaagaatggtggacttggagatgtagaactggctaatcttcttcaggataaaggactagatccaaatttttcgtacatgctgaaagacaaagttatggatccacgtattttagctttgctacagaggagcagcttggatgcagatagagagcatcaagatgacgtagatgtcacagctactgattcagatagattggataccactattgcaaatcagatttctctgtcagaagaactaaggagaagtggtctagaaaaatggttgaacatttcaaggctaatattccatcatttagctggatctccaatacgtgcttttattgttttcacagtaatgtttataatagagactgctactgtggctatctatcggccagagaccatcaaggtgataaatgcaacacatgaacagtttgaatttggtttctcgatactgcttctgtcaccagttgtctgctccattatggcattcatttggtctctgcgtgctgaagaaatgttgatgacatccaagccccagaagtatggtttcattgcatggctactgagcacatgtgttggtttgtttctctctttcttaagcaaatcatctgttatattgggcctgtctctcacggtaccacttatggtggcttgcctctcatttgctgttcccatatggatacgcaatggttacagtttctggattcctggaagggagtttgcaaatcgtgaaaatgttagtcaagctccaggagagaaagagcgggctctctttgttatcaccattgctgttttcactgcatcaattattggccttggtgcaatagtgtcagcaaagcctttagacgctctaggctataaaggatgggatgctgataagaacagctcctattctccctatgcaacatcaatgtatcttggatgggcattgtcttcaacaattgctgtgattaccacagggttgatacctattgttgcttggtttgcaacataccggttttcaccttcatcagctatatgtgttggcctctttgcaactgttcttgtgtctttttgcggtgcatcctactggggagtggtaaattcacgagaggatggtgttcctctaaaggctgatttccttgcagcattacttcccttgctttgcattccagcatttttctcactgttcactgggctttacaaatggaaggatgatgattggaagatttctcgtggtgtttacctttttgttggcatgggaatgttgctgttgtttggtgcagttgcagctgttattgtcacaatcaggccctggactgttggagttgcttgcctcgtagccattctgttccttgtatttgttattggggtcatccactactggacatctaacaacttctatctaacgaggactcagatgttgcttgtttgttccattgcttttctcttagccttggctgccttcctgatgggtttatttcacggaaagccttttgttggagcatctataggttatttctcatttatatttcttctcactggaagggctttgactgtccttctatcaccgccaatcgtagtgtattcgccaagagtattgcctgtatacgtttatgatgctcatgcagactctgctaaaaatgttagctatgcctttcttattctgtatgggattgcattagcaactgaagtttggggtgttattgctagtctaataatgaatccaccatttgttggggctggcgtttctgctactactcttgtaattgctttcagttttgctgtttctcgaccatgcctgactcttaagatgatggaggatgcagttcattttctcagcaaggatacagttgtgcaagcgatgtcacggtctgctaataaaactagaaatgctatatctgggacttactcagcacctcagaggtccgcaagttctgctgctcttttggttggagatcctgctcttacattggacagggctgggaactttgtgcttcctagggctgatgttatgaaactgagagatcgtttgagaaatgaagaaattgctgcaggatctttcttatgtggagtaaaagattgtttactaatttgcccccagtccctgtcaaacatagattatcggaggaatatgtgtgcccatgcacgtattttggctttggaagaagcaattgatacagaatgggtgtatatgtgggacaaatttggtggttatttacttctgttgcttggattgactgccaaagctgaacaaatacaggatgaagttcgtctaagactctttttggatagcataggcctttccgatttgagtgccaaagaaattaagaaatggatgcctgaagatcggaggcaatttgagcttattcaagaaagctacataagggaaaaagaaatggaagaggaggctttgatgcaaagacgagaggaagaagggaagggaagagaaaggaggagggcattgctagagagagaggagcgaaaatggaaggagctcgaaatatcattgctttcttccattccaaatactggaagcagggatgctgcagctatggcagcagctgtcagagctgttggaggtgattctgccctggaagattcttttgcaagagatagggtctcttcaatagccaatcacatacgaaaggcacaattggctcggcgagcagaacagactggtattccaggcactatatgcatactcgatgatgaaccgaggagtactggtcgtcattgtggagaacttgacttgtgcctctgtcaaagtcaaaaggttactttgtctattgctgtcatggttcagcctgtatctggcccagtgtgtctttttggaagtgaattccaaaaggtttgttgggaaatcttagtggcaggatcagaacagggtatggaagctggacaagttggtcttcgattagtaactaagggtgaaaggatgactactgttgctaaagagtggaatattggtgcgtctagtattgcagatggcaggtggcatcttgtcactgtaactttagatgccgacctaggtgaagcaacttctttcattgatggagtttatgatggatatcagaatgggttgccgttgccaacagataacggtatttgggaacctggaactgatatttgggttggtgctaggccacccatggacttagatgcctttggtaggtcagatagcgaaggttctgactcaaagatgcagatcatggatgcttttctatggggaagatgtctcagtgaagatgaggttactgttttacatactgccatgtctcctgctgagtatggattttttgaccttgcacccggcgatgcttggcatggaagttattctgcaagggtggatgactgggaaagcgaagaagcttatgagctttatgatcaaggggatgtcgaatgggatggacagtactcaagtggtaggaaacgtccggtacatgatgctgtagctattgaccttgactcctttgctaggagaccaagaaaaccaaggtttgagacacgtgatgaagtcaaccagcgtatgctttctgttgaaagggctgtcagggatgctcttatcgcgaaaggagagagaaacttcactgatcaagagttccctccagaggatcgttctttatttgtagatccgatgaatccacctctgaaactgcaggttgtttctgagtggatgaggccttctgacatagcaaaggatatatctatcagttgtcagccttgcttgttttcgggttctgtgaattcctcagatgtgtgtcagggtcggttgggagactgttggttcctaagtgcagtcgcagttttaactgagatgtctcggatatcagaagttataatcactcccgagtacaatgatgaagggatttatacagtcagattctgtattcagggtgagtgggtggccgtggttgttgatgattggattccttgcgagtctccggggaaaccagcatttgctactagtagaaagcaaaacgagctttgggtatccattcttgagaaggcttatgcaaaacttcatggctcttatgaggcattggaaggtgggcttgttcaagatgctctagtcgatctcacaggaggagctggtgaagagattgatatgcgaagtcctcaagcccaacttgatcttgctagtggaagattgtggtcgcagttgttgcatttcaaacaagaaggttttcttcttggtgctggaagtccttctggatctgatgctcacatctcatcaagtggcattgttcagggacatgcgtactcaattttgcaggtaagagaagttgatggccacaaactcatccaaatcagaaatccatgggcaaatgaagttgaatggaatggaccatggtcagactcgtcaccagagtggacggaacggatgaagcataagctcatgcatgttccacagtcgaagaatggggtattctggatgtcttggcaagattttcagattcactttcggtcaatatatgtttgtcgtgtttatccacctgagatgcgttactctgtccatgggcaatggcgtggctacaatgcaggtggttgccaagattatgactcgtggcaccaaaatccacagtatcgacttagagtaacaggacgtgatgcactataccctgttcacgtttttattacccttactcagggtgttggtttctctagaaagacgaatggttttcggaactaccaatctagccatgattcttcaatgttttacattggaatgaggatactcaagacacagggctgccgtgctgcttacaatatctacatgcatgaaagcgctggtggaacagattacgttaactcgagggagatatcatgcgaactggtcttggatccttatcccaaagggtacacaattgtgccaactaccatccaccctggggaggaagcaccttttgttttgtcagttttttcaaaagcatcaatcagactagaggctgtttagttcaagattgagatcccatgtgtttgatggtagctgcgtctgctgggcacccgtgcacgcaggatccagctgtgggttctcgggaactagataatgggtataggaattgcctcctggacaacttcaatcaatcttgctgcatgcaagtacctaagttcggttgcttgttgcagatctgacaaacggcaatgcttcttgtgctgaagggaaaggagagaaggcatgatccatggttctttggtagctgcgcaaagtgcagggtgagaggcttggttcaatgtttgtagatagccgtggtaactgacctggtagcccatcctatgtataggtgtcccgtttaccctgtaaatgctatagagttaggttaggtagcctgtcgttcctgttaacgcatagggctcttatgcagctgtgaaatgtcttgttagcaagctgcagttttgctgatttgagcgtggagtagtcggccatagctgttcccattggtttgccatgttagtgccacgtcatatcgacaacgcagcctgccgatcatatatcatcttccttagatgtcagtgtatcctgcccgattgctgctgcggcagcagccccgggatgaatggcacgccgagctgtgggagccagtgctggccctggatgaagctctcgacggtgtacttctgcagcgcgtgctggtaggtgatgttcttgatacccctccacttgacgcgtctggtcatgttggcgccgggcccgtggttttccacctcggcgtagtagcaggtgctgaggccgaagtcgccgagccacggcagccagccctgcgggtcgatgaacccgccgatctccgactggatgtagagcgtgcgcgagtgctccttccacgggcggcccaggaaggtcctgaaccggccgacgctcttctcgaactccgggtgcggcgcgacggtgcagttgtggatgacggtgccgcccaccgaccgcctctccttgcggccctgcgccgtgacgatgttctgctggttgtccatgcacttgcgcacctggatgaggcagttctggaacaccacctgcgcgttgccgaagatgaagtcgatggtgcccgtgatgacgcagtcgcggtagtactggcggctcgtgtgcgtgtacagcgtgtcctggtacccgtcgaaccggcactcgtagaacgccgacatgtcgctctgcacccgcagcgccaccgcctggtggttcttggctcccgccgtgttcttcacgccgatcccgcgcatcaggaacccgttcccgatcgcctccatcgtggccgtgtccttggtggtgatgttcatcatgaagctcttgtggcccgtgatcaccgtcttggtggcgccgtcgccgaccatcaccaggttcgtcacgttccgggccacggacacgtactccctgtacttgccggccttcacgtacatgacgtacgtggtggcgctcttcagcggcaccttggccagcgccgcgttgatggtcctgaagtcgccgctgccgtccttggccaccgtca

SEQ ID NO: 214869 - DNA, 8032 bp, Zea Mays
gttctgtctgtcactctcgcccagtcgccctcctcttgctctccgacgactggtgggccgccgctgccgccgccgccgccgccgccctacgccaggtgctgaggctttcatcggtctcttcgccggtgtctttgccggcgtcgagcacccgccaggctatccatgatttttgcctacaaaaggtgattgaaaaggggggaggatggaaggggagggacaccacggagttgttttggcatgcagcatctgtgggttcctcttcgctgtccttagccctttcagcttttgggttttatgggctgtgaattggaggccatggaggttatacagttggatatatgcaaggaaatggccaacatatgttcaaggacctcaattgagcacactttgcagccttttgactctttgtgcatggcttgttgtcatttcccctatagcagttctgctcgtgtggggaagcgtccttattgctcttatggaaaggaatataattggtttagctgttataatggcgggtgttgctttgctcctgtcattctactctataatgctctggtggagaacacaatggcaaagctcccaggctgttgcttaccttctcctcctggcagtatgcctgctatgtgcctacgatttttgtgctatttatgtgacagctggtgctagtgcttccgagcttaattctccatcagggttcttcttcggggtgtctgtaatatcattggccatcaatatgctttttatatgtaaaatactgtttaatgtaagtggatttgatgttgatgaatatgtgcggaggtcatacaaatttgcctattctgactgtgttgaagtggctcctgtttcatgctctcctgagccaccggatcctagtgaattatacatgacaaaatccagcagggtcaagcatttagggcttctgtacattagctctctgcttgtgcttgttggttattccatcttgtacggtcttacgtcaaaagaagctcgttggttgggtgctttaacttcagttgcagttgttatccttgactggaatctgggcttatgttcatttagatttgagcttcttaaaagtaggatgatagtgttatttgtggctggaacatcaagggctttccttgtatcctttggagtgcattactggtaccttggccattgcatcagctatgcttttgtagcatctgtgcttttatctgctgctgtttcttcctggctttctatttcaaacccctcagttgcaaggatagacgctctaagaagtacggtaataaagctacgagagggatttcgaagaaaaggacaaaatagttcttcaaattcatcagaaggctgtggctctagtgtgaagcgtagtagcggtagtgttgaagctggtcaaaatggtaatgcaatggattctatgtacagaagcaactcacaaagcgatggtgtcaattggagcagtattccttttgatcgatcaaacagttgtcaagaaggccggagctccgacaagaacatagatagtgcacgtgcaagcttagctcatcggagtaattcatgcttatctgccgtccaagactctgaaaccgctgttgtttcagtagataggcatggagatcccattacttcacttgtttgttctagcagtggtttggaaagtcatggctgtgagcctagtggatcagccaccacctcaggtaatcaacagctattggatttgaacctggcagcgatatttcaggacagattaaatgatccaaggatttcatctatgctaaaaaagaatggtggacttggagatgtagaactggctaatcttcttcaggataaaggactagatccaaatttttcgtacatgctgaaagacaaagttatggatccacgtattttagctttgctacagaggagcagcttggatgcagatagagagcatcaagatgacgtagatgtcacagctactgattcagatagattggataccactattgcaaatcagatttctctgtcagaagaactaaggagaagtggtctagaaaaatggttgaacatttcaaggctaatattccatcatttagctggatctccaatacgtgcttttattgttttcacagtaatgtttataatagagactgctactgtggctatctatcggccagagaccatcaaggtgataaatgcaacacatgaacagtttgaatttggtttctcgatactgcttctgtcaccagttgtctgctccattatggcattcatttggtctctgcgtgctgaagaaatgttgatgacatccaagccccagaagtatggtttcattgcatggctactgagcacatgtgttggtttgtttctctctttcttaagcaaatcatctgttatattgggcctgtctctcacggtaccacttatggtggcttgcctctcatttgctgttcccatatggatacgcaatggttacagtttctggattcctggaagggagtttgcaaatcgtgaaaatgttagtcaagctccaggagagaaagagcgggctctctttgttatcaccattgctgttttcactgcatcaattattggccttggtgcaatagtgtcagcaaagcctttagacgctctaggctataaaggatgggatgctgataagaacagctcctattctccctatgcaacatcaatgtatcttggatgggcattgtcttcaacaattgctgtgattaccacagggttgatacctattgttgcttggtttgcaacataccggttttcaccttcatcagctatatgtgttggcctctttgcaactgttcttgtgtctttttgcggtgcatcctactggggagtggtaaattcacgagaggatggtgttcctctaaaggctgatttccttgcagcattacttcccttgctttgcattccagcatttttctcactgttcactgggctttacaaatggaaggatgatgattggaagatttctcgtggtgtttacctttttgttggcatgggaatgttgctgttgtttggtgcagttgcagctgttattgtcacaatcaggccctggactgttggagttgcttgcctcgtagccattctgttccttgtatttgttattggggtcatccactactggacatctaacaacttctatctaacgaggactcagatgttgcttgtttgttccattgcttttctcttagccttggctgccttcctgatgggtttatttcacggaaagccttttgttggagcatctataggttatttctcatttatatttcttctcactggaagggctttgactgtccttctatcaccgccaatcgtagtgtattcgccaagagtattgcctgtatacgtttatgatgctcatgcagactctgctaaaaatgttagctatgcctttcttattctgtatgggattgcattagcaactgaagtttggggtgttattgctagtctaataatgaatccaccatttgttggggctggcgtttctgctactactcttgtaattgctttcagttttgctgtttctcgaccatgcctgactcttaagatgatggaggatgcagttcattttctcagcaaggatacagttgtgcaagcgatgtcacggtctgctaataaaactagaaatgctatatctgggacttactcagcacctcagaggtccgcaagttctgctgctcttttggttggagatcctgctcttacattggacagggctgggaactttgtgcttcctagggctgatgttatgaaactgagagatcgtttgagaaatgaagaaattgctgcaggatctttcttatgtggagtaaaagattgtttactaatttgcccccagtccctgtcaaacatagattatcggaggaatatgtgtgcccatgcacgtattttggctttggaagaagcaattgatacagaatgggtgtatatgtgggacaaatttggtggttatttacttctgttgcttggattgactgccaaagctgaacaaatacaggatgaagttcgtctaagactctttttggatagcataggcctttccgatttgagtgccaaagaaattaagaaatggatgcctgaagatcggaggcaatttgagcttattcaagaaagctacataagggaaaaagaaatggaagaggaggctttgatgcaaagacgagaggaagaagggaagggaagagaaaggaggagggcattgctagagagagaggagcgaaaatggaaggagctcgaaatatcattgctttcttccattccaaatactggaagcagggatgctgcagctatggcagcagctgtcagagctgttggaggtgattctgccctggaagattcttttgcaagagatagggtctcttcaatagccaatcacatacgaaaggcacaattggctcggcgagcagaacagactggtattccaggcactatatgcatactcgatgatgaaccgaggagtactggtcgtcattgtggagaacttgacttgtgcctctgtcaaagtcaaaaggttactttgtctattgctgtcatggttcagcctgtatctggcccagtgtgtctttttggaagtgaattccaaaaggtttgttgggaaatcttagtggcaggatcagaacagggtatggaagctggacaagttggtcttcgattagtaactaagggtgaaaggatgactactgttgctaaagagtggaatattggtgcgtctagtattgcagatggcaggtggcatcttgtcactgtaactttagatgccgacctaggtgaagcaacttctttcattgatggagtttatgatggatatcagaatgggttgccgttgccaacagataacggtatttgggaacctggaactgatatttgggttggtgctaggccacccatggacttagatgcctttggtaggtcagatagcgaaggttctgactcaaagatgcagatcatggatgcttttctatggggaagatgtctcagtgaagatgaggttactgttttacatactgccatgtctcctgctgagtatggattttttgaccttgcacccggcgatgcttggcatggaagttattctgcaagggtggatgactgggaaagcgaagaagcttatgagctttatgatcaaggggatgtcgaatgggatggacagtactcaagtggtaggaaacgtccggtacatgatgctgtagctattgaccttgactcctttgctaggagaccaagaaaaccaaggtttgagacacgtgatgaagtcaaccagcgtatgctttctgttgaaagggctgtcagggatgctcttatcgcgaaaggagagagaaacttcactgatcaagagttccctccagaggatcgttctttatttgtagatccgatgaatccacctctgaaactgcaggttgtttctgagtggatgaggccttctgacatagcaaaggatatatctatcagttgtcagccttgcttgttttcgggttctgtgaattcctcagatgtgtgtcagggtcggttgggagactgttggttcctaagtgcagtcgcagttttaactgagatgtctcggatatcagaagttataatcactcccgagtacaatgatgaagggatttatacagtcagattctgtattcagggtgagtgggtggccgtggttgttgatgattggattccttgcgagtctccggggaaaccagcatttgctactagtagaaagcaaaacgagctttgggtatccattcttgagaaggcttatgcaaaacttcatggctcttatgaggcattggaaggtgggcttgttcaagatgctctagtcgatctcacaggaggagctggtgaagagattgatatgcgaagtcctcaagcccaacttgatcttgctagtggaagattgtggtcgcagttgttgcatttcaaacaagaaggtaagagaagttgatggccacaaactcatccaaatcagaaatccatgggcaaatgaagttgaatggaatggaccatggtcagactcgtcaccagagtggacggaacggatgaagcataagctcatgcatgttccacagtcgaagaatggggtattctggatgtcttggcaagattttcagattcactttcggtcaatatatgtttgtcgtgtttatccacctgagatgcgttactctgtccatgggcaatggcgtggctacaatgcaggtggttgccaagattatgactcgtggcaccaaaatccacagtatcgacttagagtaacaggacgtgatgcactataccctgttcacgtttttattacccttactcagggtgttggtttctctagaaagacgaatggttttcggaactaccaatctagccatgattcttcaatgttttacattggaatgaggatactcaagacacagggctgccgtgctgcttacaatatctacatgcatgaaagcgctggtggaacagattacgttaactcgagggagatatcatgcgaactggtcttggatccttatcccaaagggtacacaattgtgccaactaccatccaccctggggaggaagcaccttttgttttgtcagttttttcaaaagcatcaatcagactagaggctgtttagttcaagattgagatcccatgtgtttgatggtagctgcgtctgctgggcacccgtgcacgcaggatccagctgtgggttctcgggaactagataatgatctgacaaacggcaatgcttcttgtgctgaagggaaaggagagaaggcatgatccatggttctttggtagctgcgcaaagtgcagggtgagaggcttggttcaatgtttgtagatagccgtggtaactgacctggtagcccatcctatgtataggtgtcccgtttaccctgtaaatgctatagagttaggttaggtagcctgtcgttcctgttaacgcatagggctcttatgcagctgtgaaatgtcttgttagcaagctgcagttttgctgatttgagcgtggagtagtcggccatagctgttcccattggtttgccatgttagtgccacgtcatatcgacaacgcagcctgccgatcatatatcatcttccttagatgtcagtgtatcctgcccgattgctgctgcggcagcagccccgggatgaatggcacgccgagctgtgggagccagtgctggccctggatgaagctctcgacggtgtacttctgcagcgcgtgctggtaggtgatgttcttgatacccctccacttgacgcgtctggtcatgttggcgccgggcccgtggttttccacctcggcgtagtagcaggtgctgaggccgaagtcgccgagccacggcagccagccctgcgggtcgatgaacccgccgatctccgactggatgtagagcgtgcgcgagtgctccttccacgggcggcccaggaaggtcctgaaccggccgacgctcttctcgaactccgggtgcggcgcgacggtgcagttgtggatgacggtgccgcccaccgaccgcctctccttgcggccctgcgccgtgacgatgttctgctggttgtccatgcacttgcgcacctggatgaggcagttctggaacaccacctgcgcgttgccgaagatgaagtcgatggtgcccgtgatgacgcagtcgcggtagtactggcggctcgtgtgcgtgtacagcgtgtcctggtacccgtcgaaccggcactcgtagaacgccgacatgtcgctctgcacccgcagcgccaccgcctggtggttcttggctcccgccgtgttcttcacgccgatcccgcgcatcaggaacccgttcccgatcgcctccatcgtggccgtgtccttggtggtgatgttcatcatgaagctcttgtggcccgtgatcaccgtcttggtggcgccgtcgccgaccatcaccaggttcgtcacgttccgggccacggacacgtactccctgtacttgccggccttcacgtacatgacgtacgtggtggcgctcttcagcggcaccttggccagcgccgcgttgatggtcctgaagtcgccgctgccgtccttggccaccgtca

SEQ ID NO: 214870 - DNA, 6133 bp, Zea Mays
cttgcaggctatccatgatttttgcctacaaaaggtgattgaaaaggggggaggatggaaggggagggacaccacggagttgttttggcatgcagcatctgtgggttcctcttcgctgtccttagccctttcagcttttgggttttatgggctgtgaattggaggccatggaggttatacagttggatatatgcaaggaaatggccaacatatgttcaaggacctcaattgagcacactttgcagccttttgactctttgtgcatggcttgttgtcatttcccctatagcagttctgctcgtgtggggaagcgtccttattgctcttatggaaaggaatataattggtttagctgttataatggcgggtgttgctttgctcctgtcattctactctataatgctctggtggagaacacaatggcaaagctcccaggctgttgcttaccttctcctcctggcagtatgcctgctatgtgcctacgatttttgtgctatttatgtgacagctggtgctagtgcttccgagcttaattctccatcagggttcttcttcggggtgtctgtaatatcattggccatcaatatgctttttatatgtaaaatactgtttaatgtaagtggatttgatgttgatgaatatgtgcggaggtcatacaaatttgcctattctgactgtgttgaagtggctcctgtttcatgctctcctgagccaccggatcctagtgaattatacatgacaaaatccagcagggtcaagcatttagggcttctgtacattagctctctgcttgtgcttgttggttattccatcttgtacggtcttacgtcaaaagaagctcgttggttgggtgctttaacttcagttgcagttgttatccttgactggaatctgggcttatgttcatttagatttgagcttcttaaaagtaggatgatagtgttatttgtggctggaacatcaagggctttccttgtatcctttggagtgcattactgctatgcttttgtagcatctgtgcttttatctgctgctgtttcttcctggctttctatttcaaacccctcagttgcaaggatagacgctctaagaagtacggtaataaagctacgagagggatttcgaagaaaaggacaaaatagttcttcaaattcatcagaaggctgtggctctagtgtgaagcgtagtagcggtagtgttgaagctggtcaaaatggtaatgcaatggattctatgtacagaagcaactcacaaagcgatggtgtcaattggagcagtattccttttgatcgatcaaacagttgtcaagaaggccggagctccgacaagaacatagatagtgcacgtgcaagcttagctcatcggagtaattcatgcttatctgccgtccaagactctgaaaccgctgttgtttcagtagataggcatggagatcccattacttcacttgtttgttctagcagtggtttggaaagtcatggctgtgagcctagtggatcagccaccacctcaggtaatcaacagctattggatttgaacctggcagcgatatttcaggacagattaaatgatccaaggatttcatctatgctaaaaaagaatggtggacttggagatgtagaactggctaatcttcttcaggataaaggactagatccaaatttttcgtacatgctgaaagacaaagttatggatccacgtattttagctttgctacagaggagcagcttggatgcagatagagagcatcaagatgacgtagatgtcacagctactgattcagatagattggataccactattgcaaatcagatttctctgtcagaagaactaaggagaagtggtctagaaaaatggttgaacatttcaaggctaatattccatcatttagctggatctccaatacgtgcttttattgttttcacagtaatgtttataatagagactgctactgtggctatctatcggccagagaccatcaaggtgataaatgcaacacatgaacagtttgaatttggtttctcgatactgcttctgtcaccagttgtctgctccattatggcattcatttggtctctgcgtgctgaagaaatgttgatgacatccaagccccagaagtatggtttcattgcatggctactgagcacatgtgttggtttgtttctctctttcttaagcaaatcatctgttatattgggcctgtctctcacggtaccacttatggtggcttgcctctcatttgctgttcccatatggatacgcaatggttacagtttctggattcctggaagggagtttgcaaatcgtgaaaatgttagtcaagctccaggagagaaagagcgggctctctttgttatcaccattgctgttttcactgcatcaattattggccttggtgcaatagtgtcagcaaagcctttagacgctctaggctataaaggatgggatgctgataagaacagctcctattctccctatgcaacatcaatgtatcttggatgggcattgtcttcaacaattgctgtgattaccacagggttgatacctattgttgcttggtttgcaacataccggttttcaccttcatcagctatatgtgttggcctctttgcaactgttcttgtgtctttttgcggtgcatcctactggggagtggtaaattcacgagaggatggtgttcctctaaaggctgatttccttgcagcattacttcccttgctttgcattccagcatttttctcactgttcactgggctttacaaatggaaggatgatgattggaagatttctcgtggtgtttacctttttgttggcatgggaatgttgctgttgtttggtgcagttgcagctgttattgtcacaatcaggccctggactgttggagttgcttgcctcgtagccattctgttccttgtatttgttattggggtcatccactactggacatctaacaacttctatctaacgaggactcagatgttgcttgtttgttccattgcttttctcttagccttggctgccttcctgatgggtttatttcacggaaagccttttgttggagcatctataggttatttctcatttatatttcttctcactggaagggctttgactgtccttctatcaccgccaatcgtagtgtattcgccaagagtattgcctgtatacgtttatgatgctcatgcagactctgctaaaaatgttagctatgcctttcttattctgtatgggattgcattagcaactgaagtttggggtgttattgctagtctaataatgaatccaccatttgttggggctggcgtttctgctactactcttgtaattgctttcagttttgctgtttctcgaccatgcctgactcttaagatgatggaggatgcagttcattttctcagcaaggatacagttgtgcaagcgatgtcacggtctgctaataaaactagaaatgctatatctgggacttactcagcacctcagaggtccgcaagttctgctgctcttttggttggagatcctgctcttacattggacagggctgggaactttgtgcttcctagggctgatgttatgaaactgagagatcgtttgagaaatgaagaaattgctgcaggatctttcttatgtggagtaaaagattgtttactaatttgcccccagtccctgtcaaacatagattatcggaggaatatgtgtgcccatgcacgtattttggctttggaagaagcaattgatacagaatgggtgtatatgtgggacaaatttggtggttatttacttctgttgcttggattgactgccaaagctgaacaaatacaggatgaagttcgtctaagactctttttggatagcataggcctttccgatttgagtgccaaagaaattaagaaatggatgcctgaagatcggaggcaatttgagcttattcaagaaagctacataagggaaaaagaaatggaagaggaggctttgatgcaaagacgagaggaagaagggaagggaagagaaaggaggagggcattgctagagagagaggagcgaaaatggaaggagctcgaaatatcattgctttcttccattccaaatactggaagcagggatgctgcagctatggcagcagctgtcagagctgttggaggtgattctgccctggaagattcttttgcaagagatagggtctcttcaatagccaatcacatacgaaaggcacaattggctcggcgagcagaacagactggtattccaggcactatatgcatactcgatgatgaaccgaggagtactggtcgtcattgtggagaacttgacttgtgcctctgtcaaagtcaaaaggttactttgtctattgctgtcatggttcagcctgtatctggcccagtgtgtctttttggaagtgaattccaaaaggtttgttgggaaatcttagtggcaggatcagaacagggtatggaagctggacaagttggtcttcgattagtaactaagggtgaaaggatgactactgttgctaaagagtggaatattggtgcgtctagtattgcagatggcaggtggcatcttgtcactgtaactttagatgccgacctaggtgaagcaacttctttcattgatggagtttatgatggatatcagaatgggttgccgttgccaacagataacggtatttgggaacctggaactgatatttgggttggtgctaggccacccatggacttagatgcctttggtaggtcagatagcgaaggttctgactcaaagatgcagatcatggatgcttttctatggggaagatgtctcagtgaagatgaggttactgttttacatactgccatgtctcctgctgagtatggattttttgaccttgcacccggcgatgcttggcatggaagttattctgcaagggtggatgactgggaaagcgaagaagcttatgagctttatgatcaaggggatgtcgaatgggatggacagtactcaagtggtaggaaacgtccggtacatgatgctgtagctattgaccttgactcctttgctaggagaccaagaaaaccaaggtttgagacacgtgatgaagtcaaccagcgtatgctttctgttgaaagggctgtcagggatgctcttatcgcgaaaggagagagaaacttcactgatcaagagttccctccagaggatcgttctttatttgtagatccgatgaatccacctctgaaactgcaggttgtttctgagtggatgaggccttctgacatagcaaaggatatatctatcagttgtcagccttgcttgttttcgggttctgtgaattcctcagatgtgtgtcagggtcggttgggagactgttggttcctaagtgcagtcgcagttttaactgagatgtctcggatatcagaagttataatcactcccgagtacaatgatgaagggatttatacagtcagattctgtattcaggtacccaatattccaatgtttaaaccatttgactgataagtatctgctcaacttgaattgctccttttctattaatatactagccttgtgtcatctggtcagtatgttatctaggaaggttcagttgattcattttgcaaagtttataatacagttatcttaaaatgttagaccaaaaaatcacggtgaagtttaccatttgacaatcatatgtccagtttaatattagagttctatttctgaagcaaatgtgtacatcatgctacatgcatcgataacatatttaactgtgtcaggaaaaataaattattttattagttttttttgaagggaaaaccgtaggaaattccctacagtgaaatatattgaattaaattaggaaaaataaggacgaccgctgtacaaaaccgaaaaataggaaaaaggaaaggggggaaaggcaaagaacatcccaaattacaactccaataactagcaagatataagggataattattttattaatagttcattggtctgcaatatttactggagccatgctggagtcatcttggatgtgcactgctctatggagatatatactgcatgattggttggttgggccccgcgccgaggtcccgtgcatgcgttgactgcgcttggccgtgtgcttgattggctgcacggcagcgaccgagcctgt

SEQ ID NO: 214871 - DNA, 8028 bp, Zea Mays
cttgcaggctatccatgatttttgcctacaaaaggtgattgaaaaggggggaggatggaaggggagggacaccacggagttgttttggcatgcagcatctgtgggttcctcttcgctgtccttagccctttcagcttttgggttttatgggctgtgaattggaggccatggaggttatacagttggatatatgcaaggaaatggccaacatatgttcaaggacctcaattgagcacactttgcagccttttgactctttgtgcatggcttgttgtcatttcccctatagcagttctgctcgtgtggggaagcgtccttattgctcttatggaaaggaatataattggtttagctgttataatggcgggtgttgctttgctcctgtcattctactctataatgctctggtggagaacacaatggcaaagctcccaggctgttgcttaccttctcctcctggcagtatgcctgctatgtgcctacgatttttgtgctatttatgtgacagctggtgctagtgcttccgagcttaattctccatcagggttcttcttcggggtgtctgtaatatcattggccatcaatatgctttttatatgtaaaatactgtttaatgtaagtggatttgatgttgatgaatatgtgcggaggtcatacaaatttgcctattctgactgtgttgaagtggctcctgtttcatgctctcctgagccaccggatcctagtgaattatacatgacaaaatccagcagggtcaagcatttagggcttctgtacattagctctctgcttgtgcttgttggttattccatcttgtacggtcttacgtcaaaagaagctcgttggttgggtgctttaacttcagttgcagttgttatccttgactggaatctgggcttatgttcatttagatttgagcttcttaaaagtaggatgatagtgttatttgtggctggaacatcaagggctttccttgtatcctttggagtgcattactggtaccttggccattgcatcagctatgcttttgtagcatctgtgcttttatctgctgctgtttcttcctggctttctatttcaaacccctcagttgcaaggatagacgctctaagaagtacggtaataaagctacgagagggatttcgaagaaaaggacaaaatagttcttcaaattcatcagaaggctgtggctctagtgtgaagcgtagtagcggtagtgttgaagctggtcaaaatggtaatgcaatggattctatgtacagaagcaactcacaaagcgatggtgtcaattggagcagtattccttttgatcgatcaaacagttgtcaagaaggccggagctccgacaagaacatagatagtgcacgtgcaagcttagctcatcggagtaattcatgcttatctgccgtccaagactctgaaaccgctgttgtttcagtagataggcatggagatcccattacttcacttgtttgttctagcagtggtttggaaagtcatggctgtgagcctagtggatcagccaccacctcaggtaatcaacagctattggatttgaacctggcagcgatatttcaggacagattaaatgatccaaggatttcatctatgctaaaaaagaatggtggacttggagatgtagaactggctaatcttcttcaggataaaggactagatccaaatttttcgtacatgctgaaagacaaagttatggatccacgtattttagctttgctacagaggagcagcttggatgcagatagagagcatcaagatgacgtagatgtcacagctactgattcagatagattggataccactattgcaaatcagatttctctgtcagaagaactaaggagaagtggtctagaaaaatggttgaacatttcaaggctaatattccatcatttagctggatctccaatacgtgcttttattgttttcacagtaatgtttataatagagactgctactgtggctatctatcggccagagaccatcaaggtgataaatgcaacacatgaacagtttgaatttggtttctcgatactgcttctgtcaccagttgtctgctccattatggcattcatttggtctctgcgtgctgaagaaatgttgatgacatccaagccccagaagtatggtttcattgcatggctactgagcacatgtgttggtttgtttctctctttcttaagcaaatcatctgttatattgggcctgtctctcacggtaccacttatggtggcttgcctctcatttgctgttcccatatggatacgcaatggttacagtttctggattcctggaagggagtttgcaaatcgtgaaaatgttagtcaagctccaggagagaaagagcgggctctctttgttatcaccattgctgttttcactgcatcaattattggccttggtgcaatagtgtcagcaaagcctttagacgctctaggctataaaggatgggatgctgataagaacagctcctattctccctatgcaacatcaatgtatcttggatgggcattgtcttcaacaattgctgtgattaccacagggttgatacctattgttgcttggtttgcaacataccggttttcaccttcatcagctatatgtgttggcctctttgcaactgttcttgtgtctttttgcggtgcatcctactggggagtggtaaattcacgagaggatggtgttcctctaaaggctgatttccttgcagcattacttcccttgctttgcattccagcatttttctcactgttcactgggctttacaaatggaaggatgatgattggaagatttctcgtggtgtttacctttttgttggcatgggaatgttgctgttgtttggtgcagttgcagctgttattgtcacaatcaggccctggactgttggagttgcttgcctcgtagccattctgttccttgtatttgttattggggtcatccactactggacatctaacaacttctatctaacgaggactcagatgttgcttgtttgttccattgcttttctcttagccttggctgccttcctgatgggtttatttcacggaaagccttttgttggagcatctataggttatttctcatttatatttcttctcactggaagggctttgactgtccttctatcaccgccaatcgtagtgtattcgccaagagtattgcctgtatacgtttatgatgctcatgcagactctgctaaaaatgttagctatgcctttcttattctgtatgggattgcattagcaactgaagtttggggtgttattgctagtctaataatgaatccaccatttgttggggctggcgtttctgctactactcttgtaattgctttcagttttgctgtttctcgaccatgcctgactcttaagatgatggaggatgcagttcattttctcagcaaggatacagttgtgcaagcgatgtcacggtctgctaataaaactagaaatgctatatctgggacttactcagcacctcagaggtccgcaagttctgctgctcttttggttggagatcctgctcttacattggacagggctgggaactttgtgcttcctagggctgatgttatgaaactgagagatcgtttgagaaatgaagaaattgctgcaggatctttcttatgtggagtaaaagattgtttactaatttgcccccagtccctgtcaaacatagattatcggaggaatatgtgtgcccatgcacgtattttggctttggaagaagcaattgatacagaatgggtgtatatgtgggacaaatttggtggttatttacttctgttgcttggattgactgccaaagctgaacaaatacaggatgaagttcgtctaagactctttttggatagcataggcctttccgatttgagtgccaaagaaattaagaaatggatgcctgaagatcggaggcaatttgagcttattcaagaaagctacataagggaaaaagaaatggaagaggaggctttgatgcaaagacgagaggaagaagggaagggaagagaaaggaggagggcattgctagagagagaggagcgaaaatggaaggagctcgaaatatcattgctttcttccattccaaatactggaagcagggatgctgcagctatggcagcagctgtcagagctgttggaggtgattctgccctggaagattcttttgcaagagatagggtctcttcaatagccaatcacatacgaaaggcacaattggctcggcgagcagaacagactggtattccaggcactatatgcatactcgatgatgaaccgaggagtactggtcgtcattgtggagaacttgacttgtgcctctgtcaaagtcaaaaggttactttgtctattgctgtcatggttcagcctgtatctggcccagtgtgtctttttggaagtgaattccaaaaggtttgttgggaaatcttagtggcaggatcagaacagggtatggaagctggacaagttggtcttcgattagtaactaagggtgaaaggatgactactgttgctaaagagtggaatattggtggcatcttgtcactgtaactttagatgccgacctaggtgaagcaacttctttcattgatggagtttatgatggatatcagaatgggttgccgttgccaacagataacggtatttgggaacctggaactgatatttgggttggtgctaggccacccatggacttagatgcctttggtaggtcagatagcgaaggttctgactcaaagatgcagatcatggatgcttttctatggggaagatgtctcagtgaagatgaggttactgttttacatactgccatgtctcctgctgagtatggattttttgaccttgcacccggcgatgcttggcatggaagttattctgcaagggtggatgactgggaaagcgaagaagcttatgagctttatgatcaaggggatgtcgaatgggatggacagtactcaagtggtaggaaacgtccggtacatgatgctgtagctattgaccttgactcctttgctaggagaccaagaaaaccaaggtttgagacacgtgatgaagtcaaccagcgtatgctttctgttgaaagggctgtcagggatgctcttatcgcgaaaggagagagaaacttcactgatcaagagttccctccagaggatcgttctttatttgtagatccgatgaatccacctctgaaactgcaggttgtttctgagtggatgaggccttctgacatagcaaaggatatatctatcagttgtcagccttgcttgttttcgggttctgtgaattcctcagatgtgtgtcagggtcggttgggagactgttggttcctaagtgcagtcgcagttttaactgagatgtctcggatatcagaagttataatcactcccgagtacaatgatgaagggatttatacagtcagattctgtattcagggtgagtgggtggccgtggttgttgatgattggattccttgcgagtctccggggaaaccagcatttgctactagtagaaagcaaaacgagctttgggtatccattcttgagaaggcttatgcaaaacttcatggctcttatgaggcattggaaggtgggcttgttcaagatgctctagtcgatctcacaggaggagctggtgaagagattgatatgcgaagtcctcaagcccaacttgatcttgctagtggaagattgtggtcgcagttgttgcatttcaaacaagaaggttttcttcttggtgctggaagtccttctggatctgatgctcacatctcatcaagtggcattgttcagggacatgcgtactcaattttgcaggtaagagaagttgatggccacaaactcatccaaatcagaaatccatgggcaaatgaagttgaatggaatggaccatggtcagactcgtcaccagagtggacggaacggatgaagcataagctcatgcatgttccacagtcgaagaatggggtattctggatgtcttggcaagattttcagattcactttcggtcaatatatgtttgtcgtgtttatccacctgagatgcgttactctgtccatgggcaatggcgtggctacaatgcaggtggttgccaagattatgactcgtggcaccaaaatccacagtatcgacttagagtaacaggacgtgatgcactataccctgttcacgtttttattacccttactcagggtgttggtttctctagaaagacgaatggttttcggaactaccaatctagccatgattcttcaatgttttacattggaatgaggatactcaagacacagggctgccgtgctgcttacaatatctacatgcatgaaagcgctggtggaacagattacgttaactcgagggagatatcatgcgaactggtcttggatccttatcccaaagggtacacaattgtgccaactaccatccaccctggggaggaagcaccttttgttttgtcagttttttcaaaagcatcaatcagactagaggctgtttagttcaagattgagatcccatgtgtttgatggtagctgcgtctgctgggcacccgtgcacgcaggatccagctgtgggttctcgggaactagataatgggtataggaattgcctcctggacaacttcaatcaatcttgctgcatgcaagtacctaagttcggttgcttgttgcagatctgacaaacggcaatgcttcttgtgctgaagggaaaggagagaaggcatgatccatggttctttggtagctgcgcaaagtgcagggtgagaggcttggttcaatgtttgtagatagccgtggtaactgacctggtagcccatcctatgtataggtgtcccgtttaccctgtaaatgctatagagttaggttaggtagcctgtcgttcctgttaacgcatagggctcttatgcagctgtgaaatgtcttgttagcaagctgcagttttgctgatttgagcgtggagtagtcggccatagctgttcccattggtttgccatgttagtgccacgtcatatcgacaacgcagcctgccgatcatatatcatcttccttagatgtcagtgtatcctgcccgattgctgctgcggcagcagccccgggatgaatggcacgccgagctgtgggagccagtgctggccctggatgaagctctcgacggtgtacttctgcagcgcgtgctggtaggtgatgttcttgatacccctccacttgacgcgtctggtcatgttggcgccgggcccgtggttttccacctcggcgtagtagcaggtgctgaggccgaagtcgccgagccacggcagccagccctgcgggtcgatgaacccgccgatctccgactggatgtagagcgtgcgcgagtgctccttccacgggcggcccaggaaggtcctgaaccggccgacgctcttctcgaactccgggtgcggcgcgacggtgcagttgtggatgacggtgccgcccaccgaccgcctctccttgcggccctgcgccgtgacgatgttctgctggttgtccatgcacttgcgcacctggatgaggcagttctggaacaccacctgcgcgttgccgaagatgaagtcgatggtgcccgtgatgacgcagtcgcggtagtactggcggctcgtgtgcgtgtacagcgtgtcctggtacccgtcgaaccggcactcgtagaacgccgacatgtcgctctgcacccgcagcgccaccgcctggtggttcttggctcccgccgtgttcttcacgccgatcccgcgcatcaggaacccgttcccgatcgcctccatcgtggccgtgtccttggtggtgatgttcatcatgaagctcttgtggcccgtgatcaccgtcttggtggcgccgtcgccgaccatcaccaggttcgtcacgttccgggccacggacacgtactccctgtacttgccggccttcacgtacatgacgtacgtggtggcgctcttcagcggcaccttggccagcgccgcgttgatggtcctgaagtcgccgctgccgtccttggccaccgtca

SEQ ID NO: 214872 - DNA, 1739 bp, Zea Mays
ctcgctttcagcgaagactttcccatcacttgtttatgctcgcgcccggggggagggctggctggcggatacttgcagttttatactccaggcgtacgctacgcggttgggccgcgggcgtccagttctctgccttctccgatccaccgatcgaattccagttccaggcggccgatggcattgaggcggcggctgttgctgctggtggtggtcgtggcggccgccgtcgctcgctgccgggcggacgaccccgcggtgagcatgctgctgccgggactcccggtcgccggcctcgccgtggggttctacaacgagaagtgcccgcaggcggaggacctggtgctcgccgagatgcggaccctcgtcgacaaagacgagaccatcggcccggcgctgctgcgcttcatgttccacgactgcctcgtccggggctgcgacgcgtcgatcatgctcgtctcgcggaacgggactgcggagagggacgccttcccgagctacggcctccggggctacgccgagatcgagcacatcaaggccaagctggaggacgcgtgcccgctgaccgtgtcgtgcgcggacatcatcgtcatggcggcccgggacgccgtgtacctgagcaacgggccgcggtacgccgtggagaccggccgccgcgacggcaaggtgtcggcggagtacgacgccgacaacgacctcccgccgccctcctccaaaatcgtcgacctcaagacctacttcagcttcaaggggttgggctggaaggacctcgtcgtgctgtcagtgcaggaagccacacgatcgggagggcgcagtgcaccacgttcgcgtcggaccggctgtacaactacagcggccacgtggggcaggacccgtcgctgaacaaggcgtacgcggcgcagctgcgggagatgtgcgagccggggctcgccgacgacaccaccatggtggagatggacccgcgcagcccctacaccttcgacctcagctactaccgcaacgtgcgcgccaaccggggcctcttcacctcggaccaggccctcctcgacgacccgtggaccagcgcgtacgtcgagcgcatggccgacgcggcgtcgcccgacgaattcttcgccgactacgcggccgccatcaccaacatgggccgcatcgaggtgctcacgggtgacaacggcgagatcaggagcgcctgcgccgcgtacgttgactagaaattactaaccgatcgaggtcgaggaataggatagccagcgagtggttggcttggctgctgccctgctctgggcggcggtgccgttgttgacctggtcttgtcgtgcgagcgagtgcaattggtggatggatcgtcagccgtcgcgtcatgtggccacgacaacgtgggagccaaccaggatgcagtagttgcggtattctcttctctccgccgtttgggctggggtccatctgttttgttctttacgttgcgcctccattgtttgctgaggtgtgtgtgaagagacggacggtatggttgctcattcagacattcacacgacaaccacacaatggcaggaaatttttttgtcaaattatattaattcaaacagtaattgtgcttttggcaattggatgcttctgttggaatccagcgaagagacggcagttgagtagtgatggaactggacatcgagtgtttcgttttgtaagaattaattcgtatccaataaaaattgactacgtatatttgtatattcatattcatt

SEQ ID NO: 214873 - DNA, 1730 bp, Zea Mays
ctcgctttcagcgaagactttcccatcacttgtttatgctcgcgcccggggggagggctggctggcggatacttgcagttttatactccaggcgtacgctacgcggttgggccgcgggcgtccagttctctgccttctccgatccaccgatcgaattccagttccaggcggccgatggcattgaggcggcggctgttgctgctggtggtggtcgtggcggccgccgtcgctcgctgccgggcggacgaccccgcggtgagcatgctgctgccgggactcccggtcgccggcctcgccgtggggttctacaacgagaagtgcccgcaggcggaggacctggtgctcgccgagatgcggaccctcgtcgacaaagacgagaccatcggcccggcgctgctgcgcttcatgttccacgactgcctcgtccggggctgcgacgcgtcgatcatgctcgtctcgcggaacgggactgcggagagggacgccttcccgagctacggcctccggggctacgccgagatcgagcacatcaaggccaagctggaggacgcgtgcccgctgaccgtgtcgtgcgcggacatcatcgtcatggcggcccgggacgccgtgtacctgagcaacgggccgcggtacgccgtggagaccggccgccgcgacggcaaggtgtcggcggagtacgacgccgacaacgacctcccgccgccctcctccaaaatcgtcgacctcaagacctacttcagcttcaaggggttgggctggaaggacctcgtcgtgctgtcagccacacgatcgggagggcgcagtgcaccacgttcgcgtcggaccggctgtacaactacagcggccacgtggggcaggacccgtcgctgaacaaggcgtacgcggcgcagctgcgggagatgtgcgagccggggctcgccgacgacaccaccatggtggagatggacccgcgcagcccctacaccttcgacctcagctactaccgcaacgtgcgcgccaaccggggcctcttcacctcggaccaggccctcctcgacgacccgtggaccagcgcgtacgtcgagcgcatggccgacgcggcgtcgcccgacgaattcttcgccgactacgcggccgccatcaccaacatgggccgcatcgaggtgctcacgggtgacaacggcgagatcaggagcgcctgcgccgcgtacgttgactagaaattactaaccgatcgaggtcgaggaataggatagccagcgagtggttggcttggctgctgccctgctctgggcggcggtgccgttgttgacctggtcttgtcgtgcgagcgagtgcaattggtggatggatcgtcagccgtcgcgtcatgtggccacgacaacgtgggagccaaccaggatgcagtagttgcggtattctcttctctccgccgtttgggctggggtccatctgttttgttctttacgttgcgcctccattgtttgctgaggtgtgtgtgaagagacggacggtatggttgctcattcagacattcacacgacaaccacacaatggcaggaaatttttttgtcaaattatattaattcaaacagtaattgtgcttttggcaattggatgcttctgttggaatccagcgaagagacggcagttgagtagtgatggaactggacatcgagtgtttcgttttgtaagaattaattcgtatccaataaaaattgactacgtatatttgtatattcatattcatt

SEQ ID NO: 214874 - DNA, 5963 bp, Zea Mays
ctcggcgcctacgacaaaaaaaaaatcgtagctgctttcccctaccctttccgttctcggaggacgagggcgcgacggcacgcggcgaaaacgacgcggccgcgtcgccaaaaccgtcgcctcgcttcctccctcccatgacgggctcgaaacccgcgcccgccgcctcgcagaaccctagcgcggtcccgcatcgtcgtcctcctcctcctcctcctcctcctcctccgccgccggtgacagcggttgcgagggtgcgcgaagaaggcgagctctcctccggcgccgacgacgacgagactctgcaaactcagctaggtgccgcatccattcttgggaagtttgtggaggctggatctcaagtgccatcggcaagtctcctcggtaaaggcagtaacaccttgattgtctcaaatgctctgaatcataaagcgtctgctccaagttacaagaagatcatgagggtgaatcaggggcaattcaaacctggcactaaccggaatctttcatggcagaagcctgtgtcaagtgataaccttctgataactttctcagatgatgatagtggggcagactctgggaagacagggcgagataaagttaggaaggctagctctcaaggtacacagagaacagggaacagtatgcaaactaggatcatgagagaggaagtatctcagcagaaaaaccttggttcaaaagtaggtcctgcacacttgcctgcttttccattcacacatagaaatgttggggccggcagggcatcaggtaatacctttttcaggaaagagctgcctgtccgccaagttaatcctctaaagtctaaacagaaagttcaaaatggggtaggagtacattctgaagatcataggttagaaatcttgcgccataagatagctgctaaagaaaatgaactaaaaggtcaaaaaagacctttgtccgctgttgctacaaagaatgcagatttttcttccaatcagccaaggctgccatctgaaaagataaggcttgaagcttccagcattggtgaatattcacgctttaatagtctgtctgaacatagtggaggaccaaataaaaggttgaagctcaatcagcagtacaaccaattttgtagtgacctgacaccattggcacctattggttctatatcaggaaaaaccaatgtgcaatcttcagaagtgacaaatcggtctgaaaatggaattactatgaaccttaatgttaatgaaacagatacaacagacacaacagaacttgcagatcaaatacaacaaggtggggcaactaagagcctacgtcaccacaaagattcaggaggtgctgagaaccatgttatgcttgagtcacatgatgggcttgcagcacaaccaccatttactgacacacaaactataccagaagatacaagtgcgttggcccctgtgacgtcagcccaagctaggcaacaggtactggctgttggtacttcacctgtgttagacggaacaccacaattgcaacctggaaaggagaatgacgaatgtttgaacagcagtggccagataggcgtagagacacagaacacaatattgttctctctacttgagatggaagaattacaagacaaggaattggaggatgctcaggagcatagacaaaaatgtgaagctgaagaaagagaagctcttagagcttatcgcaaagcacaaagagctttacttgaggcaaatgaaagatgtgcaattcttcgtagaaaaagggagatttgctcttcacaagtccatggtttaattgcagagaattcttctttggtgcagtctttgagtattcggaatcctgaagatggccttgcaatgccatcactgctcaattctcagattcatgcagttagtcagattcctgaaaatcagggtggtagacacaggctgtgtcctgaagaaccttctcagcagcaaattgataagcatgaagatgaagcacgtccacactattgtgataagcttgctgccagcacagctgatcccagctctgtgagtgctgtcaatgctgacagcatcctttcagattatatggaggatgatcttctgttcccgactagacaggcaagatcagaatgtgctctggatgttgagaatcaaatggaagaaactatacatgtatatgcagaggaaaacagacaagtttctggtgacggtggtgaggattatgaacttttagaagcttctttgaggtctagattggtggaaaggtttgggaagaaatcatgtttgaatggcaccattgatgaaggtactgaaggacttgctgttgggaaagtagctgcagaacatggcaagcagtctgcatatgttggacatcagttacaggaagcagagcagaatattatgacaactactcttgaaggtacaatggagctggaaaatgatggtgctgaaaaaactgttggcctctctaattcttgtagtggtccttcaatgggcaactgtgatcctgaggacaacatttcctctctcaaagagttatgcatgccattggttatggacagtcttatttttccttcttcagctccactaaatgctgctagacaaatcaagcgggcatttcctgggatttgcaaggagctttcagattacaaaaatgaccatctgaccagtgatgcagtgtctgaagttacaggaagtgtacaagatatgatacacgaccttgttggagaaaatatgaagatgctcccaactacccaaaatgataataatatggtgcacagtgtgattgatcccttctggcccttttgcatgtttgagcttcgaggaaaatgcaatgacgaagagtgccagtggcagcattttgagcatcatgattggagaaagctagagcttacaaaacactctatgatctctgtttcaggccagatcccttatggtttgtctcagtatattcttccagtgccagtgtatcgtgttggttcaaatcttattaaagctgatctgaacttgacacagtcagtgttggctagcagtttatggcaatattggcaaagggggttttgtgcttcttttcctttacctttatctgttcaaagagttcttccatcagatgcaccattctttcaggctggtgatggccggattgctgattttgataggaacagacaactactaaaatttcgaatgctggatagcaggaaggtgggtagagcacactgtattgcagttatcatcacatcacagaagtggcatacatattggagtctggttctttacactaaacttattcttgaagttttttgctctttctattcttgcataatggcatattgattatgttatattggtacttgttaacactgcactcttttcttgtggttccaatgaaaaatgctctgattttgacaatttccttctgcactggaccaagaatttacagacatttaaagtatacatttcatagtagttgtaagttggaacatgatgatatgacatttttggtttgaatgaatatatttacttcattgatatctgatctgcttgcattttgattattgctgtgtaacttcatatcgtgtagaataagattgtacagggttctgttgatattgaattcttcttggaggcagcccttgatttatattgtggaaaagtaaacaagcctgacagaatcaaggctctttcatttctggcgcggtccattgaggctgatccaagtacagttatcctgtgggtgttttatctccatatttactatcaaaaggatgaaggacttggaaaagatgacatgttttctgatgcggtgcaacacaatgtttattcttatgaattatggcttatgtatataaatagtaggttacgcgttgatgatcgattggatgcttataacgatgctttgagcatgctctgccaaatgacagctgagactgacaaggatctacaagaaagaagtgctttcatactagacattttcttacagatgatttacttcctgtgcatgtctggaaatatagacaaggcagtttctaggattattggaattcttccaactgcaatgcctgataattctggaaccttccagaggaaattattgatcagctggagtttcagaaagctttacctcgtgctttaatatggccttctattgatcccagtgtagacaacagagataagattacagatcttctaaattttgctgcttgtaagatggctgaagatattagtgagtgtgttaaaaacggggatccatcttacctgatgttatcacaattcctcgctgttaaccacattagttgtctagcggccattggaggcttaaaatcttctgttgatatgctggtgacctacatgaaggagtacccaatgtgtcctcagattcttctgatctcagctcggttagacagaaagcatggtacatgtccaggtctgaaaagctttgatgagttgatcttgaattggcctaaagaggcacaaggaattcaatatatgtggaatcaatatgttgaacatgctctggccactgatgccgagttagctgagaaggtactgacttgctggtttgaagaacatggaaaggactgtgatatccaaagcaatgctgctatttgtatagaactgagcagtgaagaacctggaacatcatcacttgtttcacctcaggcagttggttctggtccatctatatcagaagatctcgtctttcggttactaaacctctcactgtataagatactggagaacaacctacaggaagcacaaatggctgcgagtaaagcattgaaattggctcatggggagtggtacgagcactgtataagagaacatgctgcaattcatgcactggagctggagaaatcatcatcttcgacagatgctcaaactcgggctacattcagtttaatcattggctaccttgctgatcattgcaacttgcccacgagggagctgctgtcacgaaggttttgccagaatattaagaagcataggcttaggcagcttatagatgatactattggttctgttcctgcagattcttctctgataaactctgtccttgaagtgtgctttggcccatccctccttccaaaaagcattagcgatgtgaagtacctggttgattttgttgaaacagtcatggaggctcttcctgcaaactatcgcctgggcttggctgttggtggattcgtagctaagcacttcacaggttatggcgcagcctccactgggaccaggttctgggcaagctctgttctgatcaatgccatctttcgagctgtacctgtcgcaccggaatcagtatggctagaaggtgcaggcctcctggagaaactgcatgccacagagattttgaagaggttctatcagcaggcggcatcggtctatcccttctccttcaagctgtggcacgcccatctgaattactgcaaagccagtgggagcaacactgagagcatcctggagagtgcgaggcagcgtggcatcgagctgaatctgacaccaacatagtgtgtcccttggatccaagctgcatgatgttttgccagtcggagatgttggtagtgttgtgttaactggagatggcgtgtagatatatcggtgatcatggtggtgtgagatcatttttgttctttaggtgcaggtttagtgggacatagtcgtcggtatcttacagcatgtgtttctgatggagtgatatggttagtaagcagtggtgaaggatacaggcatacgggcactggggcatataccatacttttggactagacgggctagagactgattttggagtccgttatgtttccattttccgttctcttggttttctctgtcgtcaatgtattataatcatgatgatgaatggatggagaaatgagatgagatttttttgagttcactcttgcagtttcggttattatatttttgtgctgtcttcgaatctgatttggtcgacggcatgtttggaagtaaagtattttaaaatcaggttttggaatacta

SEQ ID NO: 214875 - DNA, 5640 bp, Zea Mays
aaaaatcgtagctgctttcccctaccctttccgttctcggaggacgagggcgcgacggcacgcggcgaaaacgacgcggccgcgtcgccaaaaccgtcgcctcgcttcctccctcccatgacgggctcgaaacccgcgcccgccgcctcgcagaaccctagcgcggtcccgcatcgtcgtcctcctcctcctcctcctcctcctcctccgccgccggtgacagcggttgcgagggtgcgcgaagaaggcgagctctcctccggcgccgacgacgacgagactctgcaaactcagctaggtgccgcatccattcttgggaagtttgtggaggctggatctcaagtgccatcggcaagtctcctcggtaaaggcagtaacaccttgattgtctcaaatgctctgaatcataaagcgtctgctccaagttacaagaagatcatgagggtgaatcaggggcaattcaaacctggcactaaccggaatctttcatggcagaagcctgtgtcaagtgataaccttctgataactttctcagatgatgatagtggggcagactctgggaagacagggcgagataaagttaggaaggctagctctcaaggtacacagagaacagggaacagtatgcaaactaggatcatgagagaggaagtatctcagcagaaaaaccttggttcaaaagtaggtcctgcacacttgcctgcttttccattcacacatagaaatgttggggccggcagggcatcaggtaatacctttttcaggaaagagctgcctgtccgccaagttaatcctctaaagtctaaacagaaagttcaaaatggggtaggagtacattctgaagatcataggttagaaatcttgcgccataagatagctgctaaagaaaatgaactaaaaggtcaaaaaagacctttgtccgctgttgctacaaagaatgcagatttttcttccaatcagccaaggctgccatctgaaaagataaggcttgaagcttccagcattggtgaatattcacgctttaatagtctgtctgaacatagtggaggaccaaataaaaggttgaagctcaatcagcagtacaaccaattttgtagtgacctgacaccattggcacctattggttctatatcaggaaaaaccaatgtgcaatcttcagaagtgacaaatcggtctgaaaatggaattactatgaaccttaatgttaatgaaacagatacaacagacacaacagaacttgcagatcaaatacaacaaggtggggcaactaagagcctacgtcaccacaaagattcaggaggtgctgagaaccatgttatgcttgagtcacatgatgggcttgcagcacaaccaccatttactgacacacaaactataccagaagatacaagtgcgttggcccctgtgacgtcagcccaagctaggcaacaggtactggctgttggtacttcacctgtgttagacggaacaccacaattgcaacctggaaaggagaatgacgaatgtttgaacagcagtggccagataggcgtagagacacagaacacaatattgttctctctacttgagatggaagaattacaagacaaggaattggaggatgctcaggagcatagacaaaaatgtgaagctgaagaaagagaagctcttagagcttatcgcaaagcacaaagagctttacttgaggcaaatgaaagatgtgcaattcttcgtagaaaaagggagatttgctcttcacaagtccatggtttaattgcagagaattcttctttggtgcagtctttgagtattcggaatcctgaagatggccttgcaatgccatcactgctcaattctcagattcatgcagttagtcagattcctgaaaatcagggtggtagacacaggctgtgtcctgaagaaccttctcagcagcaaattgataagcatgaagatgaagcacgtccacactattgtgataagcttgctgccagcacagctgatcccagctctgtgagtgctgtcaatgctgacagcatcctttcagattatatggaggatgatcttctgttcccgactagacaggcaagatcagaatgtgctctggatgttgagaatcaaatggaagaaactatacatgtatatgcagaggaaaacagacaagtttctggtgacggtggtgaggattatgaacttttagaagcttctttgaggtctagattggtggaaaggtttgggaagaaatcatgtttgaatggcaccattgatgaaggtactgaaggacttgctgttgggaaagtagctgcagaacatggcaagcagtctgcatatgttggacatcagttacaggaagcagagcagaatattatgacaactactcttgaaggtacaatggagctggaaaatgatggtgctgaaaaaactgttggcctctctaattcttgtagtggtccttcaatgggcaactgtgatcctgaggacaacatttcctctctcaaagagttatgcatgccattggttatggacagtcttatttttccttcttcagctccactaaatgctgctagacaaatcaagcgggcatttcctgggatttgcaaggagctttcagattacaaaaatgaccatctgaccagtgatgcagtgtctgaagttacaggaagtgtacaagatatgatacacgaccttgttggagaaaatatgaagatgctcccaactacccaaaatgataataatatggtgcacagtgtgattgatcccttctggcccttttgcatgtttgagcttcgaggaaaatgcaatgacgaagagtgccagtggcagcattttgagcatcatgattggagaaagctagagcttacaaaacactctatgatctctgtttcaggccagatcccttatggtttgtctcagtatattcttccagtgccagtgtatcgtgttggttcaaatcttattaaagctgatctgaacttgacacagtcagtgttggctagcagtttatggcaatattggcaaagggggttttgtgcttcttttcctttacctttatctgttcaaagagttcttccatcagatgcaccattctttcaggctggtgatggccggattgctgattttgataggaacagacaactactaaaatttcgaatgctggatagcaggaagggttctgttgatattgaattcttcttggaggcagcccttgatttatattgtggaaaagtaaacaagcctgacagaatcaaggctctttcatttctggcgcggtccattgaggctgatccaagtacagttatcctgtgggtgttttatctccatatttactatcaaaaggatgaaggacttggaaaagatgacatgttttctgatgcggtgcaacacaatgtttattcttatgaattatggcttatgtatataaatagtaggttacgcgttgatgatcgattggatgcttataacgatgctttgagcatgctctgccaaatgacagctgagactgacaaggatctacaagaaagaagtgctttcatactagacattttcttacagatgatttacttcctgtgcatgtctggaaatatagacaaggcagtttctaggattattggaattcttccaactgcaatgcctgataattctggtgacaagttgcttgctgatgtcatttcttgcttgaccatgtccgacagatgcatattttggatttcgtgcctatatgtcttaatttacaggaaccttccagaggaaattattgatcagctggagtttcagaaagctttacctcgtgctttaatatggccttctattgatcccagtgtagacaacagagataagattacagatcttctaaattttgctgcttgtaagatggctgaagatattagtgagtgtgttaaaaacggggatccatcttacctgatgttatcacaattcctcgctgttaaccacattagttgtctagcggccattggaggcttaaaatcttctgttgatatgctggtgacctacatgaaggagtacccaatgtgtcctcagattcttctgatctcagctcggttagacagaaagcatggtacatgtccaggtctgaaaagctttgatgagttgatcttgaattggcctaaagaggcacaaggaattcaatatatgtggaatcaatatgttgaacatgctctggccactgatgccgagttagctgagaaggtactgacttgctggtttgaagaacatggaaaggactgtgatatccaaagcaatgctgctatttgtatagaactgagcagtgaagaacctggaacatcatcacttgtttcacctcaggcagttggttctggtccatctatatcagaagatctcgtctttcggttactaaacctctcactgtataagatactggagaacaacctacaggaagcacaaatggctgcgagtaaagcattgaaattggctcatggggagtggtacgagcactgtataagagaacatgctgcaattcatgcactggagctggagaaatcatcatcttcgacagatgctcaaactcgggctacattcagtttaatcattggctaccttgctgatcattgcaacttgcccacgagggagctgctgtcacgaaggttttgccagaatattaagaagcataggcttaggcagcttatagatgatactattggttctgttcctgcagattcttctctgataaactctgtccttgaagtgtgctttggcccatccctccttccaaaaagcattagcgatgtgaagtacctggttgattttgttgaaacagtcatggaggctcttcctgcaaactatcgcctgggcttggctgttggtggattcgtagctaagcacttcacaggttatggcgcagcctccactgggaccaggttctgggcaagctctgttctgatcaatgccatctttcgagctgtacctgtcgcaccggaatcagtatggctagaaggtgcaggcctcctggagaaactgcatgccacagagattttgaagaggttctatcagcaggcggcatcggtctatcccttctccttcaagctgtggcacgcccatctgaattactgcaaagccagtgggagcaacactgagagcatcctggagagtgcgaggcagcgtggcatcgagctgaatctgacaccaacatagtgtgtcccttggatccaagctgcatgatgttttgccagtcggagatgttggtagtgttgtgttaactggagatggcgtgtagatatatcggtgatcatggtggtgtgagatcatttttgttctttaggtgcaggtttagtgggacatagtcgtcggtatcttacagcatgtgtttctgatggagtgatatggttagtaagcagtggtgaaggatacaggcatacgggcactggggcatataccatacttttggactagacgggctagagactgattttggagtccgttatgtttccattttccgttctcttggttttctctgtcgtcaatgtattataatcatgatgatgaatggatggagaaatgagatgagatttttttgagttcactcttgcagtttcggttattatatttttgtgctgtcttcgaatctgatttggtcgacggcatgtttggaagtaaagtattttaaaatcaggttttggaatacta

SEQ ID NO: 214876 - DNA, 5216 bp, Zea Mays
cgaaaacgacgcggccgcgtcgccaaaaccgtcgcctcgcttcctccctcccatgacgggctcgaaacccgcgcccgccgcctcgcagaaccctagcgcggtcccgcatcgtcgtcctcctcctcctcctcctcctcctcctccgccgccggtgacagcggttgcgagggtgcgcgaagaaggcgagctctcctccggcgccgacgacgacgagactctgcaaactcagctaggtgccgcatccattcttgggaagtttgtggaggctggatctcaagtgccatcggcaagtctcctcggtaaaggcagtaacaccttgattgtctcaaatgctctgaatcataaagcgtctgctccaagttacaagaagatcatgagggtgaatcaggggcaattcaaacctggcactaaccggaatctttcatggcagaagcctgtgtcaagtgataaccttctgataactttctcagatgatgatagtggggcagactctgggaagacagggcgagataaagttaggaaggctagctctcaaggtacacagagaacagggaacagtatgcaaactaggatcatgagagaggaagtatctcagcagaaaaaccttggttcaaaagtaggtcctgcacacttgcctgcttttccattcacacatagaaatgttggggccggcagggcatcaggtaatacctttttcaggaaagagctgcctgtccgccaagttaatcctctaaagtctaaacagaaagttcaaaatggggtaggagtacattctgaagatcataggttagaaatcttgcgccataagatagctgctaaagaaaatgaactaaaaggtcaaaaaagacctttgtccgctgttgctacaaagaatgcagatttttcttccaatcagccaaggctgccatctgaaaagataaggcttgaagcttccagcattggtgaatattcacgctttaatagtctgtctgaacatagtggaggaccaaataaaaggttgaagctcaatcagcagtacaaccaattttgtagtgacctgacaccattggcacctattggttctatatcaggaaaaaccaatgtgcaatcttcagaagtgacaaatcggtctgaaaatggaattactatgaaccttaatgttaatgaaacagatacaacagacacaacagaacttgcagatcaaatacaacaaggtggggcaactaagagcctacgtcaccacaaagattcaggaggtgctgagaaccatgttatgcttgagtcacatgatgggcttgcagcacaaccaccatttactgacacacaaactataccagaagatacaagtgcgttggcccctgtgacgtcagcccaagctaggcaacaggtactggctgttggtacttcacctgtgttagacggaacaccacaattgcaacctggaaaggagaatgacgaatgtttgaacagcagtggccagataggcgtagagacacagaacacaatattgttctctctacttgagatggaagaattacaagacaaggaattggaggatgctcaggagcatagacaaaaatgtgaagctgaagaaagagaagctcttagagcttatcgcaaagcacaaagagctttacttgaggcaaatgaaagatgtgcaattcttcgtagaaaaagggagatttgctcttcacaagtccatggtttaattgcagagaattcttctttggtgcagtctttgagtattcggaatcctgaagatggccttgcaatgccatcactgctcaattctcagattcatgcagttagtcagattcctgaaaatcagggtggtagacacaggctgtgtcctgaagaaccttctcagcagcaaattgataagcatgaagatgaagcacgtccacactattgtgataagcttgctgccagcacagctgatcccagctctgtgagtgctgtcaatgctgacagcatcctttcagattatatggaggatgatcttctgttcccgactagacaggcaagatcagaatgtgctctggatgttgagaatcaaatggaagaaactatacatgtatatgcagaggaaaacagacaagtttctggtgacggtggtgaggattatgaacttttagaagcttctttgaggtctagattggtggaaaggtttgggaagaaatcatgtttgaatggcaccattgatgaaggtactgaaggacttgctgttgggaaagtagctgcagaacatggcaagcagtctgcatatgttggacatcagttacaggaagcagagcagaatattatgacaactactcttgaaggtacaatggagctggaaaatgatggtgctgaaaaaactgttggcctctctaattcttgtagtggtccttcaatgggcaactgtgatcctgaggacaacatttcctctctcaaagagttatgcatgccattggttatggacagtcttatttttccttcttcagctccactaaatgctgctagacaaatcaagcgggcatttcctgggatttgcaaggagctttcagattacaaaaatgaccatctgaccagtgatgcagtgtctgaagttacaggaagtgtacaagatatgatacacgaccttgttggagaaaatatgaagatgctcccaactacccaaaatgataataatatggtgcacagtgtgattgatcccttctggcccttttgcatgtttgagcttcgaggaaaatgcaatgacgaagagtgccagtggcagcattttgagcatcatgattggagaaagctagagcttacaaaacactctatgatctctgtttcaggccagatcccttatggtttgtctcagtatattcttccagtgccagtgtatcgtgttggttcaaatcttattaaagctgatctgaacttgacacagtcagtgttggctagcagtttatggcaatattggcaaagggggttttgtgcttcttttcctttacctttatctgttcaaagagttcttccatcagatgcaccattctttcaggctggtgatggccggattgctgattttgataggaacagacaactactaaaatttcgaatgctggatagcaggaagggttctgttgatattgaattcttcttggaggcagcccttgatttatattgtggaaaagtaaacaagcctgacagaatcaaggctctttcatttctggcgcggtccattgaggctgatccaagtacagttatcctgtgggtgttttatctccatatttactatcaaaaggatgaaggacttggaaaagatgacatgttttctgatgcggaaccttccagaggaaattattgatcagctggagtttcagaaagctttacctcgtgctttaatatggccttctattgatcccagtgtagacaacagagataagattacagatcttctaaattttgctgcttgtaagatggctgaagatattagtgagtgtgttaaaaacggggatccatcttacctgatgttatcacaattcctcgctgttaaccacattagttgtctagcggccattggaggcttaaaatcttctgttgatatgctggtgacctacatgaaggagtacccaatgtgtcctcagattcttctgatctcagctcggttagacagaaagcatggtacatgtccaggtctgaaaagctttgatgagttgatcttgaattggcctaaagaggcacaaggaattcaatatatgtggaatcaatatgttgaacatgctctggccactgatgccgagttagctgagaaggtactgacttgctggtttgaagaacatggaaaggactgtgatatccaaagcaatgctgctatttgtatagaactgagcagtgaagaacctggaacatcatcacttgtttcacctcaggcagttggttctggtccatctatatcagaagatctcgtctttcggttactaaacctctcactgtataagatactggagaacaacctacaggaagcacaaatggctgcgagtaaagcattgaaattggctcatggggagtggtacgagcactgtataagagaacatgctgcaattcatgcactggagctggagaaatcatcatcttcgacagatgctcaaactcgggctacattcagtttaatcattggctaccttgctgatcattgcaacttgcccacgagggagctgctgtcacgaaggttttgccagaatattaagaagcataggcttaggcagcttatagatgatactattggttctgttcctgcagattcttctctgataaactctgtccttgaagtgtgctttggcccatccctccttccaaaaagcattagcgatgtgaagtacctggttgattttgttgaaacagtcatggaggctcttcctgcaaactatcgcctgggcttggctgttggtggattcgtagctaagcacttcacaggttatggcgcagcctccactgggaccaggttctgggcaagctctgttctgatcaatgccatctttcgagctgtacctgtcgcaccggaatcagtatggctagaaggtgcaggcctcctggagaaactgcatgccacagagattttgaagaggttctatcagcaggcggcatcggtctatcccttctccttcaagctgtggcacgcccatctgaattactgcaaagccagtgggagcaacactgagagcatcctggagagtgcgaggcagcgtggcatcgagctgaatctgacaccaacatagtgtgtcccttggatccaagctgcatgatgttttgccagtcggagatgttggtagtgttgtgttaactggagatggcgtgtagatatatcggtgatcatggtggtgtgagatcatttttgttctttaggtgcaggtttagtgggacatagtcgtcggtatcttacagcatgtgtttctgatggagtgatatggttagtaagcagtggtgaaggatacaggcatacgggcactggggcatataccatacttttggactagacgggctagagactgattttggagtccgttatgtttccattttccgttctcttggttttctctgtcgtcaatgtattataatcatgatgatgaatggatggagaaatgagatgagatttttttgagttcactcttgcagtttcggttattatatttttgtgctgtcttcgaatctgatttggtcgacggcatgtttggaagtaaagtattttaaaatcaggttttggaatacta

SEQ ID NO: 214877 - DNA, 2282 bp, Zea Mays
atggcgctcctatctcttaggacccctccctggggatacccgcaaggagacagtggcggccgcagtcgtggccggaagcttcgcgggccccgccgcctcgacgtcgtcgccatccgaagcgccgctttcttccttcggcgagattaatttgtcagctaggattgctccagcagcagccccctctatgttcctggccccttcatcttcacctgcagaaattttttatgatggttcaatggaggaacccgaacatcctgatataaagccatgttttctcaatagcttctaatgacacttcagagaaatccgccaaaggagtcatccccttttctcaaagaagagcccatttttagtggtttgcctacaatgagttctgatgtcaatggagaaaatgtcatggataccaaatctgttctccctgtaacgccagaggcgcctctttggtcaacagcagctgatgaagagcttatatatgcaaagaaagaaatcactaatgcaccattgacctcagatgaccctgatctttatgcacccttgttccggaatgtatccatctttaaaaggagttatgaactgatggagagacttcttaaggttttcatatatcatgatggagcaaaacctattttccattccccagagttgaaaggtatctatgcgtctgagggatggtttatgaaattgatggagacaaaccagaattttgttgtgagagatccaaatacagcccatttattctatcttccatatagctctcgtcaactggagcataacctttatgtgcctggctcaaatacaattgagccactgtctatctttgttaaaaattacattgaccttatctcggccaagtacccatattggaataggacaaaaggagctgatcatttctttgttgcttgccatgactgggggccttacacaacaaaattgcatgatgaattgcggaagaacactattaaagctctctgcaatgcagatctctctgaaggattttttatccgtggaaaagatgtttcccttccagaaacattccttaggtcaccaagaagacctctaagagatattggaggaagaccagctgcgcagaggactatcctggccttctttgcagggcagatgcatggtcgagttcgacctgtacttctcaagtattggggaaacaaggatgatgatatgagaatatatagtaggctgccacaccgaatcaccaggaagagaaattacgttcagcatatgaagtcaagcaagtattgcatctgtcccatggggtatgaggtaaatagcccgagaatagtggaggcaatatattatgagtgtgttccagtaataatcgctgaccattttgttctcccgtttgatgccgcactcaactggagtacgttctctgttgtcgtaccagaaagcgatgtacctaagctgaagcaaatcttgttggcaatacccgagagtcgatacataacccttcaggcaaacgtgaaaagggtgcagaagcattttatgtggcatccgaatcctgtcaagtatgacattttccacatgatactacactcagtctggtttagcagggtgaaccagatccgttagagcagcacctgtggttcacatgcctgaattacatatggagggttgtttgctgacccgtttttggtgtgctcgtctgaggaagctgctcatgtggtgggatttggattgtaatcttgtcgacacagctgttccgtgctcaaggtgctgaatggagatgttgatctgacagtagaactggcagtctgtggataaaatacagtttatataggagcaggcttatgactgagttctcattactggtaatttccctcatggatagtttggtgtaaagcgttgacaaaagccgatgaggtgttgtgacgactgacgatgtccctttctgtaagattgtaattttcgttactctttttaacctgggcacgggaaaagatctggaatagggatgcacggggaattctctgtcaggttttagctctccattcccgtttccgcgacaaaaaaaatccttgcaggatccccacaaatgcttgcggggtatttcttctccatccctattttccatggggataaatccccttcggggatcaccgttttcgcttaaattataattagaacatacttattatgttattaatgcaaagcattgtcacttctacacattgtcagatttaagaaatcagtgtgtacattaaaataaatatatatgttatttatataatgagtgatctctttacaatgtaattatttatttttat

SEQ ID NO: 214878 - DNA, 1512 bp, Zea Mays
atggcgctcctatctcttaggacccctccctggggatacccgcaaggagacagtggcggccgcagtcgtggccggaagcttcgcgggccccgccgcctcgacgtcgtcgccatccgaagcgccgctttcttccttcggcgaggggccttacacaacaaaattgcatgatgaattgcggaagaacactattaaagctctctgcaatgcagatctctctgaaggattttttatccgtggaaaagatgtttcccttccagaaacattccttaggtcaccaagaagacctctaagagatattggaggaagaccagctgcgcagaggactatcctggccttctttgcagggcagatgcatggtcgagttcgacctgtacttctcaagtattggggaaacaaggatgatgatatgagaatatatagtaggctgccacaccgaatcaccaggaagagaaattacgttcagcatatgaagtcaagcaagtattgcatctgtcccatggggtatgaggtaaatagcccgagaatagtggaggcaatatattatgagtgtgttccagtaataatcgctgaccattttgttctcccgtttgatgccgcactcaactggagtacgttctctgttgtcgtaccagaaagcgatgtacctaagctgaagcaaatcttgttggcaatacccgagagtcgatacataacccttcaggcaaacgtgaaaagggtgcagaagcattttatgtggcatccgaatcctgtcaagtatgacattttccacatgatactacactcagtctggtttagcagggtgaaccagatccgttagagcagcacctgtggttcacatgcctgaattacatatggagggttgtttgctgacccgtttttggtgtgctcgtctgaggaagctgctcatgtggtgggatttggattgtaatcttgtcgacacagctgttccgtgctcaaggtgctgaatggagatgttgatctgacagtagaactggcagtctgtggataaaatacagtttatataggagcaggcttatgactgagttctcattactggtaatttccctcatggatagtttggtgtaaagcgttgacaaaagccgatgaggtgttgtgacgactgacgatgtccctttctgtaagattgtaattttcgttactctttttaacctgggcacgggaaaagatctggaatagggatgcacggggaattctctgtcaggttttagctctccattcccgtttccgcgacaaaaaaaatccttgcaggatccccacaaatgcttgcggggtatttcttctccatccctattttccatggggataaatccccttcggggatcaccgttttcgcttaaattataattagaacatacttattatgttattaatgcaaagcattgtcacttctacacattgtcagatttaagaaatcagtgtgtacattaaaataaatatatatgttatttatataatgagtgatctctttacaatgtaattatttatttttat

SEQ ID NO: 214879 - DNA, 2618 bp, Zea Mays
gtgcccgcagcgtacgcaatgccgcaccaccaccacaccaatccgtcgcatcctcctgcggcgcgcaagctcctctcctggcgccgcgtagtcgccgcctgcgccgttgtcgcggcgctcgcgctcctcctggccgccgcccctgccacggaggaccccagccgatggcgctcctatctcttaggacccctccctggggatacccgcaaggagacagtggcggccgcagtcgtggccggaagcttcgcgggccccgccgcctcgacgtcgtcgccatccgaagcgccgctttcttccttcggcgagattaatttgtcagctaggattgctccagcagcagccccctctatgttcctggccccttcatcttcacctgcagaaattttttatgatggttcaatggaggaacccgaacatcctgatataaaggtatggatcactacaaaagttgacatatcactgcatggatttctttttgcatgtcatgtttgtttcaacttgatgcaattaggaagccatgttttctcaatagcttctaatgacacttcagagaaatccgccaaaggagtcatccccttttctcaaagaagaggtacatatctaactaatcatgggtgaaattttcctgtagcaactgacatatttatttttcttataaccttcttacctgtgaagcccatttttagtggtttgcctacaatgagttctgatgtcaatggagaaaatgtcatggataccaaatctgttctccctgtaacgccagagcaggcgcctctttggtcaacagcagctgatgaagagcttatatatgcaaagaaagaaatcactaatgcaccattgacctcagatgaccctgatctttatgcacccttgttccggaatgtatccatctttaaaaggagttatgaactgatggagagacttcttaaggttttcatatatcatgatggagcaaaacctattttccattccccagagttgaaaggtatctatgcgtctgagggatggtttatgaaattgatggagacaaaccagaattttgttgtgagagatccaaatacagcccatttattctatcttccatatagctctcgtcaactggagcataacctttatgtgcctggctcaaatacaattgagccactgtctatctttgttaaaaattacattgaccttatctcggccaagtacccatattggaataggacaaaaggagctgatcatttctttgttgcttgccatgactgggggccttacacaacaaaattgcatgatgaattgcggaagaacactattaaagctctctgcaatgcagatctctctgaaggattttttatccgtggaaaagatgtttcccttccagaaacattccttaggtcaccaagaagacctctaagagatattggaggaagaccagctgcgcagaggactatcctggccttctttgcagggcagatgcatggtcgagttcgacctgtacttctcaagtattggggaaacaaggatgatgatatgagaatatatagtaggctgccacaccgaatcaccaggaagagaaattacgttcagcatatgaagtcaagcaagtattgcatctgtcccatggggtatgaggtaaatagcccgagaatagtggaggcaatatattatgagtgtgttccagtaataatcgctgaccattttgttctcccgtttgatgccgcactcaactggagtacgttctctgttgtcgtaccagaaagcgatgtacctaagctgaagcaaatcttgttggcaatacccgagagtcgatacataacccttcaggcaaacgtgaaaagggtgcagaagcattttatgtggcatccgaatcctgtcaagtatgacattttccacatgatactacactcagtctggtttagcagggtgaaccagatccgttagagcagcacctgtggttcacatgcctgaattacatatggagggttgtttgctgacccgtttttggtgtgctcgtctgaggaagctgctcatgtggtgggatttggattgtaatcttgtcgacacagctgttccgtgctcaaggtgctgaatggagatgttgatctgacagtagaactggcagtctgtggataaaatacagtttatataggagcaggcttatgactgagttctcattactggtaatttccctcatggatagtttggtgtaaagcgttgacaaaagccgatgaggtgttgtgacgactgacgatgtccctttctgtaagattgtaattttcgttactctttttaacctgggcacgggaaaagatctggaatagggatgcacggggaattctctgtcaggttttagctctccattcccgtttccgcgacaaaaaaaatccttgcaggatccccacaaatgcttgcggggtatttcttctccatccctattttccatggggataaatccccttcggggatcaccgttttcgcttaaattataattagaacatacttattatgttattaatgcaaagcattgtcacttctacacattgtcagatttaagaaatcagtgtgtacattaaaataaatatatatgttatttatataatgagtgatctctttacaatgtaattatttatttttat

SEQ ID NO: 214880 - DNA, 1941 bp, Zea Mays
gtccatctcaccgtctccttgaaacgcacccgagccaggtcgagccgtcgagtcgagtcgtcgacgacagcacgcggcgggcggaaggggacgcagacacgcagttgcaggctcgcagcagcaagattctcctgtcttcaatttcatcaacaatctctcgcctataccaccacctaaacctttagactcagcacataatgtgcagctattcaagtcatcagacttggcacctgtttcttcgatctttgcctcaccacatgttaatccagtgaaggaaactaaagttttgatcagggatgaatctgttcaccttcctcaagaattgcactcgcctagcagtgtcaggactcgaatagacacctcaggctcttttagaatgatcagatgcaaagacattgtgtcggacaattgcaatatcacttgtcaactaaacgaggcatctattgattcttctgatcatacatcaaactctacaggccaattgactcaatccatacaggatgctgctggcagtatggaaagcgataaggatcaatgcgatgccaataaaacagaccttaccatatcccaggagtgcacaggcctagaaggtatgaaccttgatgagagtggcccagacaaaatggattcgtcacattctgggattgttgttcatgaaaaccagctatctgaacaaaacaatgacgaacctgcagcatataatgagggttacattattacacaccaatcaactagtgatatgctcactttagccataccatctggaacagaaacacaaccagtgaatgatacacaaatggctgataacccctactcttgtgaatccttgttggatgatcagtcaagtggatattgcacccagaattctgtgcatgaaccccatttgtactggactggggcagttgaagggtctgcagtatcctatactccccaaacactccctggtgctttgcaaagtcagctgatgccatgtaacaagctcagtgaaccaaaagattacgtgcctactgagcaaaatgccttgtcacagcacttacgtggcatgcgtaggcgcagccttttcaatgaaaaggctggaattagtaataaaggtgtagacaaaacttcggatcatcatcctgtaaattcaactacccccaaatgcaaaactatttctggtgacaactcaaagcctctaagaacccctccatgcgcattacctggtattggcttgcacttgaatgcccttgctacaatacctaaagagaaaatagtccctcgagagattcagtctactataaatgaatcaagtaacttgataggccctgctggatcttctccagcaccttttgagcaaaacattataaatgatgatttcactcaaacaactgatgttgcaactgccgaagcttctagtcagggtagtcccaagaagaaaaggcataagtttgacaatggtgatggcacttcatgcaagcgttgtagttgtaagaagtcaaaatgcctgaaactttactgtgagtgttttgctgctggagtctattgttctgagccttgttcgtgtatcggctgtcagaacaaccagagtcatatggaaacagttctgtctacacggcaacagattgaatctcgcaatccattagcatttgctcctaaagtcattcatacatctgagcctggtatggacttaggggacttttccaataaaactcctgcttcagctcgtcacaaaaggggatgcaattgcaagaagtcgtcgtgtctaaaaaaatactgtgaatgttttcagggcggcgtgggatgctccgtaagttgcagatgcgagggctgtaagaatgcttttggaaaacgggagggagaggagaacatcgaagagacttgggacagctaccagacgtagaggattgtggtatatggatcatgaggaggctaatgattcaatatgcactatgctggcaacga

SEQ ID NO: 214881 - DNA, 2484 bp, Zea Mays
gcgcgccgtccggacgagaaagggcgggaaggagtacctgggagtctgggacaggtcagaggcagctgctgctgcggatggacacgcgacacatccgcagcggctagccaatgagcggcgaccaagggagcaggtagtaggccgtgttctaggctggccttttccatcgcttttctcgccggtattattagcgcggatcgttcatcgttcgggattggggttctgactcggaacctgatcagtgagtgtggtcttctgaaagcgagcaaaggaggatggggttctccttcttcacctcccgagccggtgctcgactgctggacgggatcgcgcgccccggcttctccaccgccgcgcttctgctcacagcggccagtggcggaggccttgtggcgtacgcggattccgctgcagagagcgcgccggacccatctcaggatgctcccaggaagaaggtggtggttcttgggactggctgggctgggacgtcgttcctcaagaacctcgactgctccaggtatgaagtgaaggtcatatcgccccggaactacttcgcgttcactcctctgcttccgagtgtcacgtgtgggactgtcgagccgcgcagcattattgaaccggtacggaggatgtttgagaagaaaaacaaggatgtcacattttgtgaagccgagtgtttcaagattgatgcaaatagaaaaactgtacattgccgttctgctgttggaactaatcttgatgggaatggtgattttatgttggattatgactacttagttgttgctcttggggctactgtaagtacatttaacactcctggagtgctggagcactgctgctttttgaaggaagtagaggatgctcagaagatacggaagggtgtgatagattgttttgaaaaagcatcacttccaaatattagtgaagaagagaaaaggaaaatcctacattttgtagttattggtggtggacctactggagttgaatttgcagcagagatgcatgattttcttgtcgaagatttagtgaaactatatcctgccattcaagacctcgtgaagataacaattattcaatcggcagagcatatattgactatgtttgatgaaagaatagcttcatttgctgaacaaaagttcaagagggatggcatcgaagtgtgcacgggcttcagagtgataaaggtgtctgatgatttgattacaatgaagagaaaatctgatggtgaggagttatcagttccttacggaatggctgtttggtctgctggcattggtactcgtcctgtcgtcatggacttcatgcaacaaattgggcagaccaatcgtcgtgccttggcaactaacgagtggttaagggttcgcgagtgtgaaggcgtctatgcaattggcgactgtgctacagtgagtcaaagaaaaataatggacgatatttcaacagtattcaagatggcagacaaggacaattccggcaccttaacactaaaagagatcaatggtgttttagatgatatatgtataagatacccgcaagtagagctgtatatgaaaagcatgcacatgcttgacattgcggatttaataaaaggcgcagttggcgattctcacaaggagtccatggtggttgacatagaggagttcaagaaggctctgcgccacgttgactcccaggtgaaaaacgctccagcgacggcccaggtcgccgcacagcaagggcagtacctcgcccagtgtttcaacaagatggagaaatgcagagaggagcccgaaggccctctgcgcatggcaggggggtccggccgccacttcttccgcccgtttcgctacaagcacttcgggcagttcgcgcctctgggtggagaacaagccgctgcagagctcccgggcgactgggtctccatgggccacagcacgcagtggctctggtactccgtgtatgccagcaagcaagtgagctggcgcacgcgggtgctggtggtttccgactggactcgccgcttcatattcgggagggactcaagccggatctagctgccaaggattctcttctgcacaggggggggggggggggggttcgttccgtccgaagaataatcggtttcgctgctgctggagcttgagcaagcaaagctgtttccccgcgcctggccctgccggcgaaactgctgttctttcttctgctacatggtagatggctctcaaagcctcacgccggttactttcactgaggttttagctctggtttatttgatgtccataggttttcttcctttgcttgtgatctcaacacatccatcactatgattcatttgtgtgtgatacatattgcaacttcagttaaaatccaaccttttcttaggaacagggctctaaaatccagcgtcctcgtcagccttctctcacattggtcttctagtctcttatcacttttgtgcaatttattgtaaatctagtgtttgtcttacaaaatcaatgtcaatttatg

SEQ ID NO: 214882 - DNA, 1068 bp, Zea Mays
gaaagggcgggaagtggcggaggccttgtggcgtacgcggattccgctgcagagagcgcgccggacccatctcaggatgctcccaggaagaaggtggtggttcttgggactggctgggctgggacgtcgttcctcaagaacctcgactgctccaggtatgaagtgaaggtcatatcgccccggaactacttcgcgttcactcctctgcttccgagtgtcacgtgtgggactgtcgagccgcgcagcattattgaaccgaaaaacaaggatgtcacattttgtgaagccgagtgtttcaagattgatgcaaatagaaaaactgtacattgccgttctgctgttggaactaatcttgatgggaatggtgattttatgttggattatgactacttagttgttgctcttggggctactgtaagtacatttaacactcctggagtgctggagcactgctgctttttgaaggaagtagaggatgctcagaagatacggaagggtgtgatagattgttttgaaaaagcatcacttccaaatattagtgaagaagagaaaaggaaaatcctacattttgtagttattggtggtggacctactggagttgaatttgcagcagagatgcatgattttcttgtcgaagatttagtgaaactatatcctgccattcaagacctcgtgaagataacaattattcaatcggcagagcatatattgactatgtttgatgaaagaatagcttcatttgctgaacaaaagttcaagagggatggcatcgaagtgtgcacgggcttcagagtgataaaggtgtctgatgatttgattacaatgaagagaaaatctgatggtgaggagttatcagttccttacggaatggctgtttggtctgctggcattggtactcgtcctgtcgtcatggacttcatgcaacaaattgggcagaccaatcgtcgtgccttggcaactaacgagtggttaagggttcgcgagtgtgaaggcgtctatgcaattggcgactgtgctacagtgagtcaaagaaaaataatggttttgttgctggataacttcatatgt

SEQ ID NO: 214883 - DNA, 1115 bp, Zea Mays
cggcggaggcggcgcgtacctaggggtggtggtggcgtgcgcggcggggtccgtgtgctacgtgctcgccaaggccgcggccgtgctgccgcgccgcgccgcgggtggcgctcgcgccgtagccgctgccggcggcccggaggccatgctcctcctctccctggcgctcgccgccgcgcacctcgccgtggcgtaccggaccagctgccgcgagcgccgccgaatgctcgtgtacaggatcgacgttgaaggcgccgtgaggttaaaaggaggccatcaaacacccaaagggcccaagcagtagtgtagcgtctgacactccgttcccatcatcacacacgtgcgtaggcgcccgaaagattgatttccattttaggagcaaattttggttgagttgtacgctaagatacatttgttactcgtgtaaactactgtcactgccacaagtgaacatactgtaagtaccaaacggtcgtatgctagctcattatcagcattttattgccccggcctcctgcagctgcgacgcagacgcaggacgagccgtgttggacgcccggtcggcctcctgcagttttttttttttttttttgcgtgcgtgtataggtacaatcgcagctgcagtttacatgtgtcccttctggaaaaacgagacttggacgtgtgtccgaagatactaatcagtagctgcacataataaaacgatgcaggctgtaccgaccccggccggttcagagaaacttcttttttttttcgccgaagaattttcgcttttggaaaggagacacggtcagggtcagtgccgttctaccagacgcctcctaactttttcagaccaagctactccaggacaaaaattagacaagacatctggttctgggaccaggaaccttctcgttcttcttgacgccagaaaccaggagaaacgtcctgcccagctttcgacggaccggtttaagaagtcaataaagggaattcttggttctattattgttccatctacatctgacttgagtgtggcccctcccttgtcaaacatctcaggttcagaaaatgagttcaaagaaagcccaacaaccttttgtgcaggtcaaaatgtgcatatggctgtttaa

SEQ ID NO: 214884 - DNA, 276 bp, Zea Mays
cccatcactctctagaaccctagcgccccgcccgtcctgccgccgccgcagccgccatcgcacggccatgggtatcgatctcgtagccggcggccgcaacaagaagaccaagcgcacggcgcccaagtccggcgatgaaggtctgcgcgctcaggttcactgagacagcgagggccaggatcatcaatgctggcggagagtgcctcaccttcgaccagctcgcgctccgtgccccacttgggcaaaacacggttgtaaacactgaatgctctgtcc

SEQ ID NO: 214885 - DNA, 3146 bp, Zea Mays
cctggtccgagcctccaaccacactccatctcgccgcccaaaacccactctctccaaaaaggcaaaacccctccttcccgcggcggccgccggcgtagccgacgacgccgacgacgaggcagccatggccgcccccgccgcccggagaatagttggcgctgaggttcccatacccggctcggacaagctgcggtggatcgacctcaccatcccctcgtcctccgccgctgcgccggcgagcccctccgatcccttcgtctgcgtgcccccgcgtgctgcctcggggtgccacatcatcccttcgggcgattctcagtattacctctcgtggaggattcacgaggaacacccaaatgtgctggaggtcattgaacttagtccctccaaggagttccctagctttggactgcgtcttgccttccaggaggcgctatctccattcgcctttctatgtgaacgagagggtcgcaggcaaggggagcttgtatatatgctatatgtgcttaccgtttctggagttgctcttttgtgccacctacgcagcccattttcctacgtatctggttcagtgctgcatcaggatgatatagctgagtttaatctccaaactcaagctcagagcgcaaaggttacagcggtaacagcgaagccaggatgtattgtgattggtcggcaagatgggtccatctgttcttacagtcttggcaaattagccccaaactcaccaggtttctcgaatgaactacgagatgatgctgggattggacgtttatggactctcatgtcaagaacaaagactgtgggtcctgtgcaggacatagtagcaactgttgtaaatgaaagggacctgttatttgttcttcatttggatggacacttgcgcatatgggataatcacatgaaacttctcaactataatgtccactcaaatgacattgaaggccatccgtccaggctatgggttggtaaggctgatgatgatcaggagttgatatctttggcgattctgcatcaaaacactgtggttcaaggttgtgattatgttgctgtatatggcttcggtttttctgctgcggaaaggttcatgttctcttctgaaccttcaatttctactatacctttgctagaggggaagcttgcggacttgaaaatagccacatataagctttggatacttaaagaatttggctccatgctctatgaaatattacagtatgacattgacaccgaaactgcaaaatgttgtagtgagaaggtttgctgttatgtgctacaagaagatgctatcagtgaacagttgtttcaaagttctgacaatgcattggatgatttggtttggacagctgattcaatgttctcctccttgaaggaacaggcttttactttgatttcatccatgtttctgcggaggctacttcaaccaggagtaaaccactgttctgccctacgtgaaaccttactagagcataaaaggttcctatcagattctgagttccagtcacttacagcaaatgggctacgaaaagagatattatctattatagaacaagagggaagttcacagacagcaagtgctacagcttatcactggaaacaattctctgcacggtacctccacaattggtgctggcacaataagccctatggattgtttcttgatactacaaatgaagtgtttggtttagtaagaaagggttcattttctctattccgttgtttggagggtctggagatgcttatttatggttatgaccatggggtgaacttactcgacgatgtgtctgattttgaactcctcaatgaggtcctcagatgcatgggcaatatacaccatttgctggggagatcttccacagcagcatattatgaatccttaattagttctattatatcatctgatgaaattgtttcacatatagtaaagattctagagactggttttagtcatcagtcatcctcatccctcagtacattactaggaatggatacttatgtagaaagaaggcaggcagctcacaaaagtcaaaggaagttttctgttgagatgttacgatcttttcatacgttgcaatcaagatcagcatcctggtcggcagtattcgatgtgattgagaagtttatgaagtgtttgaacacaaacatgaacgtacaatcgtatggatcaaagagagtttgtaatgtaaattctgtgttactagttcaagctacttcacaggttgccagaacaatgtttgagtgtgcatttgatctgtttctgttccttagctatctggttggtgttggtgggcaggtttctttgttgcaaaatgatgttgccagaataaaactgaagctgttcccaatgattcaagacatattgggacaatggattgttctccattttgtaggaacctcaccaacctcaccaccaaccattgacgattttagctatcaactttcttctcttcagcttggtaaatcagatgaactgtctttgcacagaaagcttggctgctctgattttacattggcttctttacttgattttccaaaatctcctgaaggggacgttatgtcaccttgttttctcggtccagcggaaataataaatctagtaaggaggtttagtagtttgattatgcatggaggaaattttgaatgtgtacacactttcttgggatgcacaattaatctatcagctgttctcatcagacatagtcagtatgaagctgctcagaatctgctgggaattctggaaacatacttgaacaatggaaaagtatcgcatactggtcaagatgcagacactgcatgttcagcatatcttcatctcaatggattttgccttctgatgattgcacatgatgaagcaaatattattttgagagaatccaaggttcatgatgctatccgatgctttttcagggctgcatccgggtatgaagctccaaaggctttggagaacttttcattggaaacagggtttcaagtttctggggaatctagatctatttctttgtggagacttaactactatgagtgggcaatgcaaatttttgagcaacactccatgagcgagggggcgtaccaatttgctcttgctgcactagaactagttcttctcgacgggatagataatggaattgaagctgagggtctccagagac

SEQ ID NO: 214886 - DNA, 3118 bp, Zea Mays
ctcgccgcccaaaacccactctctccaaaaaggcaaaacccctccttcccgcggcggccgccggcgtagccgacgacgccgacgacgaggcagccatggccgcccccgccgcccggagaatagttggcgctgaggttcccatacccggctcggacaagctgcggtggatcgacctcaccatcccctcgtcctccgccgctgcgccggcgagcccctccgatcccttcgtctgcgtgcccccgcgtgctgcctcggggtgccacatcatcccttcgggcgattctcagtattacctctcgtggaggattcacgaggaacacccaaatgtgctggaggtcattgaacttagtccctccaaggagttccctagctttggactgcgtcttgccttccaggaggcgctatctccattcgcctttctatgtgaacgagagggtcgcaggcaaggggagcttgtatatatgctatatgtgcttaccgtttctggagttgctcttttgtgccacctacgcagcccattttcctacgtatctggttcagtgctgcatcaggatgatatagctgagtttaatctccaaactcaagctcagagcgcaaaggttacagcggtaacagcgaagccaggatgtattgtgattggtcggcaagatgggtccatctgttcttacagtcttggcaaattagccccaaactcaccaggtttctcgaatgaactacgagatgatgctgggattggacgtttatggactctcatgtcaagaacaaagactgtgggtcctgtgcaggacatagtagcaactgttgtaaatgaaagggacctgttatttgttcttcatttggatggacacttgcgcatatgggataatcacatgaaacttctcaactataatgtccactcaaatgacattgaaggccatccgtccaggctatgggttggtaaggctgatgatgatcaggagttgatatctttggcgattctgcatcaaaacactgtggttcaaggttgtgattatgttgctgtatatggcttcggtttttctgctgcggaaaggttcatgttctcttctgaaccttcaatttctactatacctttgctagaggggaagcttgcggacttgaaaatagccacatataagctttggatacttaaagaatttggctccatgctctatgaaatattacagtatgacattgacaccgaaactgcaaaatgttgtagtgagaaggtttgctgttatgtgctacaagaagatgctatcagtgaacagttgtttcaaagttctgacaatgcattggatgatttggtttggacagctgattcaatgttctcctccttgaaggaacaggcttttactttgatttcatccatgtttctgcggaggctacttcaaccaggagtaaaccactgttctgccctacgtgaaaccttactagagcataaaaggttcctatcagattctgagttccagtcacttacagcaaatgggctacgaaaagagatattatctattatagaacaagagggaagttcacagacagcaagtgctacagcttatcactggaaacaattctctgcacggtacctccacaattggtgctggcacaataagccctatggattgtttcttgatactacaaatgaagtgtttggtttagtaagaaagggttcattttctctattccgttgtttggagggtctggagatgcttatttatggttatgaccatggggtgaacttactcgacgatgtgtctgattttgaactcctcaatgaggtcctcagatgcatgggcaatatacaccatttgctggggagatcttccacagcagcatattatgaatccttaattagttctattatatcatctgatgaaattgtttcacatatagtaaagattctagagactggttttagtcatcagtcatcctcatccctcagtacattactaggaatggatacttatgtagaaagaaggcaggcagctcacaaaagtcaaaggaagttttctgttgagatgttacgatcttttcatacgttgcaatcaagatcagcatcctggtcggcagtattcgatgtgattgagaagtttatgaagtgtttgaacacaaacatgaacgtacaatcgtatggatcaaagagagtttgtaatgtaaattctgtgttactagttcaagctacttcacaggttgccagaacaatgtttgagtgtgcatttgatctgtttctgttccttagctatctggttggtgttggtgggcaggtttctttgttgcaaaatgatgttgccagaataaaactgaagctgttcccaatgattcaagacatattgggacaatggattgttctccattttgtaggaacctcaccaacctcaccaccaaccattgacgattttagctatcaactttcttctcttcagcttggtaaatcagatgaactgtctttgcacagaaagcttggctgctctgattttacattggcttctttacttgattttccaaaatctcctgaaggggacgttatgtcaccttgttttctcggtccagcggaaataataaatctagtaaggaggtttagtagtttgattatgcatggaggaaattttgaatgtgtacacactttcttgggatgcacaattaatctatcagctgttctcatcagacatagtcagtatgaagctgctcagaatctgctgggaattctggaaacatacttgaacaatggaaaagtatcgcatactggtcaagatgcagacactgcatgttcagcatatcttcatctcaatggattttgccttctgatgattgcacatgatgaagcaaatattattttgagagaatccaaggttcatgatgctatccgatgctttttcagggctgcatccgggtatgaagctccaaaggctttggagaacttttcattggaaacagggtttcaagtttctgggggaatctagatctatttctttgtggagacttaactactatgagtgggcaatgcaaatttttgagcaacactccatgagcgagggggcgtaccaatttgctcttgctgcactagaactagttcttctcgacgggatagataatggaattgaagctgagggtctccagagac

SEQ ID NO: 214887 - DNA, 3088 bp, Zea Mays
ctcgccgcccaaaacccactctctccaaaaaggcaaaacccctccttcccgcggcggccgccggcgtagccgacgacgccgacgacgaggcagccatggccgcccccgccgcccggagaatagttggcgctgaggttcccatacccggctcggacaagctgcggtggatcgacctcaccatcccctcgtcctccgccgctgcgccggcgagcccctccgatcccttcgtctgcgtgcccccgcgtgctgcctcggggtgccacatcatcccttcgggcgattctcagtattacctctcgtggaggattcacgaggaacacccaaatgtgctggaggtcattgaacttagtccctccaaggagttccctagctttggactgcgtcttgccttccaggaggcgctatctccattcgcctttctatgtgaacgagagggtcgcaggcaaggggagcttgtatatatgctatatgtgcttaccgtttctggagttgctcttttgtgccacctacgcagcccattttcctacgtatctggttcagtgctgcatcaggatgatatagctgagtttaatctccaaactcaagctcagagcgcaaaggttacagcggtaacagcgaagccaggatgtattgtgattggtcggcaagatgggtccatctgttcttacagtcttggcaaattagccccaaactcaccaggtttctcgaatgaactacgagatgatgctgggattggacgtttatggactctcatgtcaagaacaaagactgtgggtcctgtgcaggacatagtagcaactgttgtaaatgaaagggacctgttatttgttcttcatttggatggacacttgcgcatatgggataatcacatgaaacttctcaactataatgtccactcaaatgacattgaaggccatccgtccaggctatgggttggtaaggctgatgatgatcaggagttgatatctttggcgattctgcatcaaaacactgtggttcaaggttgtgattatgttgctgtatatggcttcggtttttctgctgcggaaaggttcatgttctcttctgaaccttcaatttctactatacctttgctagaggggaagcttgcggacttgaaaatagccacatataagctttggatacttaaagaatttggctccatgctctatgaaatattacagtatgacattgacaccgaaactgcaaaatgttgtagtgagaaggtttgctgttatgtgctacaagaagatgctatcagtgaacagttgtttcaaagttctgacaatgcattggatgatttggtttggacagctgattcaatgttctcctccttgaaggaacaggcttttactttgatttcatccatgtttctgcggaggctacttcaaccaggagtaaaccactgttctgccctacgtgaaaccttactagagcataaaaggttcctatcagattctgagttccagtcacttacagcaaatgggctacgaaaagagatattatctattatagaacaagagggaagttcacagacagcaagtgctacagcttatcactggaaacaattctctgcacggtacctccacaattggtgctggcacaataagccctatggattgtttcttgatactacaaatgaagtgtttggtttagtaagaaagggttcattttctctattccgttgtttggagggtctggagatgcttatttatggttatgaccatggggtgaacttactcgacgatgtgtctgattttgaactcctcaatgaggtcctcagatgcatgggcaatatacaccatttgctggggagatcttccacagcagcatattatgaatccttaattagttctattatatcatctgatgaaattgtttcacatatagtaaagattctagagactggttttagtcatcagtcatcctcatccctcagtacattactaggaatggatacttatgtagaaagaaggcaggcagctcacaaaagtcaaaggaagttttctgttgagatgttacgatcttttcatacgttgcaatcaagatcagcatcctggtcggcagtattcgatgtgattgagaagtttatgaagtgtttgaacacaaacatgaacgtacaatcgtatggatcaaagagagtttgtaatgtaaattctgtgttactagttcaagctacttcacaggttgccagaacaatgtttgagtgtgcatttgatctgtttctgttccttagctatctggttggtgttggtgggcagaataaaactgaagctgttcccaatgattcaagacatattgggacaatggattgttctccattttgtaggaacctcaccaacctcaccaccaaccattgacgattttagctatcaactttcttctcttcagcttggtaaatcagatgaactgtctttgcacagaaagcttggctgctctgattttacattggcttctttacttgattttccaaaatctcctgaaggggacgttatgtcaccttgttttctcggtccagcggaaataataaatctagtaaggaggtttagtagtttgattatgcatggaggaaattttgaatgtgtacacactttcttgggatgcacaattaatctatcagctgttctcatcagacatagtcagtatgaagctgctcagaatctgctgggaattctggaaacatacttgaacaatggaaaagtatcgcatactggtcaagatgcagacactgcatgttcagcatatcttcatctcaatggattttgccttctgatgattgcacatgatgaagcaaatattattttgagagaatccaaggttcatgatgctatccgatgctttttcagggctgcatccgggtatgaagctccaaaggctttggagaacttttcattggaaacagggtttcaagtttctggggaatctagatctatttctttgtggagacttaactactatgagtgggcaatgcaaatttttgagcaacactccatgagcgagggggcgtaccaatttgctcttgctgcactagaactagttcttctcgacgggatagataatggaattgaagctgagggtctccagagac

SEQ ID NO: 214888 - DNA, 3590 bp, Zea Mays
ccaaaacccactctctccaaaaaggcaaaacccctccttcccgcggcggccgccggcgtagccgacgacgccgacgacgaggcagccatggccgcccccgccgcccggagaatagttggcgctgaggttcccatacccggctcggacaagctgcggtggatcgacctcaccatcccctcgtcctccgccgctgcgccggcgagcccctccgatcccttcgtctgcgtgcccccgcgtgctgcctcggggtgccacatcatcccttcgggcgattctcagtattacctctcgtggaggattcacgaggaacacccaaatgtgctggaggtcattgaacttagtccctccaaggagttccctagctttggactgcgtcttgccttccaggaggcgctatctccattcgcctttctatgtgaacgagagggtcgcaggcaaggggagcttgtatatatgctatatgtgcttaccgtttctggagttgctcttttgtgccacctacgcagcccattttcctacgtatctggttcagtgctgcatcaggatgatatagctgagtttaatctccaaactcaagctcagagcgcaaaggttacagcggtaacagcgaagccaggatgtattgtgattggtcggcaagatgggtccatctgttcttacagtcttggcaaattagccccaaactcaccaggtttctcgaatgaactacgagatgatgctgggattggacgtttatggactctcatgtcaagaacaaagactgtgggtcctgtgcaggacatagtagcaactgttgtaaatgaaagggacctgttatttgttcttcatttggatggacacttgcgcatatgggataatcacatgaaacttctcaactataatgtccactcaaatgacattgaaggccatccgtccaggctatgggttggtaaggctgatgatgatcaggagttgatatctttggcgattctgcatcaaaacactgtggttcaaggttgtgattatgttgctgtatatggcttcggtttttctgctgcggaaaggttcatgttctcttctgaaccttcaatttctactatacctttgctagaggggaagcttgcggacttgaaaatagccacatataagctttggatacttaaagaatttggctccatgctctatgaaatattacagtatgacattgacaccgaaactgcaaaatgttgtagtgagaaggtttgctgttatgtgctacaagaagatgctatcagtgaacagttgtttcaaagttctgacaatgcattggatgatttggtttggacagctgattcaatgttctcctccttgaaggaacaggcttttactttgatttcatccatgtttctgcggaggctacttcaaccaggagtaaaccactgttctgccctacgtgaaaccttactagagcataaaaggttcctatcagattctgagttccagtcacttacagcaaatgggctacgaaaagagatattatctattatagaacaagagggaagttcacagacagcaagtgctacagcttatcactggaaacaattctctgcacggtacctccacaattggtgctggcacaataagccctatggattgtttcttgatactacaaatgaagtgtttggtttagtaagaaagggttcattttctctattccgttgtttggagggtctggagatgcttatttatggttatgaccatggggtgaacttactcgacgatgtgtctgattttgaactcctcaatgaggtcctcagatgcatgggcaatatacaccatttgctggggagatcttccacagcagcatattatgaatccttaattagttctattatatcatctgatgaaattgtttcacatatagtaaagattctagagactggttttagtcatcagtcatcctcatccctcagtacattactaggaatggatacttatgtagaaagaaggcaggcagctcacaaaagtcaaaggaagttttctgttgagatgttacgatcttttcatacgttgcaatcaagatcagcatcctggtcggcagtattcgatgtgattgagaagtttatgaagtgtttgaacacaaacatgaacgtacaatcgtatggatcaaagagagtttgtaatgtaaattctgtgttactagttcaagctacttcacaggttgccagaacaatgtttgagtgtgcatttgatctgtttctgttccttagctatctggttggtgttggtgggcaggtacgctataacttttgatttttgctatttctttctgctgtgtactggaacttcaactttgcttcttcgaccatgtactcatatagcttaaggtacacacttttaagctttcatgagcatgcttgctttgtctcatctgtaacttacaatggttagaactctcaagaactttggctattactgggattttgggttgctgagccaatcttatccacatactatacggctaactaccaagaattgctatgatcttaaaatcatgcagatgaatatttgtttacaatttacatgtgcttttagaacaccattgtaacaccaaggcctgtgggctcaaattgtcaattccatatacaaaatattaagcggcaatgcctgtttttttaatcttgtaccccttgcttctagtttgaaaagtgcaagatacatttattcttcaatatctttttgtttatttctttgataataataatttgtgaatcaggtttctttgttgcaaaatgatgttgccagaataaaactgaagctgttcccaatgattcaagacatattgggacaatggattgttctccattttgtaggaacctcaccaacctcaccaccaaccattgacgattttagctatcaactttcttctcttcagcttggtaaatcagatgaactgtctttgcacagaaagcttggctgctctgattttacattggcttctttacttgattttccaaaatctcctgaaggggacgttatgtcaccttgttttctcggtccagcggaaataataaatctagtaaggaggtttagtagtttgattatgcatggaggaaattttgaatgtgtacacactttcttgggatgcacaattaatctatcagctgttctcatcagacatagtcagtatgaagctgctcagaatctgctgggaattctggaaacatacttgaacaatggaaaagtatcgcatactggtcaagatgcagacactgcatgttcagcatatcttcatctcaatggattttgccttctgatgattgcacatgatgaagcaaatattattttgagagaatccaaggttcatgatgctatccgatgctttttcagggctgcatccgggtatgaagctccaaaggctttggagaacttttcattggaaacagggtttcaagtttctggggaatctagatctatttctttgtggagacttaactactatgagtgggcaatgcaaatttttgagcaacactccatgagcgagggggcgtaccaatttgctcttgctgcactagaactagttcttctcgacgggatagataatggaattgaagctgagggtctccagagac

SEQ ID NO: 214889 - DNA, 3055 bp, Zea Mays
ggccgccggcgtagccgacgacgccgacgacgaggcagccatggccgcccccgccgcccggagaatagttggcgctgaggttcccatacccggctcggacaagctgcggtggatcgacctcaccatcccctcgtcctccgccgctgcgccggcgagcccctccgatcccttcgtctgcgtgcccccgcgtgctgcctcggggtgccacatcatcccttcgggcgattctcagtattacctctcgtggaggattcacgaggaacacccaaatgtgctggaggtcattgaacttagtccctccaaggagttccctagctttggactgcgtcttgccttccaggaggcgctatctccattcgcctttctatgtgaacgagagggtcgcaggcaaggggagcttgtatatatgctatatgtgcttaccgtttctggagttgctcttttgtgccacctacgcagcccattttcctacgtatctggttcagtgctgcatcaggatgatatagctgagtttaatctccaaactcaagctcagagcgcaaaggttacagcggtaacagcgaagccaggatgtattgtgattggtcggcaagatgggtccatctgttcttacagtcttggcaaattagccccaaactcaccaggtttctcgaatgaactacgagatgatgctgggattggacgtttatggactctcatgtcaagaacaaagactgtgggtcctgtgcaggacatagtagcaactgttgtaaatgaaagggacctgttatttgttcttcatttggatggacacttgcgcatatgggataatcacatgaaacttctcaactataatgtccactcaaatgacattgaaggccatccgtccaggctatgggttggtaaggctgatgatgatcaggagttgatatctttggcgattctgcatcaaaacactgtggttgtgattatgttgctgtatatggcttcggtttttctgctgcggaaaggttcatgttctcttctgaaccttcaatttctactatacctttgctagaggggaagcttgcggacttgaaaatagccacatataagctttggatacttaaagaatttggctccatgctctatgaaatattacagtatgacattgacaccgaaactgcaaaatgttgtagtgagaaggtttgctgttatgtgctacaagaagatgctatcagtgaacagttgtttcaaagttctgacaatgcattggatgatttggtttggacagctgattcaatgttctcctccttgaaggaacaggcttttactttgatttcatccatgtttctgcggaggctacttcaaccaggagtaaaccactgttctgccctacgtgaaaccttactagagcataaaaggttcctatcagattctgagttccagtcacttacagcaaatgggctacgaaaagagatattatctattatagaacaagagggaagttcacagacagcaagtgctacagcttatcactggaaacaattctctgcacggtacctccacaattggtgctggcacaataagccctatggattgtttcttgatactacaaatgaagtgtttggtttagtaagaaagggttcattttctctattccgttgtttggagggtctggagatgcttatttatggttatgaccatggggtgaacttactcgacgatgtgtctgattttgaactcctcaatgaggtcctcagatgcatgggcaatatacaccatttgctggggagatcttccacagcagcatattatgaatccttaattagttctattatatcatctgatgaaattgtttcacatatagtaaagattctagagactggttttagtcatcagtcatcctcatccctcagtacattactaggaatggatacttatgtagaaagaaggcaggcagctcacaaaagtcaaaggaagttttctgttgagatgttacgatcttttcatacgttgcaatcaagatcagcatcctggtcggcagtattcgatgtgattgagaagtttatgaagtgtttgaacacaaacatgaacgtacaatcgtatggatcaaagagagtttgtaatgtaaattctgtgttactagttcaagctacttcacaggttgccagaacaatgtttgagtgtgcatttgatctgtttctgttccttagctatctggttggtgttggtgggcaggtttctttgttgcaaaatgatgttgccagaataaaactgaagctgttcccaatgattcaagacatattgggacaatggattgttctccattttgtaggaacctcaccaacctcaccaccaaccattgacgattttagctatcaactttcttctcttcagcttggtaaatcagatgaactgtctttgcacagaaagcttggctgctctgattttacattggcttctttacttgattttccaaaatctcctgaaggggacgttatgtcaccttgttttctcggtccagcggaaataataaatctagtaaggaggtttagtagtttgattatgcatggaggaaattttgaatgtgtacacactttcttgggatgcacaattaatctatcagctgttctcatcagacatagtcagtatgaagctgctcagaatctgctgggaattctggaaacatacttgaacaatggaaaagtatcgcatactggtcaagatgcagacactgcatgttcagcatatcttcatctcaatggattttgccttctgatgattgcacatgatgaagcaaatattattttgagagaatccaaggttcatgatgctatccgatgctttttcagggctgcatccgggtatgaagctccaaaggctttggagaacttttcattggaaacagggtttcaagtttctggggaatctagatctatttctttgtggagacttaactactatgagtgggcaatgcaaatttttgagcaacactccatgagcgagggggcgtaccaatttgctcttgctgcactagaactagttcttctcgacgggatagataatggaattgaagctgagggtctccagagac

SEQ ID NO: 214890 - DNA, 3048 bp, Zea Mays
gcgtagccgacgacgccgacgacgaggcagccatggccgcccccgccgcccggagaatagttggcgctgaggttcccatacccggctcggacaagctgcggtggatcgacctcaccatcccctcgtcctccgccgctgcgccggcgagcccctccgatcccttcgtctgcgtgcccccgcgtgctgcctcggggtgccacatcatcccttcgggcgattctcagtattacctctcgtggaggattcacgaggaacacccaaatgtgctggaggtcattgaacttagtccctccaaggagttccctagctttggactgcgtcttgccttccaggaggcgctatctccattcgcctttctatgtgaacgagagggtcgcaggcaaggggagcttgtatatatgctatatgtgcttaccgtttctggagttgctcttttgtgccacctacgcagcccattttcctacgtatctggttcagtgctgcatcaggatgatatagctgagtttaatctccaaactcaagctcagagcgcaaaggttacagcggtaacagcgaagccaggatgtattgtgattggtcggcaagatgggtccatctgttcttacagtcttggcaaattagccccaaactcaccaggtttctcgaatgaactacgagatgatgctgggattggacgtttatggactctcatgtcaagaacaaagactgtgggtcctgtgcaggacatagtagcaactgttgtaaatgaaagggacctgttatttgttcttcatttggatggacacttgcgcatatgggataatcacatgaaacttctcaactataatgtccactcaaatgacattgaaggccatccgtccaggctatgggttggtaaggctgatgatgatcaggagttgatatctttggcgattctgcatcaaaacactgtggttcaaggttgtgattatgttgctgtatatggcttcggtttttctgctgcggaaaggttcatgttctcttctgaaccttcaatttctactatacctttgctagaggggaagcttgcggacttgaaaatagccacatataagctttggatacttaaagaatttggctccatgctctatgaaatattacagtatgacattgacaccgaaactgcaaaatgttgtagtgagaaggtttgctgttatgtgctacaagaagatgctatcagtgaacagttgtttcaaagttctgacaatgcattggatgatttggtttggacagctgattcaatgttctcctccttgaaggcttttactttgatttcatccatgtttctgcggaggctacttcaaccaggagtaaaccactgttctgccctacgtgaaaccttactagagcataaaaggttcctatcagattctgagttccagtcacttacagcaaatgggctacgaaaagagatattatctattatagaacaagagggaagttcacagacagcaagtgctacagcttatcactggaaacaattctctgcacggtacctccacaattggtgctggcacaataagccctatggattgtttcttgatactacaaatgaagtgtttggtttagtaagaaagggttcattttctctattccgttgtttggagggtctggagatgcttatttatggttatgaccatggggtgaacttactcgacgatgtgtctgattttgaactcctcaatgaggtcctcagatgcatgggcaatatacaccatttgctggggagatcttccacagcagcatattatgaatccttaattagttctattatatcatctgatgaaattgtttcacatatagtaaagattctagagactggttttagtcatcagtcatcctcatccctcagtacattactaggaatggatacttatgtagaaagaaggcaggcagctcacaaaagtcaaaggaagttttctgttgagatgttacgatcttttcatacgttgcaatcaagatcagcatcctggtcggcagtattcgatgtgattgagaagtttatgaagtgtttgaacacaaacatgaacgtacaatcgtatggatcaaagagagtttgtaatgtaaattctgtgttactagttcaagctacttcacaggttgccagaacaatgtttgagtgtgcatttgatctgtttctgttccttagctatctggttggtgttggtgggcaggtttctttgttgcaaaatgatgttgccagaataaaactgaagctgttcccaatgattcaagacatattgggacaatggattgttctccattttgtaggaacctcaccaacctcaccaccaaccattgacgattttagctatcaactttcttctcttcagcttggtaaatcagatgaactgtctttgcacagaaagcttggctgctctgattttacattggcttctttacttgattttccaaaatctcctgaaggggacgttatgtcaccttgttttctcggtccagcggaaataataaatctagtaaggaggtttagtagtttgattatgcatggaggaaattttgaatgtgtacacactttcttgggatgcacaattaatctatcagctgttctcatcagacatagtcagtatgaagctgctcagaatctgctgggaattctggaaacatacttgaacaatggaaaagtatcgcatactggtcaagatgcagacactgcatgttcagcatatcttcatctcaatggattttgccttctgatgattgcacatgatgaagcaaatattattttgagagaatccaaggttcatgatgctatccgatgctttttcagggctgcatccgggtatgaagctccaaaggctttggagaacttttcattggaaacagggtttcaagtttctggggaatctagatctatttctttgtggagacttaactactatgagtgggcaatgcaaatttttgagcaacactccatgagcgagggggcgtaccaatttgctcttgctgcactagaactagttcttctcgacgggatagataatggaattgaagctgagggtctccagagac

SEQ ID NO: 214891 - DNA, 2972 bp, Zea Mays
ccgacctcctccctcactcttttgacaagtcaccatggccgcggtgcgcgatcagggtttgcagtgcgctggtccgtagcctagccgccacactcttgcgcgcttggcaagctaggcttcacgctgccgttgcgacggccgacggcgccgcttcccagagacgatggagcgaggacggggtggtagtggcggtcgcggtggcggccgcacgtttcagaggaacaatgcgggggaggagtggcccaacctcgtcggcgtggtgctgtcgtggagcctagcggatgtcatgaacaaggacctcttcaaggacaaggtcaagcagataccgtccacgttccccaacctcaagagctacctggagtgctacacctctccattgctggaggagctgagagctgagatgtcgtccagcctggaatccctgtcaaccgtgccttctgtcaggatctcacggatagaagaaaagagagacaaacacgaaatttatctggcttctgattgccaggttgctaagccacacaatcgccctgaatgctacactccaagtgtcggtgatatgcggatggaggggatgaatacgacgactcaccaccggctaagtatggcatcgtagcgtcaggcaaaatcgatgccgccgatgacgaacgccaagatggtaaaagtacctcactttttgctgcttgtctgctcaacattgtgacatacatccggatatggcgttgccttgattatgaagcactcagaacaaaccgaggccttatagagaagatggtaaactatcagccgatttcatctacttcagagaacagcacggaggatgctggtccaactgacagcgtggagatatggaccaagttgtctgcaatggaacttaacacttctcagaacgatgctgtcttgaactgcatttccaaaatgcactccaagagcagcacatttacccttatctggggtcctcctggcacagggaagacaaaaacaatcagtgtgctgctttggttaatgagagaaatgaagcatggtacgctcgtatgcgcaccaacaaaccttgccatcaaacaggttgcttcacgtttcttgaagctggtccaagagcactctggcgacacaaggtgcttgggagatgtcctattgattggcaacaaagagcgcatgtgtgttgatggtgacctcaaacaaatatatttatatgaccgtgtaaggaggctttttggctgctttgcaccattgaccggatggaaacatcacctatcttccctgtctgattttcttgagaatggctactcacagtacctccaacatctacaagacagtcaggaaggtattttggggatgaaattaggaaagttttcttgtacagtaatgatgaacctgatcagacaaactcgagtgtagtcactcttggcaaaatgaggataaaatgccttgaggaactgagcactctgttaagttgcttgaagcttcctctaacatcctcaaagcctaccattcgtgatttctgcattaaaagcgcttccatagttttctgtactgtatctagctccacaaaaataaccgctaacaaaaaggtagagtttcttgtggttgatgaggctgcccagctgaaagaatgtgaaacactgatccctttgcgtctgtggaccttaaagcatgctgttctaattggtgatgagtgccaattaccagcaacagtcaaaagcaaggtttgcactgatgcattatttggaagaagcctctttgaaaggttgagttcacttggacacgaaaagcatctacttaatatgcaatacagaatgcatccttccattagtattttcccgaacactagcttttatgaagggaggatctcagatgccactaatgtcatggaaaaagaacaccgaaggatgtatcttccaggttctatgtttggtccttactcatttataaatattgaagatggaagggaggaacgtgatgaacttggccatagcaaaagaaactttgtagaagctgctgtcattgaagaaatattataccgtctccgaagagcttgctttaaaaccaaaaggaaagtcacggttggtgtcatatgcccatacaatgctcaagttgtagcaatccaagggaaaatagagaaaatgaggttcgacccattgcaagtaaaaactaattctgtcgatggctttcaaggtggtgaagaagacatcatcattttatcaactgtgaggtcaaactcggttgggaaggtaggttttctttcaaacgcacagcgggcaaatgtgtgtttgacacgggcaagacattgcctttggatcctaggaaatgcaacaactctagcaagcagtggatctatttggtctgatctagttcgtgatgcaaaggataggcggtgtttcttcaatgccagtagcgactatgttatctctcacgtgattgctaagcaaaggagagatctcgacagagttaatgttgaaaagagcatccatatctcaagttccaaaaactgcagggtttgggttgaaacgcgatccccaaatgacctgaatgaacagggcacttcttcgacgagtgtttcacattacgctggaatcccgtcaagtgacattgttgttgtttctgaattccagcgtccaagcaataaaaatgaggatgtcgaggatataactgtcattccaaataaagagaatgataaggatatcaatgctatgcccgttattccagataaagggaatgtcgttgatggcaaccatatcctcgccattccttgcgccatgttgagtaatctagctagatggtgtatccgttcgttccgatcttaattgttcctttatgtctcctatccctttttactcctaagtttacagcattatatataagtgtctctccataacatggtcggatgtttgatttttgtaatgtgggtttgaataatgaaaatgtatgtttgggcctttttagcctcccttgactgttgagagaaaaaaaagcta

SEQ ID NO: 214892 - DNA, 2198 bp, Zea Mays
atggagattggagaccttgtccaggaaccttcaaattcctcccctggccctatctctccatccgcgcgctctgctctccctgcccgcaccccgcagatcccgaatggccatgcctaccgccgcctgcaggtcggggccggatgcactgcaagctgcggccccgagcaccgggctgaactgaagaggtgtcgaggtcgccattaatcctcaacaaccagctgccaccaacgctatatgctcaccatcgccagcaacttggtggcatctgatggctggggtttataaatggaaactggcatcttataaacagatggaacgtacgaaagttgcatcagagaggttgtcattaagatctaatagcaccaagcatcacgatactgtacatcttggtcttggtcattttgggaaggatggcaatctcatttgtcgttcacttaagtcaatattaaaaccaaaggcaagacagtatgctattgtcaaggtacataataaagatgttgacgagggttgcagctccaaagacaatgagattatttctagtccatctgataggaaagaaggaagtcagctgagggcactggaatcttatttttctaaattcaatccctctcagcagttatactctttgcctcagaagaagcacaaaagtggtccatcatcgtcaaatgaagttgatgcaatcattgctgatgaggatgctaatttgaagaacagggcagactctttgcaggtatcaagagtaatcaaaatactcccaacgaggtttacaaggagtacttgatatttgatgaaaaaagtctcctggacatgcatacagatgatcaagcgtctggtttctgtttgacaaacttattggctggtgttaatattgcagttctgttatttgaaatagcaagtccagtgaaaaattctgaaaatgaatatttatccctccctttgttgtatggtgccaagataaacaacttaatactttcaggggagtggtggagactactaacaccaatgtgcctgcactctggtttcttacatatagcccttggttgttgggcattgcttatatttggacctcgagtatgcagggcatatggtcaaaggacattttttctgatatacatacttggaggaatctgtggtaatttgagcagttttgttcacactcctgagataaccgtttgtggcacaggcccagtattttctttaattggagcatggctggtatatcagggtcaaaacaagcaagtcattgacaaggacgtttcagaaagtatgttctggcaggctgtgatagctgcagctttgagcttcttattgagcatttttgggagaattgacaactgggcacatcttggggcgaccatttctggaattttctttggttatctgacatgcccaagtgtagaatttgacaattctgcaaagaacggtcaaaaggaagccgtggctcttattaggcaacaagctcatccatgcaaatccgctgcagtctttttcataaccatacttgcgtttgctgtactcgccttcgcttatgggacacaattcaacaatatggatctggaataggcaaatagctaagtgttgtcatggttcacttcatatatatatatatgcatgcatgtagcccgacagctatatattccggaatgtgaatgagcccgagatgtaagaaaacgttgtacactatagatcagttctatgcgtaaccaggttggaatttttccattccgtatcatgtatacactacaatagtgaatagtctagtacagttggtttttggattggctagagcttatcagtgtctgtaagcaggtgaagccacggacggcataactatttgtacactcggtttgcataagaaccgactgcacatctgcatttgcaccgtcggttgcaagttgtgatagactcggcgggaagttttatgtaatataaaataaagtataggtgaagtacatgtttttagtataaatttttatcctgtaattttatagttattgaattttatgactaagagttggtaatcgtgctagtagtgttttatcttggatcactgcatatgtccccttgatgcagtttttggttgtaatccgagcggtttgagttcgtttgaggaaaccccaatacaaaatcttagttttgtctgtattttcagatatgtgattgatttataaatctgattgagttcaaaatttgtgtag

SEQ ID NO: 214893 - DNA, 2266 bp, Zea Mays
cgcagcatccttatcccctcgcttaactccaaccccgtggtccatggagattggagaccttgtccaggaaccttcaaattcctcccctggccctatctctccatccgcgcgctctgctctccctgcccgcaccccgcagatcccgaatggccatgcctaccgccgcctgcaggtcggggccggatgcactgcaagctgcggccccgagcaccgggctgaactgaagaggtgtcgaggtcgccattaatcctcaacaaccagctgccaccaacgctatatgctcaccatcgccagcaacttggtggcatctgatggctggggtttataaatggaaactggcatcttataaacagatggaacgtacgaaagttgcatcagagaggttgtcattaagatctaatagcaccaagcatcacgatactgtacatcttggtcttggtcattttgggaaggatggcaatctcatttgtcgttcacttaagtcaatattaaaaccaaaggcaagacagtatgctattgtcaaggtacataataaagatgttgacgagggttgcagctccaaagacaatgagattatttctagtccatctgataggaaagaaggaagtcagctgagggcactggaatcttatttttctaaattcaatccctctcagcagttatactctttgcctcagaagaagcacaaaagtggtccatcatcgtcaaatgaagttgatgcaatcattgctgatgaggatgctaatttgaagaacagggcagactctttgcaggtacagattgacagaggacacacaggtatcaagagtaatcaaaatactcccaacgaggtttacaaggagtacttgatatttgatgaaaaaagtctcctggacatgcatacagatgatcaagcgtctggtttctgtttgacaaacttattggctggtgttaatattgcagttctgttatttgaaatagcaagtccagtgaaaaattctgaaaatgaatatttatccctccctttgttgtatggtgccaagataaacaacttaatactttcaggggagtggtggagactactaacaccaatgtgcctgcactctggtttcttacatatagcccttggttgttgggcattgcttatatttggacctcgagtatgcagggcatatggtcaaaggacattttttctgatatacatacttggaggaatctgtggtaatttgagcagttttgttcacactcctgagataaccgtttgtggcacaggcccagtattttctttaattggagcatggctggtatatcagggtcaaaacaagcaagtcattgacaaggacgtttcagaaagtatgttctggcaggctgtgatagctgcagctttgagcttcttattgagcatttttgggagaattgacaactgggcacatcttggggcgaccatttctggaattttctttggttatctgacatgcccaagtgtagaatttgacaattctgcaaagaacggtcaaaaggaagccgtggctcttattaggcaacaagctcatccatgcaaatccgctgcagtctttttcataaccatacttgcgtttgctgtactcgccttcgcttatgggacacaattcaacaatatggatctggaataggcaaatagctaagtgttgtcatggttcacttcatatatatatatatgcatgcatgtagcccgacagctatatattccggaatgtgaatgagcccgagatgtaagaaaacgttgtacactatagatcagttctatgcgtaaccaggttggaatttttccattccgtatcatgtatacactacaatagtgaatagtctagtacagttggtttttggattggctagagcttatcagtgtctgtaagcaggtgaagccacggacggcataactatttgtacactcggtttgcataagaaccgactgcacatctgcatttgcaccgtcggttgcaagttgtgatagactcggcgggaagttttatgtaatataaaataaagtataggtgaagtacatgtttttagtataaatttttatcctgtaattttatagttattgaattttatgactaagagttggtaatcgtgctagtagtgttttatcttggatcactgcatatgtccccttgatgcagtttttggttgtaatccgagcggtttgagttcgtttgaggaaaccccaatacaaaatcttagttttgtctgtattttcagatatgtgattgatttataaatctgattgagttcaaaatttgtgtag

SEQ ID NO: 214894 - DNA, 2198 bp, Zea Mays
cgcagcatccttatcccctcgcttaactccaaccccgtggtccatggagattggagaccttgtccaggaaccttcaaattcctcccctggccctatctctccatccgcgcgctctgctctccctgcccgcaccccgcagatcccgaatggccatgcctaccgccgcctgcaggtcggggccggatgcactgcaagctgcggccccgagcaccgggctgaactgaagaggtgtcgaggtcgccattaatcctcaacaaccagctgccaccaacgctatatgctcaccatcgccagcaacttggtggcatctgatggctggggtttataaatggaaactggcatcttataaacagatggaacgtacgaaagttgcatcagagaggttgtcattaagatctaatagcaccaagcatcacgatactgtacatcttggtcttggtcattttgggaaggatggcaatctcatttgtcgttcacttaagtcaatattaaaaccaaaggcaagacagtatgctattgtcaaggtacataataaagatgttgacgagggttgcagctccaaagacaatgagattatttctagtccatctgataggaaagaaggaagtcagctgagggcactggaatcttatttttctaaattcaatccctctcagcagttatactctttgcctcagaagaagcacaaaagtggtccatcatcgtcaaatgaagttgatgcaatcattgctgatgaggatgctaatttgaagaacagggcagactctttgcaggtacagattgacagaggacacacaggtatcaagagtaatcaaaatactcccaacgaggtttacaaggagtacttgatatttgatgaaaaaagtctcctggacatgcatacagatgatcaagcgtctggtttctgtttgacaaacttattggctggtgttaatattgcagttctgttatttgaaatagcaagtccagtgaaaaattctgaaaatgaatatttatccctccctttgttgtatggtgccaagataaacaacttaatactttcaggggagtggtggagactactaacaccaatgtgcctgggcatatggtcaaaggacattttttctgatatacatacttggaggaatctgtggtaatttgagcagttttgttcacactcctgagataaccgtttgtggcacaggcccagtattttctttaattggagcatggctggtatatcagggtcaaaacaagcaagtcattgacaaggacgtttcagaaagtatgttctggcaggctgtgatagctgcagctttgagcttcttattgagcatttttgggagaattgacaactgggcacatcttggggcgaccatttctggaattttctttggttatctgacatgcccaagtgtagaatttgacaattctgcaaagaacggtcaaaaggaagccgtggctcttattaggcaacaagctcatccatgcaaatccgctgcagtctttttcataaccatacttgcgtttgctgtactcgccttcgcttatgggacacaattcaacaatatggatctggaataggcaaatagctaagtgttgtcatggttcacttcatatatatatatatgcatgcatgtagcccgacagctatatattccggaatgtgaatgagcccgagatgtaagaaaacgttgtacactatagatcagttctatgcgtaaccaggttggaatttttccattccgtatcatgtatacactacaatagtgaatagtctagtacagttggtttttggattggctagagcttatcagtgtctgtaagcaggtgaagccacggacggcataactatttgtacactcggtttgcataagaaccgactgcacatctgcatttgcaccgtcggttgcaagttgtgatagactcggcgggaagttttatgtaatataaaataaagtataggtgaagtacatgtttttagtataaatttttatcctgtaattttatagttattgaattttatgactaagagttggtaatcgtgctagtagtgttttatcttggatcactgcatatgtccccttgatgcagtttttggttgtaatccgagcggtttgagttcgtttgaggaaaccccaatacaaaatcttagttttgtctgtattttcagatatgtgattgatttataaatctgattgagttcaaaatttgtgtag

SEQ ID NO: 214895 - DNA, 3117 bp, Zea Mays
cggcctccgacttcggaggtctgacggccgcagcatccttatcccctcgcttaactccaaccccgtggtccatggagattggagaccttgtccaggaaccttcaaattcctcccctggccctatctctccatccgcgcgctctgctctccctgcccgcaccccgcagatcccgaatggccatgcctaccgccgcctgcaggtcggggccggatgcactgcaagctgcggccccgagcaccgggctgaactgaagaggcatctgatggctggggtttataaatggaaactggcatcttataaacagatggaacgtacgaaagttgcatcagagaggttgtcattaagatctaatagcaccaagcatcacgatactgtacatcttggtcttggtcattttgggaaggatggcaatctcatttgtcgttcacttaagtcaatattaaaaccaaaggcaagacagtatgctattgtcaaggtacataataaagatgttgacgagggttgcagctccaaagacaatgagattatttctagtccatctgataggaaagaaggaagtcagctgagggcactggaatcttatttttctaaattcaatccctctcagcagttatactctttgcctcagaagaagcacaaaagtggtccatcatcgtcaaatgaagttgatgcaatcattgctgatgaggatgctaatttgaagaacagggcagactctttgcaggtacagattgacagaggacacacaggtaaagtcacttgacttaccagtatggatgtgtcaccaccaaaacttattaatttaaaagaactatgttacttaggtatcaagagtaatcaaaatactcccaacgaggtttacaaggagtacttgatatttgatgaaaaaagtctcctggacatgcatacagatgatcaagcgtctggtttctgtttgacgtaagtatgtcttaccacttccagtacaagttggaactgccagattgggcatgtaattcctttattatttggtgatattcagaaatatagtttcgttatcatagatacggtgattctagtaccaccatctcctgctattgatattaatgtggaattcatgtgaagaacagaaaatggatatatttgtcacctcctgttttatgtgaacaatgatttctcacatcaaagttacaggaaaacaaaacttgtttaactgtgggcttttccttttatttagataacagaagaaagttgtagccttcatgaaagtgacattagtccaaattatgacaagatatgattagcactaccaaatccacaaccacatgtgcaaaaaaaacatcggataggagttgaacactattcctcaattctaaagataaaaagacatcaatgagaggcaaaaaaaaattgcataacgggagaatccagattacggcaagcgtaaatcaactgctccttctgtttgtcacatattcacattgctacaactttgcccccagtatgggagtatgggactagcaaaaaagattttgaactcgctagcttctgctttaaaaaggtttcaatatccaatttctcatttcccaactttctctagtattgacattgtcctaaaaatttgggcaagtttttaaaattgtgatattagtaaaaaataacaacttgcaatggccataaaactgggacaacaaaactgggagaaaacgcccagttaaaaagatcaaaccacactgtccaatgcaccagcttatttgcgtcccttgttcttttgcacacttcagcataagtaataaatattttcatattgccacgttttcttcgctaactcttgaattgtgtaaaaatgcagaaacttattggctggtgttaatattgcagttctgttatttgaaatagcaagtccagtgaaaaattctgaaaatgaatatttatccctccctttgttgtatggtgccaagataaacaacttaatactttcaggggagtggtggagactactaacaccaatgtgcctgggcatatggtcaaaggacattttttctgatatacatacttggaggaatctgtggtaatttgagcagttttgttcacactcctgagataaccgtttgtggcacaggcccagtattttctttaattggagcatggctggtatatcagggtcaaaacaagcaagtcattgacaaggacgtttcagaaagtatgttctggcaggctgtgatagctgcagctttgagcttcttattgagcatttttgggagaattgacaactgggcacatcttggggcgaccatttctggaattttctttggttatctgacatgcccaagtgtagaatttgacaattctgcaaagaacggtcaaaaggaagccgtggctcttattaggcaacaagctcatccatgcaaatccgctgcagtctttttcataaccatacttgcgtttgctgtactcgccttcgcttatgggacacaattcaacaatatggatctggaataggcaaatagctaagtgttgtcatggttcacttcatatatatatatatgcatgcatgtagcccgacagctatatattccggaatgtgaatgagcccgagatgtaagaaaacgttgtacactatagatcagttctatgcgtaaccaggttggaatttttccattccgtatcatgtatacactacaatagtgaatagtctagtacagttggtttttggattggctagagcttatcagtgtctgtaagcaggtgaagccacggacggcataactatttgtacactcggtttgcataagaaccgactgcacatctgcatttgcaccgtcggttgcaagttgtgatagactcggcgggaagttttatgtaatataaaataaagtataggtgaagtacatgtttttagtataaatttttatcctgtaattttatagttattgaattttatgactaagagttggtaatcgtgctagtagtgttttatcttggatcactgcatatgtccccttgatgcagtttttggttgtaatccgagcggtttgagttcgtttgaggaaaccccaatacaaaatcttagttttgtctgtattttcagatatgtgattgatttataaatctgattgagttcaaaatttgtgtag

SEQ ID NO: 214896 - DNA, 759 bp, Zea Mays
ggaagatcaaccttgctaaagcaggctagaccgggtttgcaacccagctagattagaactaacttatcactgtcacctgatgagagctggttacctgtcgctagcatctttatctgcattctacatattcagctagaagcaagcatcaggagtggtgatatcgagagtttcaagttcatccaaagagcttggaacctcgtctttcctagagctgctaaagagaaggatgcccaccatggaaacaagagagactcaatcggaatgggcgacagacacaataggaggataccgacggcgcatgaatccagggagaggcttcgcaattcagatatcttcaagaggaaacttgatgatcccaacgatgagaagcaaaagaagtcagattggaactgaggctcaaaaggctctttttctcctgcattttcctgaaactacaaaaaatggtatttggggtggggtgaggggtgcatttgtagggagcccacaggtgaaactgaaatggagatgtggctgtctgcggtttcaaatgggtctgaatcgtcagatttttcttctggttccaaacagtagatcttaggtatagctagatttttacattttagtgcgcacaaataacttgtcagccaaagctaatgggacatatcacatatggcgactttgaggcttgtgaagctccgttgtgtactcgtaagaatgaaatcattttgctgtctactcgtatgaatgaaaacatgtttgtttttagtttcactgttcgtg

SEQ ID NO: 214897 - DNA, 826 bp, Zea Mays
ctggagaagaaaaaacacatgagattctgggcaaacttgaagaacctacctccagtgcaaatctaatttcaacaccagctgttgagaaggtttttttcgagcttaaaacaagctgtactgaccttcacagtgttgtgggggatctgcttccagctgcaaaggcagttgtagatgatatattggctgcaaggatggagaaaggcgttagtttgaaagctgaagaagtaagaggtcaacgaacaacttgtggcactgcaggcccatgtgctcttaacgataaagacaggggttcaagtataggtaaaacctcgcagccttatgaattggaacccaacagcacagacctttcagtgggaggagtcaggtcctgagtgttcagaatcatcgttacgtagaccgcccttgccgatagtaccagtttctcctttggcaccacgagtaaagaagaatgggcgtaggaaggcaaggaggtggtgcttgttagaagaagaaacactaagaaagggtgttgaacagtatggtaggggcaattggaaggaaattttagataacaatcctgatgtttttatcggcagaacaccggtggacttgaaggataagtggaggaatatgattatccgataatgtaatggagaaatatgtaggtgtcaagttactagaaccctgaccagcgttggaaacgagccagctcggctcgcccattgcacgagctcaagaatgaggctcggctcggctcgaagctggctcgtgagctggcgagcgctcacgagccgcaccgtaataaatattattgcattataacataattaaaaatatataaatgtgg

SEQ ID NO: 214898 - DNA, 361 bp, Zea Mays
gctgcttataaaagcaaaaaaaatctactcctaggtcggtcaagactcaagaccagggcggcggccgcgttccattctgcgcaaggcgacgactgcggttgggaagggaagacgcctacaaacccctctctacctctcctctgcgaaccacctgccgccggaagccctagagggctcgacccatggatccgccgcagcagccggagcctgtcacctacgtctgcggagattgcggagctgagaacaccgtgaagctagtagacgtcgtccagtgccgtgaatgtggccaccgcatcctctacaagaagcggacccgccggaaggccgtcctctgttgtggtggtgttgacgataaagtgca

SEQ ID NO: 214899 - DNA, 3011 bp, Zea Mays
cggtttgtgttgctatgcgcctttgcgtacagtttggaatttttaggtcgaatgggcttttggtgattgaatttacttctgaaacccacatgcagtagtgatacagaggaacacctgaaccacaaatggtgccgtcggttccttgtccaagtggcctgtgactgtgaggctgtgaccagagataagcagccacagcccacagctccccctggccggtggccgccactccacgctccacgacattcaccaccaccacggcaccaccctgtcccttcagctccaacgtgcatgagagacgccactcgcggtacccacgcggcggcagaggcgctggcggcccgtcgtccgcgccgagcaatggcgtccccactgctctgcggctgcgccctcctcctctacctacttggccacctcgcgacctgccacgccgccagggacaccatcacgccgagcagcccgctggcggccaacgagacgctggtctcgggcggcgacggcaacttcgcgctgggcttcttcaccccgccgggcgccaacagcacgtacctcggcgtgtggtacaacaaggtctccctccgcactgtggtgtgggtggccaaccgcgaggccccgatcgcgggcgccgtcggggacaacccgggcgccacgctgtcggtctccggcggcggcacgctggccattgccgcggggaacgggaccgtggtgtggtccgtccggagcgcgtccagcaggcggctggcgagcccggccgcccagatcctcgacaacggcaacctggtgctgaaagacggtgccggcggcggcggcgccgtggcgtgggaggggttcgactacccgacggacacgctgctcccggagatgaagctggggatcgactacgtgaaggggaagaaccggacgctgacgtcgtggaagagcccgtcggacccgtccacgggccccgtcgccatggtgatggacaccacgggcgacccgcaggtgttcatctggaacggcggcgagaaggtctggcgctccggcccctgggacggcgtccagttcaccggcgtgcccgacaccgccacctactccggcttcaccttcagcttcataaacagcgcgcaggaagtaacgtacagcttccaggtgcataacgcgtcgatcatctcgcatctgggcgtcgtgagctcgggcaactacggcctgctgcagcgttcgacgtgggtggaggcggcgcgggcgtggaacctgtactggtacgctcccaaggaccagtgcgacgcggtgtcgccgtgcggcgccaacggcgtgtgcgacaccaacaacatgccggtgtgctcctgcctgcgcggcttcacacccaggacccccgcggcgtgggcgctgcgggacgggcgcgacggctgcgtgcggtcgacgccgctggactgccgccgtaacggcaccaccagcaccaccgacgggttcgtcgcggtgcggcacgccaaggtgcccgacacggagcgcagcgcggtggactggagcctgacgctggagcagtgccggcaggcgtgcctccgcaactgctcctgcacggcgtacgcgagcgccaacgtcagcagcggcggcggcgggcgcggcggcggcgccggcggagggtcgggctgcgtcatgtggaccacgggactcaccgacctgcgcgtgtaccccgacttcgggcaggacctcttcgtccgcctcgccgcctctgatctcgatgtgctggaaggcagatcaagggcggcacgcattagaatcgcggttggtgtcagcgtctcgctgctggcgcttcttctagcggttgctggcctcctcatctggttaagaaagagaaggctaacgagaacagccggatccagcaaatggagcggctcacgcagcaccggccgtcggtacgaggggagcagccatggtgacgatctggagctgccaatatttgatctgggcacaattgcagccgctacggatggtttctccatcaacaacaagcttggcgagggtggctttggaccagtatacaagggtaaactcgaggatggaatggagatcgcagtgaaaacactctcgaagacatccgcacaaggtcttgacgagttcaagaacgaggttttgctgatagccaagctccagcaccggaatcttgttcgccttctcggatgcagcattagcggacaggaaaggatgcttgtttacgagtacatggcaaacaagagcctggacttcttcctgtttgagaaagacactgtggtgcttgactggcaagtgcggtatcgtataatagaaggcatcactcgaggtttactctacctccaccaggactcgaggtacagaatcatccatagagatctgaaggcggccaatgttctcctagacaaggagatgactcccaagatttcagactttggcatggcaagaatatttggcaacgaagagacggaaattaacaccttaaaagtggttggcacatatggttacatgtctccggagtacgcaatggatgggatcttctctgtcaagtcggacgtgttcagctatggagtactattgctggagatcgttagtggcaggaggaacaggggagtgtattccagttcaaacaaccaaagccttctaggccatgcatggagcttgtggaacgaggagaagagcatagagctagcagatgagagaatgaacggacaattcaactcagacgaagtgcagaagtgcgtcagggttgggctactgtgcgtgcaagagaatccagacgaccgtccgctgatgtctcagctaggagagttctaatggaaacagacacatcatcgaccaagcccgactgcagcgtgtttgacagtgcgacaaccatcatgcttgaaggtcgatagaaaacatgactaacacaccttgttgaaactgaaactagtcgaaaaatttgtattctagactaaatttcgtggcatcttcagtatcttgtatgattaggcagcaaaaaattatatgaatattagataatagtagtaggtagaatcttcgtt

SEQ ID NO: 214900 - DNA, 322 bp, Zea Mays
ccttccccaggttggaagggacacgagcggatccgagcgaagcgaccgcgcgtccgcgccctccgtcgccaccaccatccgctccgccgccactccatcgtcgtccacattgctgccatccgctctgccgctgctccatcgtcgtccttccccgaagcagtcgtgagcgagacgtgaggcgacggtgccctccaccactgccaccgtctcggatttgtcgtccttcaccgccatctctgcctcagtttgctgtcctccactaccgtcttccgcggcactataggaagttgctggtttcagtttggggcacagttttttggat

SEQ ID NO: 214901 - DNA, 4149 bp, Zea Mays
acgccgcccagctcgtgagcgagagccgaaaggttcgaggcctactacgggctcatcgctaacgacggcacccagttcacgttcctcacgaacaaagacgctccaaggtacaagctggcgagggtggacgtcgacgacgacgagcccgggtcgccgtggtggaccgacgtggttcccgaggacgaggacgggaaggcggtcctggagtcggcgtgcgccgtccacggccacaagctgctggtgagctacctgtcggatgtcaggtgcgtcctgcagatgaggagcctggtcactggggagctgcttcacgacatacccgtcgacatcggcactgtcagcgggatctccggcagacgatgcgacgccgaggtgttcgtcgagttcgcgagcttccttacccccgggatcatctacaggtgcgatgtcggctctgcggtcccggagatggacgtgtacagagagatctcggttccaggattcgatcgaaacgagtttgaagcgaagcaggtgttttatccgagtaaggatgggaccaagatcccaatgttcatcgtatccaagaaggagatcagcctggacggatcgcacccggcactactgttcggctacggcggcttcggcgtgagcgtgacgccgcagttcagcgtcgcccgcgtggtcctgatgaggaacctggggttcgtggcgtgcgtcgccaacctcaggggcggcggggagtacggcgagggctggcacagggccgggtcgctcgccaacaagcagaactgcttcgacgacttcgtcgccgccggcgagttcctcgtgtccgctggctacaccagcccggcgaggctgtgcgtcgagggcggcagcaacgggggcctcctggtagctgcctgcgtgaaccagcgccctgatctgtttggctgtgccctggcccatgtcggagtgatggacatgctacggttccacaagttcaccataggtcgtgcatggacatgcgacttcgggtgttcggagaacgaggaagagttccagtggcttatcaagtactcccccctgcacaacgtgcggcggccgtgggagaacaaacgggcggccgcagctgccaacggcgacgcaagctgccggggcttaggcggccagtaccctgcaaccatgctgctgacggcggaccacgacgaccgcgtggtgccgtcgcacacgctcaaattcctcgcgacgatgcagcacgtcctgcgccccggcgcggatggcagcccgcagacgaaccccgtcgtcgcccggatcgagcgcaagagcggccactgctgcggccgctccacgcagaagatcatcgacgaggctgcggatcggtacgcattcgccgcgaagatgatgggagtctcttggatggactgactgagtaacccaccaaatgagtactgcgcatttggctcaggctgttaggttacaatgtatcggtgctgtattgtaagcggccaggctggcaacttggcgtgacacatgtttggttctgcttctggtttggaaaattagaagctgaactaaaagggcttcttttctgcgactactttaaaaaaaacagcttttctttagtgtaaatttgagaccttgttattgatacttacgaagtttgttatattaatgcacagtaaattgaaactagattagaatttaaataattaagtgttataataaacgagatatttttaataaaatattattacaaatataattaaaaattgatttatttgtaaaaatatcagaaacacaaattgattcatctattttctagagtctagtacataaacaaaacttttttttaaagtgttgatcttttatctctactactctatatgtccttattgtaggcgtgcacacccgtgttctgcctctcgacgcctgtctgcccgcgccccccgcttgtgatgcccatctcgtctccccgctgtggcagccgccttcgcgtccgccgcgagatccctccgcgcacgggcgcgtcccccacaaaccgcgctccgtgaaatccgcactcccctcgccgcctccccagcccgcagcctctcctcaacctccctccccaaggagctggcggcggcgcgactgcgtcgggagaggacgcagaggacgccgcgcgggggctgcggcaggagctcgactccgagcaggcctccccggagatggcagccagatccggctattgagccccctaaccgagcggatccaagatagttttttttgtctccagttgctctacacagcaagtctatgaggaaggagcaaaagaagttgctctttcagttgtcagcggaattaatttaactcaagcatacttgcctatggcaaacaagcagtggacttacacaatgatcgaaatgacagactgttcgtgctatcggtttggaaagaacatgtggaaagctaatctcggatcttgcttccttcaggtacagacaacccttgtttttataggagttgtcagagaattgttttcgtgattaaacatgtgtgtttgtttagtggctggtattgttatcatatacccttgtttttagttctatacatattccttaagcatgagcaaattgggggcatttttagtgaagcaattactggtatgtacatgcaattactggtatgtacatggttaatcaaataatttgcatcatggatgttgttttagtgattaatcactcagaaccgatttcctgatgaactggatacactgtttagtgccagctattatttaagcacaagaagtagtcatatacccttgtttttatgtctgtacataccacctggaaatttacacatggggccattttttagtgaagcaattactaaacctgtatagttctggtggctgctataatttttcctgattaatcagagaattgttttagtgattaaccatgtgtgtttagtggctggtattgttgtcatataccttgtttttaggtctgtacatactacctgagcatgaccacatcagccttatgtttgaacaatttcacacatttacatttgtgaatgtgttgaccgtaagcatcatctttatttaaatcagaaacttggttttacaatgatgtctcattgaagttcttgcttttccttgtttgcaaatctgaaatacccttgtatgttctggcggaaagaagacccaaaggaccttgaacagcaaaatctaaggtttcaacattgcagacacacaagagtccagcatgcgccaacgctcctgcaggttagtccgagatggcccttcattttcctgtttcaatagataaaaaaactgaggtcgcattaaaaaactgaagtctattcaacaaatcaccaaccatgatttttctgaggcacatgggtacaatcagcacaaactccatttgccaagaaaaggttataatgcattcacaccaataaatgttcgtttcacaagacataagcaaagaacattgaggtcgcattatctaaccttttggtgattgcagttgatgcttcttccagtagtttgtgacagattgctcaaagaaaagcaagacagctcgccaatcctagaagtggaaaaaaacaacatagaataattagccagctacagggagtaaaccattaagagaagaaacatcgtaatgccatgtttccaaatgggcacaaagaaacttcaagcacctctagacggaagctgtctgcactgaagatcaggacacgaatatcgcgagctttatcaaggctcgccttgtgcggaaggtgtatttctgtgagatctccaagatgaagcattagggggtcaatcgccccagattttacatgtagctaacttagtagggcacccataatccataatttattctctgtagttgtagcagcgacctagaggtgttattctgtagcacattgtgtaacatgtaggagagagataaacacatatccccattctttctactgaaacaccagaaatagttgctcttgctccataattcattaatgtgaacttctgaagccatgccaaggtcttatattgatcctctgttgtcatattgataaaaatagggtatgtaaaaccttttctcataacagtttaacacatattttatatataagttatcgtaatattacatgtttccgttgcaacgcacgggcactcacctagtgtcataataagtattggatgtt

SEQ ID NO: 214902 - DNA, 2849 bp, Zea Mays
cccatttatttttcctgctcacagacttgcgttggccgttggcgaacaaagcgaattgtcatagtgacataatttattgtcaggaacctttattttatctttatacatcgtacatgttttctctccctgtctctagtactgtcgacatttttaaaattgcgcaatttttttaagaacggggaagaatgcccggagcgctctataaaacctgggggatcagaggaggaggacgtaggtatcgtgtcggtgtgcagtgtgttgtcatctccatctccagctccagcgccgccttgctctgtgtgcttccgcccgctctgtgttgctattgctaaactagtgtgttctgtcgctatgggctccctggccaccgcggacgggccgttgccgccgctcaagtaccctcaggctcgccgggacgaagacatcgtcgacgactaccacggcgtcctcgtgccggacccttacagatggtggattcgaaggaggtgaaggagttcgtggacgcgcaggcggccgtgaccagcgccgtgctgtccagctgcgaccaccgcgggcgcctgcgcgggcagctcaccgcgctcttcgaccacccgcgcttccgcgcgcccttcaagcgccggggcagctacttctacttccacaacccgggcctccgcccgcacagcgcgctctacgtgcagcacgggctgggcggcgagcccgacgtgctgctggaccccagcacgttcagcgaggacggcacggtgtcgctcggcgtggtcggcgtgagcgacgacggcgagcacctggcctacggcaccagcggcagcggcagcgactgggtcaccatcagggtcatgcgcgtgcgcgacaaggagcacctgcccgatacgctgtcctgggtgaaattctcgcgcatcgcgtggactcgtgacggccaagggttcttctactcgcgttttccggctccaagggatgcgctggattctgggatgaagactggcgtcaatctcaaccacgaagtctactatcatttccttggaacagagcagtcacaggacgtgttgtgctggagagaccctgatcatcccaagtacatatacatccctcaagtcacagaagacggcaagtacgtgatcctttcggtctcagaaacgtcagagccggtgaacaagctgtactactgcgacctgtcggctctcgctcacgggctgggcggcgtgaagagcgcccatggcaacggcatgctccccttcgtcaagctcgtggacaggttcgaggcctactacgggctcatcgctaacgacggcacccagttcacgttcctcacgaacaaagacgctccaaggtacaagctggcgagggtggacgtcgacgacgacgagcccgggtcgccgtggtggaccgacgtggttcccgaggacgaggacgggaaggcggtcctggagtcggcgtgcgccgtccacggccacaagctgctggtgagctacctgtcggatgtcaggtgcgtcctgcagatgaggagcctggtcactggggagctgcttcacgacatacccgtcgacatcggcactgtcagcgggatctccggcagacgatgcgacgccgaggtgttcgtcgagttcgcgagcttccttacccccgggatcatctacaggtgcgatgtcggctctgcggtcccggagatggacgtgtacagagagatctcggttccaggattcgatcgaaacgagtttgaagcgaagcaggtgttttatccgagtaaggatgggaccaagatcccaatgttcatcgtatccaagaaggagatcagcctggacggatcgcacccggcactactgttcggctacggcggcttcggcgtgagcgtgacgccgcagttcagcgtcgcccgcgtggtcctgatgaggaacctggggttcgtggcgtgcgtcgccaacctcaggggcggcggggagtacggcgagggctggcacagggccgggtcgctcgccaacaagcagaactgcttcgacgacttcgtcgccgccggcgagttcctcgtgtccgctggctacaccagcccggcgaggctgtgcgtcgagggcggcagcaacgggggcctcctggtagctgcctgcgtgaaccagcgccctgatctgtttggctgtgccctggcccatgtcggagtgatggacatgctacggttccacaagttcaccataggtcgtgcatggacatgcgacttcgggtgttcggagaacgaggaagagttccagtggcttatcaagtactcccccctgcacaacgtgcggcggccgtgggagaacaaacgggcggccgcagctgccaacggcgacgcaagctgccggggcttaggcggccagtaccctgcaaccatgctgctgacggcggaccacgacgaccgcgtggtgccgtcgcacacgctcaaattcctcgcgacgatgcagcacgtcctgcgccccggcgcggatggcagcccgcagacgaaccccgtcgtcgcccggatcgagcgcaagagcggccactgctgcggccgctccacgcagaagatcatcgacgaggctgcggatcggtacgcattcgccgcgaagatgatgggagtctcttggatggactgactgagtaacccaccaaatgagtactgcgcatttggctcaggctgttaggttacaatgtatcggtgctgtattgtaagcggccaggctggcaacttggcgtgacacatgtttggttctgcttctggtttggaaaattagaagctgaactaaaagggcttcttttctgcgactactttaaaaaaaacagcttttctttagtgtaaatttgagaccttgttattgatacttacgaagtttgttatattaatg

SEQ ID NO: 214903 - DNA, 804 bp, Zea Mays
atgttgtacactgtgcaaggtgcagggtccattggtggaaaaccattgttggagcttaatagagtactgaggcctggaggatatttcatttggtctgcaacccctgtctaccgtcaagagcaaagagaccaagatgactggaatgcaatggttactctgactaaatcaatctgctggagaacagtggtaaagtctcaagatgtcaatggaattggagttgttatatatcaaaagccagtatcgaattcttgctatgctgaaagaaagaccaatgagccccctctatgctccgagagagatggatcacactttccttggtatgctcctcttgatagttgtcttttcacaactgccattaccacttcagatgaaggatataattggcctgttccatggcctgaaagacttgatgttagtgtacctgatgattctgcttctaacaaagagaagtttgaagctgatacaaaataccttgccacttattttcaacagaggtttgattggagctctcatgactggtgcagatctttcagcacctaccctcgtacctatgatcttctccacatgagtaatctcattggaaatcttacaaacaggtgtgacctcatcgacgtggtggttgaaatcgacagaatactgagacctggaagatggtttgtgttgaaagacacgttagagatgataaagaagatacgcccaatcctgaagtccagacactatgaaactgtcatcgtgaaacatcaatttcttgtggctacaaagagtttctggcgtcctggcaaaccagcttccacatcagggtga

SEQ ID NO: 214904 - DNA, 1117 bp, Zea Mays
tctctccctaccttgaattggggacgtgccgttgctgcatctttcgttctctctcctctctgcaggggaagggggagaaacagaccaccagatcgatcgagacctcgccgtcgtccggcagggttaatttggttcttctccggccgggtgtgcatggcaaaacgacccacggtgcccaagttcggcacctgggacagcggcgatgccgggtacacggcctacttcgacaaggtgcgcgagaacaagggcgccacggcgccgccgctgcgccggccgcgcagccccaacgaccccgaccccgaccgcgagcccgagccagaggaggggccaatgaggagagtccccccgccgtcgtcgtcgaggccggcgaccgcaggaggccaccgcgagccgccgccgccggggcggcgccacgggcagagccaccggcgaacggagagcagcggcagcgcgccgtccgaccgccagagcaagttcgcgccgccgccgcagtactaccagcaacagcaacgcgcgagcccgcagcagcagccccgtcatcaccacggcggcggcggcggccaccagcagcagcaccccccgtccgcgcacgggcacggccacggccacggccaccgagctccgcacgcgcacaggcagcaccacgcggcgccggggccacgggcgcggtccgcctcgccgcagagcaacgccccgcgggcgtcggccgtgcccaggttcggcgtgtgggacgagcagaccgcttcgtcggccgcgcaggggttcacggtgcagttcgagaacgtgaagcggaaccgggaggtggccaggtccggggtgccggctgtgccgcgcgtgccgtcgccgccggagggcgccgcgctgaggcgcgcccatcagaagacccctttcgtgtccaagatgtttggatgtttccttcccaccactgcaaaaggctgacaacgatgcacgtatatatgtatatgtatatctaatcttcgcacacgcatctcgttccccgtgaaagaggaacacggtgatggagcgggagatctcactactatatatataaatatatattgatcggttcatgcacatgtatatataatgacctctgcaattatgcacatacgtactg

SEQ ID NO: 214905 - DNA, 1905 bp, Zea Mays
attcaatcacactttcccgtgctcatgcttctgagagaaaacaatagccgataagtaagcctgttctataagttagtgtcgttccttacaacgcatgcatgcagtgatgaagctagaaacccagtgtcattcagaggccatccctgcagaagtttcagttctagtgccggaaatcatagttctcaacagatcgatcgatcgagatggctcagaaggatctctatctaccgttcctggctctttccatcattgcctgctgcttgatgaacctgcaaactgttctcagctcaagcagcaggatgcggaattctacagacgatattagtgatgacaaatgccccccacaacctcatcccttaggtatgtgcaggtcccgagtagcagcttacggctatccatgtgaggaataccatgtgacaacggaggatggctacatccttagcttaaagaggatcccctatggtctctctggtgccaccgagatgacgaggacaccagtactactgttccatgggctactggtggatggtttctgctgggtactgagcacaccaaaacaatcactgggcttcatcttggctgatggtgggtttgatgtttggatcgccaactctcgcggaacagagtccagccgcaggcacaccaccctctccccacaagacccggccttttgggactggacatgggaccagcttgctgactatgatcttcctgctgtgcttgagttcgtctataacagaacaggaggcatgaaagtccactacgttggtcactccctggggaccttgattattcttgcggccttctcggagaacaggttaacagacattgtgcgatcagccgcgttgctctgcccaatcgcttatctcaacagcatggaatcgaggctcatcctgctcgccactcgcatcttcctcgcagaaacgattcacatgctaggttatcacgagttcaaccctgttgggtgggtttgcagggcatctcttctacagcttcttgtgtttgtttccgtactgctagctaggaagaagaagaacacagattacatgccgtagcatcgctgcctttcatctctctctcaaccctagcaagttagtcaactgctgcaaaacgtacgttcttctgcatggcaggccagtggcaaaggaagtgttgggaaaagtctgcgtcgacccagaggtcgattgctatgatttgttttcagctgtagcaggtaacagtgctacctagctgctaataatgctttaatttgtcagtgatcatactaactgtcgttttttacgacatggatttggtctcctgacgggattggaggaccggactgctgcctcaacacctcgaccacatgcatcttcttgcagcacggtccacagtcaagctccatcaagaacatgatccacatgtcgcagcgaaagagacgatcaggaagtacgactacggaagcgagaaggagaacacgaagcgctacaaccagacgcggcccccaacctacaacctctcgtccatcccaagccacgtccccctcttcctcacccacggcggccaggacttcctcggcgacgtcgccgacaccaggcacctcctgcggacgctgctcagccagcacgacagcgacgacatcgaggtgctgtacatgcctgactacgcgcacggcgacttcatcatgggctacaacgccccgcagctcatatacaagcccatggtggagtttttcaagcgccactgagaacttgctagcaataagctgctgctgctatatgcagcaacaactgtttcatatagccgatttgattggtgtattattgccgtaagtaagtaaaaaaaaaaagagaacttcatgggttgtgactcttgaaattgtgaaaaggcaaccactgggttctgaaacaccaaaatttggccgaa

SEQ ID NO: 214906 - DNA, 1250 bp, Zea Mays
cgtgctcatgcttctgagagaaaacaatagccgataagtaagcctgttctataagttagtgtcgttccttacaacgcatgcatgcagtgatgaagctagaaacccagtgtcattcagaggccatccctgcagaagtttcagttctagtgccggaaatcatagttctcaacagatcgatcgatcgagatggctcagaaggatctctatctaccgttcctggctctttccatcattgcctgctgcttgatgaacctgcaaactgttctcagctcaagcagcaggatgcggaattctacagacgatattagtgatgacaaatgccccccacaacctcatcccttaggtatgtgcaggtcccgagtagcagcttacggctatccatgtgaggaataccatgtgacaacggaggatggctacatccttagcttaaagaggatcccctatggtctctctggtgccaccgagatgacgaggacaccagtactactgttccatgggctactggtggatggtttctgctgggtactgagcacaccaaaacaatcactgggcttcatcttggctgatggtgggtttgatgtttggatcgccaactctcgcggaacagagtccagccgcaggcacaccaccctctccccacaagacccggccttttgggactggacatgggaccagcttgctgactatgatcttcctgctgtgcttgagttcgtctataacagaacaggaggcatgaaagtccactacgttggtcactccctggggaccttgattattcttgcggccttctcggagaacaggttaacagacattgtgcgatcagccgcgttgctctgcccaatcgcttatctcaacagcatggaatcgaggctcatcctgctcgccactcgcatcttcctcgcagaaacgattcacatgctaggttatcacgagttcaaccctgttgggccagtggcaaaggaagtgttgggaaaagtctgcgtcgacccagaggtcgattgctatgatttgttttcagctgtagcaggtaacagtgctacctagctgctaataatgctttaatttgtcagtgatcatactaactgtcgttttttacgacatggatttggtctcctgacgggattggaggaccggactgctgcctcaacacctcgaccacatgcatcttcttgcagcacggtccacagtcaagctccatcaagaacatgatccacatgtcgcagcgaacgaaggaatctgttccccagttg

SEQ ID NO: 214907 - DNA, 621 bp, Zea Mays
gtcacactaaccctcaccttcgacctcaaggactctccgattttctagcagaccatcaaggaagcgaagaacataatactttcctccacaagctaccacaggtgcagagccaagcagtgggcatgctacaatctgctgaaggagcacagggacattcaggttctctaccatgatgatggagtgaaagacaacccctctacaaatggcagcaaagagcaacagggaagaaggccaacactggattgcaaacgggctcagttcgctatgaaggatactggaagcaaaaatgacctgctcaacttcacaatagctggtaggctccttgcgcagagtgcggcactctatgggttatatagtgcagggcacatctctaacagcagttatgaactgatggagagacttcttaaggttttcatatatcatgatggagaacaaacctattttccattccccagagttgaaaggttctatgtgtctcagggatcgtttatgaaattggagacaaaccagaattttgttgtgatcaaattgttagtgctcgtgcatgtgctgattgaaactgaaacaactgttggcggtgatgatatgatgttaagatttaccctagagacagcttgttaa

SEQ ID NO: 214908 - DNA, 1456 bp, Zea Mays
atgcgcagctacagcgaatggcatgcgcggtgggtggagagagcgaccgagcgcggttggttcctgggcaggatcgtggccacggttcgggtagcatgcagattacgcccaagagagaaaataggaagtgagatccatatgactgccccgctccctacccgcaccgcatgcctagccgccgcgaaactcccgcgcgccgcagccgccgcgaaacccccgtgccccgtgatcccgcgcgcgaggcgtggcgacaccgctcaacccggctacacgcaggaggagttcgagttctacctctccgactcgaagccgtgcctcctcgtcaccaacgcggatggcaacgtggcggcacaggcggccgctgccaagctcaggctcgcccacgccgccaccagcctccacgacgcggtcgaccctgtccacctcgccggcctcccggtcccggctctgcagaacgggtctcacgtcggtggcgtggcgggctctctctcccccggcgctatcgcgctcgcctactccctctacgccacatctgctgcgagaccctcggcgcgctccttgaccccagtgacatcgccttcctcaccaatcgcgccactgcctacctccacatgggcaaggtctctcccggttcgtgttcccactcttcgttcccacatgaggcaacgaaccatggtgctctccaactatctccatggcaagggatgctttcgtcggcccagtatggagattgagtatggtctctgcgctgtctccctggaccacgaggctgtcaagacatggatctatccaactaatgtagaaggccgagagtaccagaagtatatggttgaaaaggctatgtttaccaatacgttaatagctttgccaactggacttggcaaaacttttattgctgcggtagtgatgtacaactactttcgatggtttcccgaaggaaaaataatatttacctgcccttcacgtcctcttgttactcagcaaattgaggcatgtcacaatacagtgggaataccacagagtctgcaacatgaccatttaattctatactttcacttctctaaaacgtcaaatattcttcatatgatattttcctatccgagggaggctctgaaagcctatattcagaccatcaaggaagcgaagaacataatactttcctccacaagctaccacaggtgcagagccaagcagtgggcatgctacaatctgctgaaggagcacagggacattcaggttctctaccatgatgatggagtgaaagacaacccctctacaaatggcagcaaagagcaacagggaagaaggccaacactggattgcaaacgggctcagttcgctatgaaggatactggaagaaaccgaggagtagatcaaatggctaaatggagaggtagaaaaacgcatattgaattttgatcctgtagatgaacccattagacagcctggttttgcg

SEQ ID NO: 214909 - DNA, 1847 bp, Zea Mays
cgccgtcttgttgctccgctccggccgtgacacgagcgcaccagccaccgccagcccctcccccgtcgactcgagccacaggacaaggcatcccaaccgccgcccatctcctatcgtcatctgccgatccctcctcggttcctcacagtcacagagcctcacgtcacgtgtacctcccccaacccaacccagcccaacccagcccaaaacctagcgggcgaggggccggggaaccgaccgccggacgcggagatggaccacgcggcggaggcgcagcggacggacctgatgacgatcacgcggcacgtgctcaacgagcagagccgccacccggagtcccgcggcgacttcaccatcctcctctcccacatcgtcctcggctgcaagttcgtcgccgccgcggtcaacaaggccggcctcgccaagctcatcggcctcgccggagagaccaacgtccaggagccaccccaaaaaaaaaatacagggcgaggagcaaaagaagctggatgtactgtccaacgaggtcttcgtgaaggcgctcgtcagcagcggccgcacctgtgtcctcgtgtctgaagagaacgaggaggccatcttcgtcgacccggccctccgcgggaagttcgtcaatcctttgctcctccatcccgacctcgtaaaagttccgcaacgccgtactgtcgctttccctgatcgcgtgttagttctctctctctctctgttcaggtactgcgtctgtttcgacccgctggatggctcctccaacatcgactgtggtgtctcaatcggaacggtgtgtcactgtcactcccgatctttgggatttacatggtcaaagacaaggacaacgtgaccttggaggatgtgctgcagcctggaacaaacatgcttgctgctggctactgcatgtacgggagttcatgcacgcttgtgctgagcactgggaacggagtcaatggcttcactctcgatccttcccttggagagttcattttgactcatccaaatatcaagataccaaggaaagggaagatctattcagtcaacgaagggaacgccaaaaactgggatgggcctacagccaaattcgtggagaaatgcaagtatcctgaggatggttcaccgcctagatccttgagatatatcggaagtatggttgctgatgtccatcgcaccttactatacgggggcatatttttgtacccagcagaccagaagagtccaaacgggaaactacgcgttctgtatgaagtcttcccgatgtcattcctgatggaacaagctggaggccaggctttcacaggcaaacaacgggcgcttgaacttgctcccgctaaacttcacgacagatccccagtgttcctcgggagctacgatgacgttgaggagatcaaagcactgtacgcttcaatgtcaaacagcggttgacctttctgcctgaggaaacgagcgagatcaaaagcaccgtacgcttcagagtcaactgcttgatctttatagattgtaataaaataataaaagagtttgtaaaaaaaaacaacaacactgcttgatctttctgcatgaggataaaaagcgcatagtttccccggttggatatatccatcagatatttattatgttgttgccttctacacaaatttaacgtgctttcgtgattccttaatgcaactttggattcatgtacggagggagtttatgtgaagacatattacttggtgcagtttatctccaacaaaatacaaaaaaaagaaccttgtgcagttatacttcagtcttaatgtcgtgttcatcggatttgtgacgctccaaagcatagtcgttgcagatccttgattcgaactcag

SEQ ID NO: 214910 - DNA, 2412 bp, Zea Mays
caacaacttgccaattcgcaccgcgggaccggcgccgtcttgttgctccgctccggccgtgacacgagcgcaccagccaccgccagcccctcccccgtcgactcgagccacaggacaaggcatcccaaccgccgcccatctcctatcgtcatctgccgatccctcctcggttcctcacagtcacagagcctcacgtcacgtgtacctcccccaacccaacccagcccaacccagcccaaaacctagcgggcgaggggccggggaaccgaccgccggacgcggagatggaccacgcggcggaggcgcagcggacggacctgatgacgatcacgcggcacgtgctcaacgagcagagccgccacccggagtcccgcggcgacttcaccatcctcctctcccacatcgtcctcggctgcaagttcgtcgccgccgcggtcaacaaggccggcctcgccaagctcatcggcctcgccggagagaccaacgtccaggcaagcacggcaccaccacacacacactgactcgcccgccccgacgatcaccatccactccgcgcctttcgtgcgtactctgctgaattactgagcccccccctgacggtgggcccggggcttatcacagatggacctcttcctagctgcatgctgcatctttttagctgaacggaacctactaccatgcatcgaatccatcgatcactatgctctctaacgcaagaatagactgctcttgctcttcaatcaacagttcaacacacgcacgcacgatccaaacgatattcgtctatctggcacagtttttttctctcttcagtttacctgctctagctgctcgtcgttgacattcaggagccaccccaaaaaaaaaatacagggcgaggagcaaaagaagctggatgtactgtccaacgaggtcttcgtgaaggcgctcgtcagcagcggccgcacctgtgtcctcgtgtctgaagagaacgaggaggccatcttcgtcgacccggccctccgcgggaagtactgcgtctgtttcgacccgctggatggctcctccaacatcgactgtggtgtctcaatcggaacgatctttgggatttacatggtcaaagacaaggacaacgtgaccttggaggatgtgctgcagcctggaacaaacatgcttgctgctggctactgcatgtacgggagttcatgcacgcttgtgctgagcactgggaacggagtcaatggcttcactctcgatccttcccttggagagttcattttgactcatccaaatatcaagataccaaggaaagggaagatctattcagtcaacgaagggaacgccaaaaactgggatgggcctacagccaagtacgacgagctagggggctcgtttctgtccaaaaactactactgtgatttcgtaacaagccaggctgaattttatgccgtttcagattcgtggagaaatgcaagtatcctgaggatggttcaccgcctagatccttgagatatatcggaaggtgatccattgctcgttctcgactgtgtataccggtgtctcacagtttgctttcttctgcggtcatgaattgaatgtgtctgaagttttattaagaataatagtgcttgctcaagctattggtatctactcgtttttttcttctttttttttgtttaactaaaacggttgaatctatgttgttgtggacttgtggtccttgtgaatggtttgcagtatggttgctgatgtccatcgcaccttactatacgggggcatatttttgtacccagcagaccagaagagtccaaacgggaaactacgcgttctgtatgaagtcttcccgatgtcattcctgatggaacaagctggaggccaggctttcacaggcaaacaacgggcgcttgaacttgctcccgctaaacttcacgacagatccccagtgttcctcgggagctacgatgacgttgaggagatcaaagcactgtacgcttcaatgtcaaacagcggttgacctttctgcctgaggaaacgagcgagatcaaaagcaccgtacgcttcagagtcaactgcttgatctttatagattgtaataaaataataaaagagtttgtaaaaaaaaacaacaacactgcttgatctttctgcatgaggataaaaagcgcatagtttccccggttggatatatccatcagatatttattatgttgttgccttctacacaaatttaacgtgctttcgtgattccttaatgcaactttggattcatgtacggagggagtttatgtgaagacatattacttggtgcagtttatctccaacaaaatacaaaaaaaagaaccttgtgcagttatacttcagtcttaatgtcgtgttcatcggatttgtgacgctccaaagcatagtcgttgcagatccttgattcgaactcag

SEQ ID NO: 214911 - DNA, 1948 bp, Zea Mays
gccacgtcccaacaacttgccaattcgcaccgcgggaccggcgccgtcttgttgctccgctccggccgtgacacgagcgcaccagccaccgccagcccctcccccgtcgactcgagccacaggacaaggcatcccaaccgccgcccatctcctatcgtcatctgccgatccctcctcggttcctcacagtcacagagcctcacgtcacgtgtacctcccccaacccaacccagcccaacccagcccaaaacctagcgggcgaggggccggggaaccgaccgccggacgcggagatggaccacgcggcggaggcgcagcggacggacctgatgacgatcacgcggcacgtgctcaacgagcagagccgccacccggagtcccgcggcgacttcaccatcctcctctcccacatcgtcctcggctgcaagttcgtcgccgccgcggtcaacaaggccggcctcgccaagctcatcggcctcgccggagagaccaacgtccagggcgaggagcaaaagaagctggatgtactgtccaacgaggtcttcgtgaaggcgctcgtcagcagcggccgcacctgtgtcctcgtgtctgaagagaacgaggaggccatcttcgtcgacccggccctccgcgggaagttcgtcaatcctttgctcctccatcccgacctcgtaaaagttccgcaacgccgtactgtcgctttccctgatcgcgtgttagttctctctctctctctgttcaggtactgcgtctgtttcgacccgctggatggctcctccaacatcgactgtggtgtctcaatcggaacggtgtgtcactgtcactcccgatctttgggatttacatggtcaaagacaaggacaacgtgaccttggaggatgtgctgcagcctggaacaaacatgcttgctgctggctactgcatgtacgggagttcatgcaccttgtgctgagcactgggaacggagtcaatggcttcactctcgatccttcccttggagagttcattttgactcatccaaatatcaagataccaaggaaagggaagatctattcagtcaacgaagggaacgccaaaaactgggatgggcctacagccaagtacgacgagctagggggctcgtttctgtccaaaaactactactgtgatttcgtaacaagccaggctgaattttatgccgtttcagattcgtggagaaatgcaagtatcctgaggatggttcaccgcctagatccttgagatatatcggaagtatggttgctgatgtccatcgcaccttactatacgggggcatatttttgtacccagcagaccagaagagtccaaacgggaaactacgcgttctgtatgaagtcttcccgatgtcattcctgatggaacaagctggaggccaggctttcacaggcaaacaacgggcgcttgaacttgctcccgctaaacttcacgacagatccccagtgttcctcgggagctacgatgacgttgaggagatcaaagcactgtacgcttcaatgtcaaacagcggttgacctttctgcctgaggaaacgagcgagatcaaaagcaccgtacgcttcagagtcaactgcttgatctttatagattgtaataaaataataaaagagtttgtaaaaaaaaacaacaacactgcttgatctttctgcatgaggataaaaagcgcatagtttccccggttggatatatccatcagatatttattatgttgttgccttctacacaaatttaacgtgctttcgtgattccttaatgcaactttggattcatgtacggagggagtttatgtgaagacatattacttggtgcagtttatctccaacaaaatacaaaaaaaagaaccttgtgcagttatacttcagtcttaatgtcgtgttcatcggatttgtgacgctccaaagcatagtcgttgcagatccttgattcgaactcag

SEQ ID NO: 214912 - DNA, 1799 bp, Zea Mays
cagcaccaccaacgcgcgccccggcgcctatttcaagccacgtcccaacaacttgccaattcgcaccgcgggaccggcgccgtcttgttgctccgctccggccgtgacacgagcgcaccagccaccgccagcccctcccccgtcgactcgagccacaggacaaggcatcccaaccgccgcccatctcctatcgtcatctgccgatccctcctcggttcctcacagtcacagagcctcacgtcacgtgtacctcccccaacccaacccagcccaacccagcccaaaacctagcgggcgaggggccggggaaccgaccgccggacgcggagatggaccacgcggcggaggcgcagcggacggacctgatgacgatcacgcggcacgtgctcaacgagcagagccgccacccggagtcccgcggcgacttcaccatcctcctctcccacatcgtcctcggctgcaagttcgtcgccgccgcggtcaacaaggccggcctcgccaagctcatcggcctcgccggagagaccaacgtccaggagccaccccaaaaaaaaaatacagggcgaggagcaaaagaagctggatgtactgtccaacgaggtcttcgtgaaggcgctcgtcagcagcggccgcacctgtgtcctcgtgtctgaagagaacgaggaggccatcttcgtcgacccggccctccgcgggaagtactgcgtctgtttcgacccgctggatggctcctccaacatcgactgtggtgtctcaatcggaacgatctttgggatttacatggtcaaagacaaggacaacgtgaccttggaggatgtgctgcagcctggaacaaacatgcttgctgctggctactgcatgtacgggagttcatgcacgcttgtgctgagcactgggaacggagtcaatggcttcactctcgatccttcccttggagagttcattttgactcatccaaatatcaagataccaaggaaagggaagatctattcagtcaacgaagggaacgccaaaaactgggatgggcctacagccaaattcgtggagaaatgcaagtatcctgaggatggttcaccgcctagatccttgagatatatcggaagtatggttgctgatgtccatcgcaccttactatacgggggcatatttttgtacccagcagaccagaagagtccaaacgggaaactacgcgttctgtatgaagtcttcccgatgtcattcctgatggaacaagctggaggccaggctttcacaggcaaacaacgggcgcttgaacttgctcccgctaaacttcacgacagatccccagtgttcctcgggagctacgatgacgttgaggagatcaaagcactgtacgcttcaatgtcaaacagcggttgacctttctgcctgaggaaacgagcgagatcaaaagcaccgtacgcttcagagtcaactgcttgatctttatagattgtaataaaataataaaagagtttgtaaaaaaaaacaacaacactgcttgatctttctgcatgaggataaaaagcgcatagtttccccggttggatatatccatcagatatttattatgttgttgccttctacacaaatttaacgtgctttcgtgattccttaatgcaactttggattcatgtacggagggagtttatgtgaagacatattacttggtgcagtttatctccaacaaaatacaaaaaaaagaaccttgtgcagttatacttcagtcttaatgtcgtgttcatcggatttgtgacgctccaaagcatagtcgttgcagatccttgattcgaactcag

SEQ ID NO: 214913 - DNA, 1823 bp, Zea Mays
ccatcgcattccccatccaccgtcctccgcccagcaccaccaacgcgcgccccggcgcctatttcaagccacgtcccaacaacttgccaattcgcaccgcgggaccggcgccgtcttgttgctccgctccggccgtgacacgagcgcaccagccaccgccagcccctcccccgtcgactcgagccacaggacaaggcatcccaaccgccgcccatctcctatcgtcatctgccgatccctcctcggttcctcacagtcacagagcctcacgtcacgtgtacctcccccaacccaacccagcccaacccagcccaaaacctagcgggcgaggggccggggaaccgaccgccggacgcggagatggaccacgcggcggaggcgcagcggacggacctgatgacgatcacgcggcacgtgctcaacgagcagagccgccacccggagtcccgcggcgacttcaccatcctcctctcccacatcgtcctcggctgcaagttcgtcgccgccgcggtcaacaaggccggcctcgccaagctcatcggcctcgccggagagaccaacgtccagggcgaggagcaaaagaagctggatgtactgtccaacgaggtcttcgtgaaggcgctcgtcagcagcggccgcacctgtgtcctcgtgtctgaagagaacgaggaggccatcttcgtcgacccggccctccgcgggaagttcgtcaatcctttgctcctccatcccgacctcgtaaaagttccgcaacgccgtactgtcgctttccctgatcgcgtgttagttctctctctctctctgttcaggtactgcgtctgtttcgacccgctggatggctcctccaacatcgactgtggtgtctcaatcggaacgatctttgggatttacatggtcaaagacaaggacaacgtgaccttggaggatgtgctgcagcctggaacaaacatgcttgctgctggctactgcatgtacgggagttcatgcacgataccaaggaaagggaagatctattcagtcaacgaagggaacgccaaaaactgggatgggcctacagccaaattcgtggagaaatgcaagtatcctgaggatggttcaccgcctagatccttgagatatatcggaagtatggttgctgatgtccatcgcaccttactatacgggggcatatttttgtacccagcagaccagaagagtccaaacgggaaactacgcgttctgtatgaagtcttcccgatgtcattcctgatggaacaagctggaggccaggctttcacaggcaaacaacgggcgcttgaacttgctcccgctaaacttcacgacagatccccagtgttcctcgggagctacgatgacgttgaggagatcaaagcactgtacgcttcaatgtcaaacagcggttgacctttctgcctgaggaaacgagcgagatcaaaagcaccgtacgcttcagagtcaactgcttgatctttatagattgtaataaaataataaaagagtttgtaaaaaaaaacaacaacactgcttgatctttctgcatgaggataaaaagcgcatagtttccccggttggatatatccatcagatatttattatgttgttgccttctacacaaatttaacgtgctttcgtgattccttaatgcaactttggattcatgtacggagggagtttatgtgaagacatattacttggtgcagtttatctccaacaaaatacaaaaaaaagaaccttgtgcagttatacttcagtcttaatgtcgtgttcatcggatttgtgacgctccaaagcatagtcgttgcagatccttgattcgaactcag

SEQ ID NO: 214914 - DNA, 2195 bp, Zea Mays
cccacaccccatcgcattccccatccaccgtcctccgcccagcaccaccaacgcgcgccccggcgcctatttcaagccacgtcccaacaacttgccaattcgcaccgcgggaccggcgccgtcttgttgctccgctccggccgtgacacgagcgcaccagccaccgccagcccctcccccgtcgactcgagccacaggacaaggcatcccaaccgccgcccatctcctatcgtcatctgccgatccctcctcggttcctcacagtcacagagcctcacgtcacgtgtacctcccccaacccaacccagcccaacccagcccaaaacctagcgggcgaggggccggggaaccgaccgccggacgcggagatggaccacgcggcggaggcgcagcggacggacctgatgacgatcacgcggcacgtgctcaacgagcagagccgccacccggagtcccgcggcgacttcaccatcctcctctcccacatcgtcctcggctgcaagttcgtcgccgccgcggtcaacaaggccggcctcgccaagctcatcggcctcgccggagagaccaacgtccaggcaagcacggcaccaccacacacacactgactcgcccgccccgacgatcaccatccactccgcgcctttcgtgcgtactctgctgaattactgagcccccccctgacggtgggcccggggcttatcacagatggacctcttcctagctgcatgctgcatctttttagctgaacggaacctactaccatgcatcgaatccatcgatcactatgctctctaacgcaagaatagactgctcttgctcttcaatcaacagttcaacacacgcacgcacgatccaaacgatattcgtctatctggcacagtttttttctctcttcagtttacctgctctagctgctcgtcgttgacattcaggagccaccccaaaaaaaaaatacagggcgaggagcaaaagaagctggatgtactgtccaacgaggtcttcgtgaaggcgctcgtcagcagcggccgcacctgtgtcctcgtgtctgaagagaacgaggaggccatcttcgtcgacccggccctccgcgggaagtactgcgtctgtttcgacccgctggatggctcctccaacatcgactgtggtgtctcaatcggaacgatctttgggatttacatggtcaaagacaaggacaacgtgaccttggaggatgtgctgcagcctggaacaaacatgcttgctgctggctactgcatgtacgggagttcatgcacgcttgtgctgagcactgggaacggagtcaatggcttcactctcgatccttcccttggagagttcattttgactcatccaaatatcaagataccaaggaaagggaagatctattcagtcaacgaagggaacgccaaaaactgggatgggcctacagccaaattcgtggagaaatgcaagtatcctgaggatggttcaccgcctagatccttgagatatatcggaagtatggttgctgatgtccatcgcaccttactatacgggggcatatttttgtacccagcagaccagaagagtccaaacgggaaactacgcgttctgtatgaagtcttcccgatgtcattcctgatggaacaagctggaggccaggctttcacaggcaaacaacgggcgcttgaacttgctcccgctaaacttcacgacagatccccagtgttcctcgggagctacgatgacgttgaggagatcaaagcactgtacgcttcaatgtcaaacagcggttgacctttctgcctgaggaaacgagcgagatcaaaagcaccgtacgcttcagagtcaactgcttgatctttatagattgtaataaaataataaaagagtttgtaaaaaaaaacaacaacactgcttgatctttctgcatgaggataaaaagcgcatagtttccccggttggatatatccatcagatatttattatgttgttgccttctacacaaatttaacgtgctttcgtgattccttaatgcaactttggattcatgtacggagggagtttatgtgaagacatattacttggtgcagtttatctccaacaaaatacaaaaaaaagaaccttgtgcagttatacttcagtcttaatgtcgtgttcatcggatttgtgacgctccaaagcatagtcgttgcagatccttgattcgaactcag

SEQ ID NO: 214915 - DNA, 2434 bp, Zea Mays
gcttactctcttgacccggcggcgtgccgtgccgtgccgacgcaccaagtcaggctcagcttcctgagcatttatcgccgtagatatccgcacccatgcggcacatacgtggaacccacaccccatcgcattccccatccaccgtcctccgcccagcaccaccaacgcgcgccccggcgcctatttcaagccacgtcccaacaacttgccaattcgcaccgcgggaccggcgccgtcttgttgctccgctccggccgtgacacgagcgcaccagccaccgccagcccctcccccgtcgactcgagccacaggacaaggcatcccaaccgccgcccatctcctatcgtcatctgccgatccctcctcggttcctcacagtcacagagcctcacgtcacgtgtacctcccccaacccaacccagcccaacccagcccaaaacctagcgggcgaggggccggggaaccgaccgccggacgcggagatggaccacgcggcggaggcgcagcggacggacctgatgacgatcacgcggcacgtgctcaacgagcagagccgccacccggagtcccgcggcgacttcaccatcctcctctcccacatcgtcctcggctgcaagttcgtcgccgccgcggtcaacaaggccggcctcgccaagctcatcggcctcgccggagagaccaacgtccaggcaagcacggcaccaccacacacacactgactcgcccgccccgacgatcaccatccactccgcgcctttcgtgcgtactctgctgaattactgagcccccccctgacggtgggcccggggcttatcacagatggacctcttcctagctgcatgctgcatctttttagctgaacggaacctactaccatgcatcgaatccatcgatcactatgctctctaacgcaagaatagactgctcttgctcttcaatcaacagttcaacacacgcacgcacgatccaaacgatattcgtctatctggcacagtttttttctctcttcagtttacctgctctagctgctcgtcgttgacattcaggagccaccccaaaaaaaaaatacagggcgaggagcaaaagaagctggatgtactgtccaacgaggtcttcgtgaaggcgctcgtcagcagcggccgcacctgtgtcctcgtgtctgaagagaacgaggaggccatcttcgtcgacccggccctccgcgggaagttcgtcaatcctttgctcctccatcccgacctcgtaaaagttccgcaacgccgtactgtcgctttccctgatcgcgtgttagttctctctctctctctgttcaggtactgcgtctgtttcgacccgctggatggctcctccaacatcgactgtggtgtctcaatcggaacggtgtgtcactgtcactcccgatctttgggatttacatggtcaaagacaaggacaacgtgaccttggaggatgtgctgcagcctggaacaaacatgcttgctgctggctactgcatgtacgggagttcatgcacgcttgtgctgagcactgggaacggagtcaatggcttcactctcgatccttcccttggagagttcattttgactcatccaaatatcaagataccaaggaaagggaagatctattcagtcaacgaagggaacgccaaaaactgggatgggcctacagccaaattcgtggagaaatgcaagtatcctgaggatggttcaccgcctagatccttgagatatatcggaagtatggttgctgatgtccatcgcaccttactatacgggggcatatttttgtacccagcagaccagaagagtccaaacgggaaactacgcgttctgtatgaagtcttcccgatgtcattcctgatggaacaagctggaggccaggctttcacaggcaaacaacgggcgcttgaacttgctcccgctaaacttcacgacagatccccagtgttcctcgggagctacgatgacgttgaggagatcaaagcactgtacgcttcaatgtcaaacagcggttgacctttctgcctgaggaaacgagcgagatcaaaagcaccgtacgcttcagagtcaactgcttgatctttatagattgtaataaaataataaaagagtttgtaaaaaaaaacaacaacactgcttgatctttctgcatgaggataaaaagcgcatagtttccccggttggatatatccatcagatatttattatgttgttgccttctacacaaatttaacgtgctttcgtgattccttaatgcaactttggattcatgtacggagggagtttatgtgaagacatattacttggtgcagtttatctccaacaaaatacaaaaaaaagaaccttgtgcagttatacttcagtcttaatgtcgtgttcatcggatttgtgacgctccaaagcatagtcgttgcagatccttgattcgaactcag

SEQ ID NO: 214916 - DNA, 585 bp, Zea Mays
aatcataccaccagggagtaaaggttaggatgttgttgtggtgcttgaacctggaagcatgctccaccgggacctgggttcggtcgagcaacaactagtccgctaatgacgccagtcgccggctgctgttcggaggctagcaaaagggcgagagggtttgctagtacgtacagagcgtgcgcgagtaagtggctgggagcccgccgttgtcaagagagaagttgcgaggggcagaggatcatggcgctagaacttgtcgatgcgcagggagttcgccgaagggcgttaaagagcaccgaagccttggcgagtttcctccatactccgaaatttgtcgtcgtgccgttacagcgtgggtcgacgtcactgcggtctcgttgccggtcattacagagatgaagacgaagacagtttccaatgtcaccacattttttcgcgggtgctggattgctttctcggggaaccaggagagggaggcgaacaaggagatggttgtctaccttgtcgacgcctcgcccaaaatgttcacccctaccaccacccaggtgtttctactgctgctgccagcacatcagtcaccggcac

SEQ ID NO: 214917 - DNA, 2638 bp, Zea Mays
ctattttctttatttcctggactgcgtcccaaattccagaaagatcaggggccaagctataaatgtttttctagactcagtgagcatacagagtggacggtgggttaaacacaaaagacgttttagttgaagttatatataattcaacatgagtcatgttggctagagggtggaaggctagacattctgctcaatagatccaaggttcgatccctaggcagcgttagtagagattatcgtaggatcacgtgctggaaacactgactactacgcgacgcgagtaacaagaatatcaaagccgcttaccagaagctcacgtgccaggtgctcgccgctcggcctctcccatcaaaacccaccattcctcatctgacatgataccagattaccaatgtatgtactggtagggttcgtgacaacacacatatttgcagtcaatgataatatatgttgtttgattctatatgattattatctactattttattaaataatttgttgccagaaatactggataatctattactacttattaagaaggtaagagtagtctgcctcccttatgttctgccgttctgccgtccctcaatctccaccgtccatcccacatcatgtttttcgtgcgtcgttcgtccgccccttccccgtcgcgcgagcaacctagctccctcagccccctcccgttcgcagttctcctccacgcgctggcaaccgctcctcggtcccgctcgactcgctcctgctccacctcatcgcgcccacccccgcgccgcggcggtcgcaccagacgccgacgccgccgcactccttcctctcccccgcagcccgtcaccttcctcccccgcacccgccgtaggtttcgccatgccagagcgcagcggccgttgatggatcccgcgattcccgcctgcccctgtctgcccccgccgcacacctccaccgtgctccttctccgccatggatctcgcccatacgctagcggatctcgccattcccctgtcgtgcccctagccttcttgattcgtgcctctgccccgatatccaagcttcgacgaacgccattctaggttgtccccgcggtcggccccgcccctgctatcctcaccccacccccgcgattccgccatggatctcgcccaccagcggatctcgtccttccctcgtcgtgcccccagcagcatattttctccaggccagccagccatagtgccccaccgggcaccgcgccaccacaccacgtctctctctcctaacaaagaggagacgaggaagaagaaaacctcgcgcgggggaggcgcgagaggaatcgcgggggctggaggagcagcaaccggtgaaggtggcgcgcgcggtggctgtccgagtgtcaccacattttttcgcgggtgctggattgctttctcggggaaccaggagagggaggcgaacaaggagatggttgtctaccttgtcgacgcctcgcccaaaatgttcacccctaccaccacccagatccgagagcccaacaagcgcacccgcctctggctcggctccttcgccactgccgaggaggccgcgctcgcctatgacgaggccgcgcgcaggctctacggccccgacgccttcctcaacctgccgcacctccgcgcctccgccgtctcctccaccgccgcgcaccagaggcttaggtggctcgctgcctccgccaggggcgccgccgccgtcccggcctacgacctgctcaacctcaacgcgcagcacaacatatacaatcttttggcacatgttcctttgatggattttcaaaaggaatcaacgtttgatatgtggagtactgttggtctgattagtgttcttactcttgacttctggttttgtacttctgatgaaggtctgtcttctaaaggagaaaatgactctttcaaggtccttgctttaattcatcaaaatgtcattccttcaatgtcaaacccttccatcttatgtgatttcttgactagatcatatgatattggtggtgttatcagtgtgatggccttaagtggtcttttcattcttatgacacaacacggtctggagtatcgaaaattctatgaaaagctttatgcactactcactcctgttgttttcatggcaaaacaccgatcagtatttttgcaagataagcagttgaagtctcatcctccaaagaatgttgaatcggaaatcttgtgtgagcatatcaagaaagagagggaggcagcaaaggctggaaaacgaccatactatctgaagaaatctgaacttcgcgaaaggaagctaatgaacaagtacaacgagctcaagaggtgactcaccaccatattcagctggcgatccagaaggagggttcatagcaatatcttgcggtgctggccgttggaatacttgaagcgacaaccaaaggggagaaaatacatagcacttattctaaagtttgtcaaggatcatatgggagctctgctttttggtggaggaagaacttatgaaagttgaggaacaatcagtggagctggagatggattagaaggagagatgctgttgaaacaacagtcatttcttgatctcaatcattccatccaccttgccatccacctgggaatccatggtctaacccagggtcgcggatgagctcaccgag

SEQ ID NO: 214918 - DNA, 406 bp, Zea Mays
atggatctcgcccaccagcggatctcgtccttccctcgtcgtgcccccagcagcatattttctccaggccagccagccatagtgccccaccgggcaccgcgccaccacaccacgtctctctctcctaacaaagaggagacgaggaagaagaaaacctcgcgcgggggaggcgcgagaggaatcgcgggggctggaggagcagcaaccggtgaaggtggcgcgcgcggtggctgtccgagtgtcaccacattttttcgcgggtgctggattgctttctcggggaaccaggagagggaggcgaacaaggagatggttgtctaccttgtcgacgcctcgcccaaaatgttcacccctaccaccacccaggtgtttctactgctgctgccagcacatcagtcaccggcac

SEQ ID NO: 214919 - DNA, 1014 bp, Zea Mays
gagatgaagacgaagacagtttccaatgtcaccacattttttcgcgggtgctggattgctttctcggggaaccaggagagggaggcgaacaaggagatggttgtctaccttgtcgacgcctcgcccaaaatgttcacccctaccaccacccagatccgagagcccaacaagcgcacccgcctctggctcggctccttcgccactgccgaggaggccgcgctcgcctatgacgaggccgcgcgcaggctctacggccccgacgccttcctcaacctgccgcacctccgcgcctccgccgtctcctccaccgccgcgcaccagaggcttaggtggctcgctgcctccgccaggggcgccgccgccgtcccggcctacgacctgctcaacctcaacgcgcagcacaacatatacaatcttttggcacatgttcctttgatggattttcaaaaggaatcaacgtttgatatgtggagtactgttggtctgattagtgttcttactcttgacttctggttttgtacttctgatgaaggtctgtcttctaaaggagaaaatgactctttcaaggtccttgctttaattcatcaaaatgtcattccttcaatgtcaaacccttccatcttatgtgatttcttgactagatcatatgatattggtggtgttatcagtgtgatggccttaagtggtcttttcattcttatgacacaacacggtctggagtatcgaaaattctatgaaaagctttatgcactactcactcctgttgttttcatggcaaaacaccgatcagtatttttgcaagataagcagttgaagtctcatcctccaaagaatgttgaatcggaaatcttgtgtgagcatatcaagaaagagagggaggcagcaaaggctggaaaacgaccatactatctgaagaaatctgaacttcgcgaaaggaagctaatgaacaagtacaacgagctcaagctttatgatagtgccatcgaattcgtcatcttatcgatagacctttga

SEQ ID NO: 214920 - DNA, 7821 bp, Zea Mays
caaaaccgaacattacgattagttaataatagtgacgtgctctggttagcgccagtcaagtcaaaccagcggccgcagcattaagctccatttgtgtctttcaaaatgaggcagactttgctggttgttccattacagtctacaacaacaacaaccaagtcattctcgtgaccaaaaattgcttcacctgctcccgtatgcatgatactcgggagattttccgggcagaagaggaaatcctgacaagtagtgcgttccttgctcacaggccctcgttgtgtcatgtaactgcaaatggctcgccaaactagcgttacagaagctgacctggagttcatgctaattgatgaaaatgcaaagccgaagcccctgccttattcacttctcgaaaagatcacaaatggtttctccggggcacatattattgggtatggtggatctgcagatgtttatgagggattcatcgggaatcacaaaatcgctgtgaagaggttgcgcataccatatcagcacgagaaggaattcagtcaagagattgaatgcctgatgaaggtgaagcacataaatgtcgttaggtttataggatattgttccgacacgcaagggcaggcggaaaagtatgaagataatcatgtcatggcagacagccaagaacggttaatttgttttgaatttctaccagcatgtcttgataaatacatcaaagatccatcatgttcacttgaatggagacagcgctatcaaataatcaacggagtttgtcagggcttacatcaacttcatgagcatgaaattcttcacttggatctgaatccgagaaatatacttctagacgatgacatggtcccaaagatttctgattttggcatctccaagtgcttgaaaaaaaaccaaggccacttttatactgaaactataagtggaacaccgatatatatgtcaccggaacggggcaaacatggtccaatcacaacgaagtctgatttgtttagtcttggtgtcacagttatcgagataatgacagggaacaaggagaacattgatcaagccactgttgaagatgtatttgctagctgcatcaaaattttcaatgataaatcattgacagctgcacaagtgcggcagataatggtatgtgctgagatagggattaagtgccgcaacagtgaaccagacaagagaccatcaaatacaaaggaaataatcgataagcttgaagaggaagcaaggacagaggaatctcaagagtctggcaagctacttaaggtcctaccaaccctactcctgtttgatttgcatcccgggaaattgatcccatgctcactgcagctaacaaacgacacggatgaacacatggcatataagcttagtataacagagagtgtggactggtcaaagtacttcacgaccaagctgccgctatatggcattgtgcaggcgcgatccacttacactgtcattctgacagtgttgttggagtgtgatgctccgagctgtacactggcatatgagtacatctggaagttcaataacacacttgagtttgaggattttcttgagcaaacgaggccgcgcgtcaagctcttgtccatagtgaaaccacaaacacctctgttgtcattggatgcacacccgaccaagccctgggtcataactggtcatgcctttggacatgttcgcatttggaaccatgagacacagaagctactgtattcgtttaaactatctctgggaccagtttattctgtcaaatttattgcacggaagcaatggttcgtctccagctctgcagaaggcctcatacatgtctacagtatggaaacaaaaatgcagaaggtcaagagttacagagctcatgacggcgtcagcatatcgctggccgtgcatccaaccctaccatatgtgctgtcatggccttgttcgggcccccacgagaagaagctatggaactgggaaaagggatgggactgcacacaaacatttgagagggagtacgttgcaaggaattttgtatgtcaagttgcttttgacccaaaggagaccaacagatttgctagcgcttcgaactatagggttaaggtttggagcgttgatcttcccaaatgtaactataatctgcctggtttttttaacgaagtgaacttcctggaattcttcacacgtgatgatcaacagtatttgattattactgtctctcatgataagactgcaaaaatatgggacatgcggaacaagaaatatgtttatgatagtatggaacaaaatttgatgtctcccgtgtcttctgtcttctcacatcccaatctgccgatactacttacacgttcaattgatggcacttctcatttctggagtcccaaagatttcaggtttgaggcagtccttgactgtcgttatggaggacatgtatggggcattgcatgtttgatgggatcaaaaagaaggtttgtaattggacaagaaactgcattaacaatcctggatgttggtgaccaagaatgccaggacatgagacaagaaggcacaagttctgaggtgataaccccagggtcaagcgagcttttgcttgacgtccacccgctgacactccactttcccttccatgcccacaagttgatcccgtgcacgctgcacctaacaaataaaacagatgaacatgtggcttttaatcttagtatagaagacggaatggagtcttggcagcagatctttgtaaggatgcccctaagtggaattgtgccaccaaaatccacttacactcttgttgtcacaatgagggagctgacgtatctaccaacacaaaactttaatttgaccctgcagtctaatatatgcgaagataggtacatctattcatttatgagcctatcagaatctgatcagttttttgaggatttaaaggagataaggaatgtggcgccgcctcaggtgaaactgaaagcagttttttctctgcaaggacagacaacgtttgagaacggatcgtcaactggagaaaacttagtccaacctttaattaacatatggactttgttcaaccctgccaaggatttttctagtatgctgatctctctagatgctgatccaacagagtcatgggttataacaggtcaccgccacggtgatgttgctttatggaagcacggcatgcagaaaatgatgtctttgattaacatatcgggagaagcaagccttcctcggaatagcttgaacacccaacatgatgtttattccgttaaattcattgcaaggaagcggtggtttgtagccgggacatgtgatggtttcatccatgtgtataagtatgaaacaagaataatggactgcataaagagattcagagcatactcatctgggatcatagactggggtatttgctcgtccagagcgcttatcgttcatccaacccagccatatttgctctctacctgtgaagaaatgaagctttgggactgggacgatgattggaagtgcatacaaaaatttggtagggaacacactgattccatacttcaagtggcatttagcccaaatgacagttttgccagtgtttcaagtgatcacacaataaaggtggtttttaatggggaacctccttccttagcaaggctgcagagaagcttcttggatgaattagtgtgttgggttatggttggtgccaaaatgtagtccccccccccccctctgtttatgcttctatttagcaggtttcgctgctttgtaagcctttttactctttataagatgcacagttctcctgcaagttcgataaagaaaatataccaagataagtgtaattaatttcctttgaaacaatgactgtgcgatagtgtgattaataagctatgctttgatgtacatcagctttggtgcctgaaatctcccacatcagagtgtactctgcacggccattcggacaaagtgaattgcttggatttcgtcacacatgatggtcagcaatatttgattagtggatctcaagactgtactgccaaggcatgggccttgaaggaaaaggaatgcgtccagacaatggatgttttcatgtcgccagttgtttctgtcatttcccttccggacactccatatataactacaggttcagcagatggcactattcatttgtggagttctgctaatttcaggcttgagagaatacttagccttggtttatgtggccctgtttgggatctacgtttgattgggccaacgaggctagctcgtcagctccctcaaatgagctgatccaggttgaccccaaagagttgcgcttcccggttgcccaagaggtgtcaagcacactagagatccgtaacgttacagatcaccatgtggcattctgtatgtggtcattgaaccatacagcaaattacattccagtgccgaacatagaagttctatcaccacagtcaatgcggcaagttgttataacaagaattgcacgacgagagcctgtgccagcagaccccgtcgacgacatagtctatgtgaagggcactaccgtggttcagggtacaacgagcgcagatgtcacttatgacatgttcgatggaacaaggacaggccaaattctgcaaccggccatggagctgaatgttgttctcgtagctgactccgagatcatacacaaagcaaggttaccatgggccttagatgtgcatccaacaatgccatggataatgatggctcaaggagattaccaaattcgtatatggaactataagacacggatagagaaacctattgctatcaaggggagagaagttacttcggctaaatttataatgcacaagcaatggattctggcgggctgttctagtggacttgtctatgtgtaccgttatgaaccagaaaagaaaaaatcagtagagaaaatccgagttctacaaggacactcaaatgctatcaattccttggctgttcattcaactaagccatgcgtgctgtcagcatccaaagatggcaaaattttgatctgggactatgaaaatgagtgggagttaatgaaaacatttgatgtcaaaagtcctgtgcagcatgttgcgtttagcccaaaggactccaatatgttcgccagtgcccaggacaaaacagtaaagatatgggattggcattctggtaactgcaagtctacattgtctgggcattcagatttggtgttatgtctggattacttcagtcagggtgatcagctatacttgatcactggttcacgagacaaaactgccaagatatgggattgcaagacgaggagttgtgttcggacattggaagggcatacagatgttgttaatgttgcatgttgccatccagatcttctaatactaattacaggttcattgaacgggtcagttcgtctgtgggatttgaatcgctcaactacgttccgatatgagctcatatttgaccttggagaagtatatgctatagcaagtttgaagggtacaaggattgtgattggacacgaaataggattagcactggtagacatagacctagagggcaagaaggatggatatgtgaagagcaatgtcgcaattatggattcaaaaaatgacacagatcaaaatatgaaagagttaagcccaacagcttcctcaagtgaggtgcaaaaggtgtcaagcattatagcattggagactctatacaaaatgaagtcatcagaatcgtctatagatgtccatccaacagagacatggatggtcattacatccgacaaatatgttcatatatgggactaccatacaaggtcagattggctaaatttatagcccgcaagcaatgggttattgcgggtgctactagtggattcatcttcgtctatgattatgactcaaaaaaggaaataatacacgttttgtgtaaccacacagaacccatcaagtctttggctattcacggaactgagccccttgtgctgtcagcatccgtggatggcaaaattttgctgtgggactatgcaaatgactggcatttgattaaaacatttgatgcgagaagtcaacgtttggtgcaagtcgcgtttaatccaaaggacaccaatatgtttgctagtgctcagggcaaaacagtaaagatttgggatcgccagcatgatgaatgccaatacaaattagatgggcattcacatcagatcgagtgttttgattactttagtggtggtgattttgataagctatatatagtcaccggctctcaagataaaactgccaagatctgggactgcgagaatgcgggctgtgtccagacactggaaggacatgcaggtcccgttagagctgtctgttaccatcagaatctctcgttattaattacagggtgctctgacggatcaattcatctatggaactccactaccttcaggcttgagcataaactgaactttgctgacttcggattactgagttctgtagcttgtttgaaaggatcgaaaaggattgcaatcagaagcagggaaggattagcacttgtagacatagacatagaggacaagaaggatagcgatgtggagagcatcacgactactgcttccatgaacgacacaggtccaattacagaagagaacggagtggcagcagaccatatctctgatgaccacctggcgcagggcgtagtatatgtacatacagagattataggcaaagtcaattcagcatgcaccatagacgtccatccgacaaagccatggatggtcatcactcaagctaacaagtttgttcatgtttgggactaccatacaaaggtagtggaatggacgattcagattaagggagcgaaagttagttcagctaaatttatagccagccaggattggattgtggcgggtactacccgtggattcctccacgtgtacgattgcgaatcgaggaaggaaatacgccgtctttgtgaacacccgaaatctatcacgtcattggctgttgacgatgatgcccttgagctggtgctgtcagcgtccatcgatggcaagattttgatctggagctactggcactactatcacgcacgtagacgtagtacctggcatttggaaaaaacatttgacgcgggaagccagtgtctgaagcaagtcgcgtttattgctccaagtgtccatcgcagcagcagcactatcatcgctactgctcgagacggaacagtaaagatttgggatcccgatcgttctgacggatgccgtgagttcacattggctgcggattcaggtcagattgttgaatgtttcgattggtttagtcgtggtactgatatatacttggtcaccggttctcgagacaacactgccaagatctgggacatagaggatgggagttgtgtccgaacactggaaggacacgcagatcatgttaccgttgtctgttaccatccggatctttcaatgctcattacaggttcaagggacggctcgattcgtctgtggaactccactaccttcaggtttgagcatgagctgaactttgacctcgggtctctgagttctttagcttgtatcaagggatcaacaaggattgcaatcggatatgaaagaggtctagtactggcagacatttgcactcaggaacatagagcatgatctataaagcggcataataccttgagagcgacagaataaaatctaaacattgataaagcggcaaaaatccctggcaaacatttgctgatgcgatgggattgcatccaaacatttttcttggtaagctaatagactgcaataagtttttccatggacttgggaggtgtcgatctgcggatatgcttttgtatggtttaaacatatcatcggatagaaatttatactactatattaaaaatttaatatggaca

SEQ ID NO: 214921 - DNA, 7692 bp, Zea Mays
gccagtcaagtcaaaccagcggccgcagcattaagctccatttgtgtctttcaaaatgaggcagactttgctggttgttccattacagtctacaacaacaacaaccaagtcattctcgtgaccaaaaattgcttcacctgctcccgtatgcatgatactcgggagattttccgggcagaagaggaaatcctgacaagtagtgcgttccttgctcacaggccctcgttgtgtcatgtaactgcaaatggctcgccaaactagcgttacagaagctgacctggagttcatgctaattgatgaaaatgcaaagccgaagcccctgccttattcacttctcgaaaagatcacaaatggtttctccggggcacatattattgggtatggtggatctgcagatgtttatgagggattcatcgggaatcacaaaatcgctgtgaagaggttgcgcataccatatcagcacgagaaggaattcagtcaagagattgaatgcctgatgaaggtgaagcacataaatgtcgttaggtttataggatattgttccgacacgcaagggcaggcggaaaagtatgaagataatcatgtcatggcagacagccaagaacggttaatttgttttgaatttctaccagcatgtcttgataaatacatcaaagatccatcatgttcacttgaatggagacagcgctatcaaataatcaacggagtttgtcagggcttacatcaacttcatgagcatgaaattcttcacttggatctgaatccgagaaatatacttctagacgatgacatggtcccaaagatttctgattttggcatctccaagtgcttgaaaaaaaaccaaggccacttttatactgaaactataagtggaacaccgatatatatgtcaccggaacggggcaaacatggtccaatcacaacgaagtctgatttgtttagtcttggtgtcacagttatcgagataatgacagggaacaaggagaacattgatcaagccactgttgaagatgtatttgctagctgcatcaaaattttcaatgataaatcattgacagctgcacaagtgcggcagataatggtatgtgctgagatagggattaagtgccgcaacagtgaaccagacaagagaccatcaaatacaaaggaaataatcgataagcttgaagaggaagcaaggacagaggaatctcaagagtctggcaagctacttaaggtcctaccaaccctactcctgtttgatttgcatcccgggaaattgatcccatgctcactgcagctaacaaacgacacggatgaacacatggcatataagcttagtataacagagagtgtggactggtcaaagtacttcacgaccaagctgccgctatatggcattgtgcaggcgcgatccacttacactgtcattctgacagtgttgttggagtgtgatgctccggtcattaacagatcttgttatatgaccctgcagagctgtacactggcatatgagtacatctggaagttcaataacacacttgagtttgaggattttcttgaggttaagaaaacagagaatgcggtgaaggaagtgaaactgaaagcatttttgtgtgaggaaggacgatcaatttctaagcaaacgaggccgcgcgtcaagctcttgtccatagtgaaaccacaaacacctctgttgtcattggatgcacacccgaccaagccctgggtcataactggtcatgcctttggacatgttcgcatttggaaccatgagacacagaagctactgtattcgtttaaactatctctgggaccagtttattctgtcaaatttattgcacggaagcaatggttcgtctccagctctgcagaaggcctcatacatgtctacagtatggaaacaaaaatgcagaaggtcaagagttacagagctcatgacggcgtcagcatatcgctggccgtgcatccaaccctaccatatgtgctgtcatggccttgttcgggcccccacgagaagaagctatggaactgggaaaagggatgggactgcacacaaacatttgagagggagtacgttgcaaggaattttgtatgtcaagttgcttttgacccaaaggagaccaacagatttgctagcgcttcgaactatagggttaaggtttggagcgttgatcttcccaaatgtaactataatctgcctggtttttttaacgaagtgaacttcctggaattcttcacacgtgatgatcaacagtatttgattattactgtctctcatgataagactgcaaaaatatgggacatgcggaacaagaaatatgtttatgatagtatggaacaaaatttgatgtctcccgtgtcttctgtcttctcacatcccaatctgccgatactacttacacgttcaattgatggcacttctcatttctggagtcccaaagatttcaggtttgaggcagtccttgactgtcgttatggaggacatgtatggggcattgcatgtttgatgggatcaaaaagaaggtttgtaattggacaagaaactgcattaacaatcctggatgttggtgaccaagaatgccaggacatgagacaagaaggcacaagttctgaggtgataaccccagggtcaagcgagcttttgcttgacgtccacccgctgacactccactttcccttccatgcccacaagttgatcccgtgcacgctgcacctaacaaataaaacagatgaacatgtggcttttaatcttagtatagaagacggaatggagtcttggcagcagatctttgtaaggatgcccctaagtggaattgtgccaccaaaatccacttacactcttgttgtcacaatgagggagctgacgtatctaccaacacaaaactttaatttgaccctgcagtctaatatatgcgaagataggtacatctattcatttatgagcctatcagaatctgatcagttttttgaggatttaaaggagataaggaatgtggcgccgcctcaggtgaaactgaaagcagttttttctctgcaaggacagacaacgtttgagaacggatcgtcaactggagaaaacttagtccaacctttaattaacatatggactttgttcaaccctgccaaggatttttctagtatgctgatctctctagatgctgatccaacagagtcatgggttataacaggtcaccgccacggtgatgttgctttatggaagcacggcatgcagaaaatgatgtctttgattaacatatcgggagaagcaagccttcctcggaatagcttgaacacccaacatgatgtttattccgttaaattcattgcaaggaagcggtggtttgtagccgggacatgtgatggtttcatccatgtgtataagtatgaaacaagaataatggactgcataaagagattcagagcatactcatctgggatcatagactggggtatttgctcgtccagagcgcttatcgttcatccaacccagccatatttgctctctacctgtgaagaaatgaagctttgggactgggacgatgattggaagtgcatacaaaaatttggtagggaacacactgattccatacttcaagtggcatttagcccaaatgacagttttgccagtgtttcaagtgatcacacaataaagctttggtgcctgaaatctcccacatcagagtgtactctgcacggccattcggacaaagtgaattgcttggatttcgtcacacatgatggtcagcaatatttgattagtggatctcaagactgtactgccaaggcatgggccttgaaggaaaaggaatgcgtccagacaatggatgttttcatgtcgccagttgtttctgtcatttcccttccggacactccatatataactacaggttcagcagatggcactattcatttgtggagttctgctaatttcaggcttgagagaatacttagccttggtttatgtggccctgtttgggatctacgtttgattgggccaacgaggatcgtgattcaaccgaacaactatgaaatatcagtcatcatggatattgacacaggttctgaggctagctcgtcagctccctcaaatgagctgatccaggttgaccccaaagagttgcgcttcccggttgcccaagaggtgtcaagcacactagagatccgtaacgttacagatcaccatgtggcattctgtatgtggtcattgaaccatacagcaaattacattccagtgccgaacatagaagttctatcaccacagtcaatgcggcaagttgttataacaagaattgcacgacgagagcctgtgccagcagaccccgtcgacgacatagtctatgtgaagggcactaccgtggttcagggtacaacgagcgcagatgtcacttatgacatgttcgatggaacaaggacaggccaaattctgcaaccggccatggagctgaatgttgttctcgtagctgactccgagatcatacacaaagcaaggttaccatgggccttagatgtgcatccaacaatgccatggataatgatggctcaaggagattaccaaattcgtatatggaactataagacacggatagagaaacctattgctatcaaggggagagaagttacttcggctaaatttataatgcacaagcaatggattctggcgggctgttctagtggacttgtctatgtgtaccgttatgaaccagaaaagaaaaaatcagtagagaaaatccgagttctacaaggacactcaaatgctatcaattccttggctgttcattcaactaagccatgcgtgctgtcagcatccaaagatggcaaaattttgatctgggactatgaaaatgagtgggagttaatgaaaacatttgatgtcaaaagtcctgtgcagcatgttgcgtttagcccaaaggactccaatatgttcgccagtgcccaggacaaaacagtaaagatatgggattggcattctggtaactgcaagtctacattgtctgggcattcagatttggtgttatgtctggattacttcagtcagggtgatcagctatacttgatcactggttcacgagacaaaactgccaagatatgggattgcaagacgaggagttgtgttcggacattggaagggcatacagatgttgttaatgttgcatgttgccatccagatcttctaatactaattacaggttcattgaacgggtcagttcgtctgtgggatttgaatcgctcaactacgttccgatatgagctcatatttgaccttggagaagtatatgctatagcaagtttgaagggtacaaggattgtgattggacacgaaataggattagcactggtagacatagacctagagggcaagaaggatggatatgtgaagagcaatgtcgcaattatggattcaaaaaatgacacagatcaaaatatgaaagagttaagcccaacagcttcctcaagtgaggtgcaaaaggtgtcaagcattatagcattggagactctatacaaaatgaagtcatcagaatcgtctatagatgtccatccaacagagacatggatggtcattacatccgacaaatatgttcatatatgggactaccatacaagggaagtgaaacagatgatggatactaagggagcgaaagtcagattggctaaatttatagcccgcaagcaatgggttattgcgggtgctactagtggattcatcttcgtctatgattatgactcaaaaaaggaaataatacacgttttgtgtaaccacacagaacccatcaagtctttggctattcacggaactgagccccttgtgctgtcagcatccgtggatggcaaaattttgctgtgggactatgcaaatgactggcatttgattaaaacatttgatgcgagaagtcaacgtttggtgcaagtcgcgtttaatccaaaggacaccaatatgtttgctagtgctcagggcaaaacagtaaagatttgggatcgccagcatgatgaatgccaatacaaattagatgggcattcacatcagatcgagtgttttgattactttagtggtggtgattttgataagctatatatagtcaccggctctcaagataaaactgccaagatctgggactgcgagaatgcgggctgtgtccagacactggaaggacatgcaggtcccgttagagctgtctgttaccatcagaatctctcgttattaattacagggtgctctgacggatcaattcatctatggaactccactaccttcaggcttgagcataaactgaactttgctgacttcggattactgagttctgtagcttgtttgaaaggatcgaaaaggattgcaatcagaagcagggaaggattagcacttgtagacatagacatagaggacaagaaggatagcgatgtggagagcatcacgactactgcttccatgaacgacacaggtccaattacagaagagaacggagtggcagcagaccatatctctgatgaccacctggcgcagggcgtagtatatgtacatacagagattataggcaaagtcaattcagcatgcaccatagacgtccatccgacaaagccatggatggtcatcactcaagctaacaagtttgttcatgtttgggactaccatacaaaggtagtggaatggacgattcagattaagggagcgaaagttagttcagctaaatttatagccagccaggattggattgtggcgggtactacccgtggattcctccacgtgtacgattgcgaatcgaggaaggaaatacgccgtctttgtgaacacccgaaatctatcacgtcattggctgttgacgatgatgcccttgagctggtgctgtcagcgtccatcgatggcaagattttgatctggagctactggcactactatcacgcacgtagacgtagtacctggcatttggaaaaaacatttgacgcgggaagccagtgtctgaagcaagtcgcgtttattgctccaagtgtccatcgcagcagcagcactatcatcgctactgctcgagacggaacagtaaagatttgggatcccgatcgttctgacggatgccgtgagttcacattggctgcggattcaggtcagattgttgaatgtttcgattggtttagtcgtggtactgatatatacttggtcaccggttctcgagacaacactgccaagatctgggacatagaggatgggagttgtgtccgaacactggaaggacacgcagatcatgttaccgttgtctgttaccatccggatctttcaatgctcattacaggttcaagggacggctcgattcgtctgtggaactccactaccttcaggtttgagcatgagctgaactttgacctcgggtctctgagttctttagcttgtatcaagggatcaacaaggattgcaatcggatatgaaagaggtctagtactggcagacatttgcactcaggaacatagagcatgatctataaagcggcataataccttgagagcgacagaataaaatctaaacattgataaagcggcaaaaatccctggcaaacatttgctgatgcgatgggattgcatccaaacatttttcttggtaagctaatagactgcaataagtttttccatggacttgggaggtgtcgatctgcggatatgcttttgtatggtttaaacatatcatcggatagaaatttatactactatattaaaaatttaatatggaca

SEQ ID NO: 214922 - DNA, 7631 bp, Zea Mays
gcagcattaagctccatttgtgtctttcaaaatgaggcagactttgctggttgttccattacagtctacaacaacaacaaccaagtcattctcgtgaccaaaaattgcttcacctgctcccgtatgcatgatactcgggagattttccgggcagaagaggaaatcctgacaagtagtgcgttccttgctcacaggccctcgttgtgtcatgtaactgcaaatggctcgccaaactagcgttacagaagctgacctggagttcatgctaattgatgaaaatgcaaagccgaagcccctgccttattcacttctcgaaaagatcacaaatggtttctccggggcacatattattgggtatggtggatctgcagatgtttatgagggattcatcgggaatcacaaaatcgctgtgaagaggttgcgcataccatatcagcacgagaaggaattcagtcaagagattgaatgcctgatgaaggtgaagcacataaatgtcgttaggtttataggatattgttccgacacgcaagggcaggcggaaaagtatgaagataatcatgtcatggcagacagccaagaacggttaatttgttttgaatttctaccagcatgtcttgataaatacatcaaagatccatcatgttcacttgaatggagacagcgctatcaaataatcaacggagtttgtcagggcttacatcaacttcatgagcatgaaattcttcacttggatctgaatccgagaaatatacttctagacgatgacatggtcccaaagatttctgattttggcatctccaagtgcttgaaaaaaaaccaaggccacttttatactgaaactataagtggaacaccgatatatatgtcaccggaacggggcaaacatggtccaatcacaacgaagtctgatttgtttagtcttggtgtcacagttatcgagataatgacagggaacaaggagaacattgatcaagccactgttgaagatgtatttgctagctgcatcaaaattttcaatgataaatcattgacagctgcacaagtgcggcagataatggtatgtgctgagatagggattaagtgccgcaacagtgaaccagacaagagaccatcaaatacaaaggaaataatcgataagcttgaagaggaagcaaggacagaggaatctcaagagtctggcaagctacttaaggtcctaccaaccctactcctgtttgatttgcatcccgggaaattgatcccatgctcactgcagctaacaaacgacacggatgaacacatggcatataagcttagtataacagagagtgtggactggtcaaagtacttcacgaccaagctgccgctatatggcattgtgcaggcgcgatccacttacactgtcattctgacagtgttgttggagtgtgatgctccggtcattaacagatcttgttatatgaccctgcagagctgtacactggcatatgagtacatctggaagttcaataacacacttgagtttgaggattttcttgaggttaagaaaacagagaatgcggtgaaggaagtgaaactgaaagcatttttgtgtgaggaaggacgatcaatttctaagcaaacgaggccgcgcgtcaagctcttgtccatagtgaaaccacaaacacctctgttgtcattggatgcacacccgaccaagccctgggtcataactggtcatgcctttggacatgttcgcatttggaaccatgagacacagaagctactgtattcgtttaaactatctctgggaccagtttattctgtcaaatttattgcacggaagcaatggttcgtctccagctctgcagaaggcctcatacatgtctacagtatggaaacaaaaatgcagaaggtcaagagttacagagctcatgacggcgtcagcatatcgctggccgtgcatccaaccctaccatatgtgctgtcatggccttgttcgggcccccacgagaagaagctatggaactgggaaaagggatgggactgcacacaaacatttgagagggagtacgttgcaaggaattttgtatgtcaagttgcttttgacccaaaggagaccaacagatttgctagcgcttcgaactatagggttaaggtttggagcgttgatcttcccaaatgtaactataatctgcctggtttttttaacgaagtgaacttcctggaattcttcacacgtgatgatcaacagtatttgattattactgtctctcatgataagactgcaaaaatatgggacatgcggaacaagaaatatgtttatgatagtatggaacaaaatttgatgtctcccgtgtcttctgtcttctcacatcccaatctgccgatactacttacacgttcaattgatggcacttctcatttctggagtcccaaagatttcaggtttgaggcagtccttgactgtcgttatggaggacatgtatggggcattgcatgtttgatgggatcaaaaagaaggtttgtaattggacaagaaactgcattaacaatcctggatgttggtgaccaagaatgccaggacatgagacaagaaggcacaagttctgaggtgataaccccagggtcaagcgagcttttgcttgacgtccacccgctgacactccactttcccttccatgcccacaagttgatcccgtgcacgctgcacctaacaaataaaacagatgaacatgtggcttttaatcttagtatagaagacggaatggagtcttggcagcagatctttgtaaggatgcccctaagtggaattgtgccaccaaaatccacttacactcttgttgtcacaatgagggagctgacgtatctaccaacacaaaactttaatttgaccctgcagtctaatatatgcgaagataggtacatctattcatttatgagcctatcagaatctgatcagttttttgaggatttaaaggagataaggaatgtggcgccgcctcaggtgaaactgaaagcagttttttctctgcaaggacagacaacgtttgagaacggatcgtcaactggagaaaacttagtccaacctttaattaacatatggactttgttcaaccctgccaaggatttttctagtatgctgatctctctagatgctgatccaacagagtcatgggttataacaggtcaccgccacggtgatgttgctttatggaagcacggcatgcagaaaatgatgtctttgattaacatatcgggagaagcaagccttcctcggaatagcttgaacacccaacatgatgtttattccgttaaattcattgcaaggaagcggtggtttgtagccgggacatgtgatggtttcatccatgtgtataagtatgaaacaagaataatggactgcataaagagattcagagcatactcatctgggatcatagactggggtatttgctcgtccagagcgcttatcgttcatccaacccagccatatttgctctctacctgtgaagaaatgaagctttgggactgggacgatgattggaagtgcatacaaaaatttggtagggaacacactgattccatacttcaagtggcatttagcccaaatgacagttttgccagtgtttcaagtgatcacacaataaagctttggtgcctgaaatctcccacatcagagtgtactctgcacggccattcggacaaagtgaattgcttggatttcgtcacacatgatggtcagcaatatttgattagtggatctcaagactgtactgccaaggcatgggccttgaaggaaaaggaatgcgtccagacaatggatgttttcatgtcgccagttgtttctgtcatttcccttccggacactccatatataactacaggttcagcagatggcactattcatttgtggagttctgctaatttcaggcttgagagaatacttagccttggtttatgtggccctgtttgggatctacgtttgattgggccaacgaggatcgtgattcaaccgaacaactatgaaatatcagtcatcatggatattgacacaggttctgaggctagctcgtcagctccctcaaatgagctgatccaggttgaccccaaagagttgcgcttcccggttgcccaagaggtgtcaagcacactagagatccgtaacgttacagatcaccatgtggcattctgtatgtggtcattgaaccatacagcaaattacattccagtgccgaacatagaagttctatcaccacagtcaatgcggcaagttgttataacaagaattgcacgacgagagcctgtgccagcagaccccgtcgacgacatagtctatgtgaagggcactaccgtggttcagggtacaacgagcgcagatgtcacttatgacatgttcgatggaacaaggacaggccaaattctgcaaccggccatggagctgaatgttgttctcgtagctgactccgagatcatacacaaagcaaggttaccatgggccttagatgtgcatccaacaatgccatggataatgatggctcaaggagattaccaaattcgtatatggaactataagacacggatagagaaacctattgctatcaaggggagagaagttacttcggctaaatttataatgcacaagcaatggattctggcgggctgttctagtggacttgtctatgtgtaccgttatgaaccagaaaagaaaaaatcagtagagaaaatccgagttctacaaggacactcaaatgctatcaattccttggctgttcattcaactaagccatgcgtgctgtcagcatccaaagatggcaaaattttgatctgggactatgaaaatgagtgggagttaatgaaaacatttgatgtcaaaagtcctgtgcagcatgttgcgtttagcccaaaggactccaatatgttcgccagtgcccaggacaaaacagtaaagatatgggattggcattctggtaactgcaagtctacattgtctgggcattcagatttggtgttatgtctggattacttcagtcagggtgatcagctatacttgatcactggttcacgagacaaaactgccaagatatgggattgcaagacgaggagttgtgttcggacattggaagggcatacagatgttgttaatgttgcatgttgccatccagatcttctaatactaattacaggttcattgaacgggtcagttcgtctgtgggatttgaatcgctcaactacgttccgatatgagctcatatttgaccttggagaagtatatgctatagcaagtttgaagggtacaaggattgtgattggacacgaaataggattagcactggtagacatagacctagagggcaagaaggatggatatgtgaagagcaatgtcgcaattatggattcaaaaaatgacacagatcaaaatatgaaagagttaagcccaacagcttcctcaagtgaggtgcaaaaggtgtcaagcattatagcattggagactctatacaaaatgaagtcatcagaatcgtctatagatgtccatccaacagagacatggatggtcattacatccgacaaatatgttcatatatgggactaccatacaaggtcagattggctaaatttatagcccgcaagcaatgggttattgcgggtgctactagtggattcatcttcgtctatgattatgactcaaaaaaggaaataatacacgttttgtgtaaccacacagaacccatcaagtctttggctattcacggaactgagccccttgtgctgtcagcatccgtggatggcaaaattttgctgtgggactatgcaaatgactggcatttgattaaaacatttgatgcgagaagtcaacgtttggtgcaagtcgcgtttaatccaaaggacaccaatatgtttgctagtgctcagggcaaaacagtaaagatttgggatcgccagcatgatgaatgccaatacaaattagatgggcattcacatcagatcgagtgttttgattactttagtggtggtgattttgataagctatatatagtcaccggctctcaagataaaactgccaagatctgggactgcgagaatgcgggctgtgtccagacactggaaggacatgcaggtcccgttagagctgtctgttaccatcagaatctctcgttattaattacagggtgctctgacggatcaattcatctatggaactccactaccttcaggcttgagcataaactgaactttgctgacttcggattactgagttctgtagcttgtttgaaaggatcgaaaaggattgcaatcagaagcagggaaggattagcacttgtagacatagacatagaggacaagaaggatagcgatgtggagagcatcacgactactgcttccatgaacgacacaggtccaattacagaagagaacggagtggcagcagaccatatctctgatgaccacctggcgcagggcgtagtatatgtacatacagagattataggcaaagtcaattcagcatgcaccatagacgtccatccgacaaagccatggatggtcatcactcaagctaacaagtttgttcatgtttgggactaccatacaaaggtagtggaatggacgattcagattaagggagcgaaagttagttcagctaaatttatagccagccaggattggattgtggcgggtactacccgtggattcctccacgtgtacgattgcgaatcgaggaaggaaatacgccgtctttgtgaacacccgaaatctatcacgtcattggctgttgacgatgatgcccttgagctggtgctgtcagcgtccatcgatggcaagattttgatctggagctactggcactactatcacgcacgtagacgtagtacctggcatttggaaaaaacatttgacgcgggaagccagtgtctgaagcaagtcgcgtttattgctccaagtgtccatcgcagcagcagcactatcatcgctactgctcgagacggaacagtaaagatttgggatcccgatcgttctgacggatgccgtgagttcacattggctgcggattcaggtcagattgttgaatgtttcgattggtttagtcgtggtactgatatatacttggtcaccggttctcgagacaacactgccaagatctgggacatagaggatgggagttgtgtccgaacactggaaggacacgcagatcatgttaccgttgtctgttaccatccggatctttcaatgctcattacaggttcaagggacggctcgattcgtctgtggaactccactaccttcaggtttgagcatgagctgaactttgacctcgggtctctgagttctttagcttgtatcaagggatcaacaaggattgcaatcggatatgaaagaggtctagtactggcagacatttgcactcaggaacatagagcatgatctataaagcggcataataccttgagagcgacagaataaaatctaaacattgataaagcggcaaaaatccctggcaaacatttgctgatgcgatgggattgcatccaaacatttttcttggtaagctaatagactgcaataagtttttccatggacttgggaggtgtcgatctgcggatatgcttttgtatggtttaaacatatcatcggatagaaatttatactactatattaaaaatttaatatggaca

SEQ ID NO: 214923 - DNA, 7665 bp, Zea Mays
gcagcattaagctccatttgtgtctttcaaaatgaggcagactttgctggttgttccattacagtctacaacaacaacaaccaagtcattctcgtgaccaaaaattgcttcacctgctcccgtatgcatgatactcgggagattttccgggcagaagaggaaatcctgacaagtagtgcgttccttgctcacaggccctcgttgtgtcatgtaactgcaaatggctcgccaaactagcgttacagaagctgacctggagttcatgctaattgatgaaaatgcaaagccgaagcccctgccttattcacttctcgaaaagatcacaaatggtttctccggggcacatattattgggtatggtggatctgcagatgtttatgagggattcatcgggaatcacaaaatcgctgtgaagaggttgcgcataccatatcagcacgagaaggaattcagtcaagagattgaatgcctgatgaaggtgaagcacataaatgtcgttaggtttataggatattgttccgacacgcaagggcaggcggaaaagtatgaagataatcatgtcatggcagacagccaagaacggttaatttgttttgaatttctaccagcatgtcttgataaatacatcaaagatccatcatgttcacttgaatggagacagcgctatcaaataatcaacggagtttgtcagggcttacatcaacttcatgagcatgaaattcttcacttggatctgaatccgagaaatatacttctagacgatgacatggtcccaaagatttctgattttggcatctccaagtgcttgaaaaaaaaccaaggccacttttatactgaaactataagtggaacaccgatatatatgtcaccggaacggggcaaacatggtccaatcacaacgaagtctgatttgtttagtcttggtgtcacagttatcgagataatgacagggaacaaggagaacattgatcaagccactgttgaagatgtatttgctagctgcatcaaaattttcaatgataaatcattgacagctgcacaagtgcggcagataatggtatgtgctgagatagggattaagtgccgcaacagtgaaccagacaagagaccatcaaatacaaaggaaataatcgataagcttgaagaggaagcaaggacagaggaatctcaagagtctggcaagctacttaaggtcctaccaaccctactcctgtttgatttgcatcccgggaaattgatcccatgctcactgcagctaacaaacgacacggatgaacacatggcatataagcttagtataacagagagtgtggactggtcaaagtacttcacgaccaagctgccgctatatggcattgtgcaggcgcgatccacttacactgtcattctgacagtgttgttggagtgtgatgctccggtcattaacagatcttgttatatgaccctgcagagctgtacactggcatatgagtacatctggaagttcaataacacacttgagtttgaggattttcttgaggttaagaaaacagagaatgcggtgaaggaagtgaaactgaaagcatttttgtgtgaggaaggacgatcaatttctaagcaaacgaggccgcgcgtcaagctcttgtccatagtgaaaccacaaacacctctgttgtcattggatgcacacccgaccaagccctgggtcataactggtcatgcctttggacatgttcgcatttggaaccatgagacacagaagctactgtattcgtttaaactatctctgggaccagtttattctgtcaaatttattgcacggaagcaatggttcgtctccagctctgcagaaggcctcatacatgtctacagtatggaaacaaaaatgcagaaggtcaagagttacagagctcatgacggcgtcagcatatcgctggccgtgcatccaaccctaccatatgtgctgtcatggccttgttcgggcccccacgagaagaagctatggaactgggaaaagggatgggactgcacacaaacatttgagagggagtacgttgcaaggaattttgtatgtcaagttgcttttgacccaaaggagaccaacagatttgctagcgcttcgaactatagggttaaggtttggagcgttgatcttcccaaatgtaactataatctgcctggtttttttaacgaagtgaacttcctggaattcttcacacgtgatgatcaacagtatttgattattactgtctctcatgataagactgcaaaaatatgggacatgcggaacaagaaatatgtttatgatagtatggaacaaaatttgatgtctcccgtgtcttctgtcttctcacatcccaatctgccgatactacttacacgttcaattgatggcacttctcatttctggagtcccaaagatttcaggtttgaggcagtccttgactgtcgttatggaggacatgtatggggcattgcatgtttgatgggatcaaaaagaaggtttgtaattggacaagaaactgcattaacaatcctggatgttggtgaccaagaatgccaggacatgagacaagaaggcacaagttctgaggtgataaccccagggtcaagcgagcttttgcttgacgtccacccgctgacactccactttcccttccatgcccacaagttgatcccgtgcacgctgcacctaacaaataaaacagatgaacatgtggcttttaatcttagtatagaagacggaatggagtcttggcagcagatctttgtaaggatgcccctaagtggaattgtgccaccaaaatccacttacactcttgttgtcacaatgagggagctgacgtatctaccaacacaaaactttaatttgaccctgcagtctaatatatgcgaagataggtacatctattcatttatgagcctatcagaatctgatcagttttttgaggatttaaaggagataaggaatgtggcgccgcctcaggtgaaactgaaagcagttttttctctgcaaggacagacaacgtttgagaacggatcgtcaactggagaaaacttagtccaacctttaattaacatatggactttgttcaaccctgccaaggatttttctagtatgctgatctctctagatgctgatccaacagagtcatgggttataacaggtcaccgccacggtgatgttgctttatggaagcacggcatgcagaaaatgatgtctttgattaacatatcgggagaagcaagccttcctcggaatagcttgaacacccaacatgatgtttattccgttaaattcattgcaaggaagcggtggtttgtagccgggacatgtgatggtttcatccatgtgtataagtatgaaacaagaataatggactgcataaagagattcagagcatactcatctgggatcatagactggggtatttgctcgtccagagcgcttatcgttcatccaacccagccatatttgctctctacctgtgaagaaatgaagctttgggactgggacgatgattggaagtgcatacaaaaatttggtagggaacacactgattccatacttcaagtggcatttagcccaaatgacagttttgccagtgtttcaagtgatcacacaataaagctttggtgcctgaaatctcccacatcagagtgtactctgcacggccattcggacaaagtgaattgcttggatttcgtcacacatgatggtcagcaatatttgattagtggatctcaagactgtactgccaaggcatgggccttgaaggaaaaggaatgcgtccagacaatggatgttttcatgtcgccagttgtttctgtcatttcccttccggacactccatatataactacaggttcagcagatggcactattcatttgtggagttctgctaatttcaggcttgagagaatacttagccttggtttatgtggccctgtttgggatctacgtttgattgggccaacgaggctagctcgtcagctccctcaaatgagctgatccaggttgaccccaaagagttgcgcttcccggttgcccaagaggtgtcaagcacactagagatccgtaacgttacagatcaccatgtggcattctgtatgtggtcattgaaccatacagcaaattacattccagtgccgaacatagaagttctatcaccacagtcaatgcggcaagttgttataacaagaattgcacgacgagagcctgtgccagcagaccccgtcgacgacatagtctatgtgaagggcactaccgtggttcagggtacaacgagcgcagatgtcacttatgacatgttcgatggaacaaggacaggccaaattctgcaaccggccatggagctgaatgttgttctcgtagctgactccgagagatcatacacaaagcaaggttaccatgggccttagatgtgcatccaacaatgccatggataatgatggctcaaggagattaccaaattcgtatatggaactataagacacgggtgaaagtatgcatttgtattcgaggactaatcaattaatgtgtgctcatatcctgcagatagagaaacctattgctatcaaggggagagaagttacttcggctaaatttataatgcacaagcaatggattctggcgggctgttctagtggacttgtctatgtgtaccgttatgaaccagaaaagaaaaaatcagtagagaaaatccgagttctacaaggacactcaaatgctatcaattccttggctgttcattcaactaagccatgcgtgctgtcagcatccaaagatggcaaaattttgatctgggactatgaaaatgagtgggagttaatgaaaacatttgatgtcaaaagtcctgtgcagcatgttgcgtttagcccaaaggactccaatatgttcgccagtgcccaggacaaaacagtaaagatatgggattggcattctggtaactgcaagtctacattgtctgggcattcagatttggtgttatgtctggattacttcagtcagggtgatcagctatacttgatcactggttcacgagacaaaactgccaagatatgggattgcaagacgaggagttgtgttcggacattggaagggcatacagatgttgttaatgttgcatgttgccatccagatcttctaatactaattacaggttcattgaacgggtcagttcgtctgtgggatttgaatcgctcaactacgttccgatatgagctcatatttgaccttggagaagtatatgctatagcaagtttgaagggtacaaggattgtgattggacacgaaataggattagcactggtagacatagacctagagggcaagaaggatggatatgtgaagagcaatgtcgcaattatggattcaaaaaatgacacagatcaaaatatgaaagagttaagcccaacagcttcctcaagtgaggtgcaaaaggtgtcaagcattatagcattggagactctatacaaaatgaagtcatcagaatcgtctatagatgtccatccaacagagacatggatggtcattacatccgacaaatatgttcatatatgggactaccatacaagggaagtgaaacagatgatggatactaagggagcgaaagtcagattggctaaatttatagcccgcaagcaatgggttattgcgggtgctactagtggattcatcttcgtctatgattatgactcaaaaaaggaaataatacacgttttgtgtaaccacacagaacccatcaagtctttggctattcacggaactgagccccttgtgctgtcagcatccgtggatggcaaaattttgctgtgggactatgcaaatgactggcatttgattaaaacatttgatgcgagaagtcaacgtttggtgcaagtcgcgtttaatccaaaggacaccaatatgtttgctagtgctcagggcaaaacagtaaagatttgggatcgccagcatgatgaatgccaatacaaattagatgggcattcacatcagatcgagtgttttgattactttagtggtggtgattttgataagctatatatagtcaccggctctcaagataaaactgccaagatctgggactgcgagaatgcgggctgtgtccagacactggaaggacatgcaggtcccgttagagctgtctgttaccatcagaatctctcgttattaattacagggtgctctgacggatcaattcatctatggaactccactaccttcaggcttgagcataaactgaactttgctgacttcggattactgagttctgtagcttgtttgaaaggatcgaaaaggattgcaatcagaagcagggaaggattagcacttgtagacatagacatagaggacaagaaggatagcgatgtggagagcatcacgactactgcttccatgaacgacacaggtccaattacagaagagaacggagtggcagcagaccatatctctgatgaccacctggcgcagggcgtagtatatgtacatacagagattataggcaaagtcaattcagcatgcaccatagacgtccatccgacaaagccatggatggtcatcactcaagctaacaagtttgttcatgtttgggactaccatacaaaggtagtggaatggacgattcagattaagggagcgaaagttagttcagctaaatttatagccagccaggattggattgtggcgggtactacccgtggattcctccacgtgtacgattgcgaatcgaggaaggaaatacgccgtctttgtgaacacccgaaatctatcacgtcattggctgttgacgatgatgcccttgagctggtgctgtcagcgtccatcgatggcaagattttgatctggagctactggcactactatcacgcacgtagacgtagtacctggcatttggaaaaaacatttgacgcgggaagccagtgtctgaagcaagtcgcgtttattgctccaagtgtccatcgcagcagcagcactatcatcgctactgctcgagacggaacagtaaagatttgggatcccgatcgttctgacggatgccgtgagttcacattggctgcggattcaggtcagattgttgaatgtttcgattggtttagtcgtggtactgatatatacttggtcaccggttctcgagacaacactgccaagatctgggacatagaggatgggagttgtgtccgaacactggaaggacacgcagatcatgttaccgttgtctgttaccatccggatctttcaatgctcattacaggttcaagggacggctcgattcgtctgtggaactccactaccttcaggtttgagcatgagctgaactttgacctcgggtctctgagttctttagcttgtatcaagggatcaacaaggattgcaatcggatatgaaagaggtctagtactggcagacatttgcactcaggaacatagagcatgatctataaagcggcataataccttgagagcgacagaataaaatctaaacattgataaagcggcaaaaatccctggcaaacatttgctgatgcgatgggattgcatccaaacatttttcttggtaagctaatagactgcaataagtttttccatggacttgggaggtgtcgatctgcggatatgcttttgtatggtttaaacatatcatcggatagaaatttatactactatattaaaaatttaatatggaca

SEQ ID NO: 214924 - DNA, 7354 bp, Zea Mays
gttccattacagtctacaacaacaacaaccaagtcattctcgtgaccaaaaattgcttcacctgctcccgtatgcatgatactcgggagattttccgggcagaagaggaaatcctgacaagtagtgcgttccttgctcacaggccctcgttgtgtcatgtaactgcaaatggctcgccaaactagcgttacagaagctgacctggagttcatgctaattgatgaaaatgcaaagccgaagcccctgccttattcacttctcgaaaagatcacaaatggtttctccggggcacatattattgggtatggtggatctgcagatgtttatgagggattcatcgggaatcacaaaatcgctgtgaagaggttgcgcataccatatcagcacgagaaggaattcagtcaagagattgaatgcctgatgaaggtgaagcacataaatgtcgttaggtttataggatattgttccgacacgcaagggcaggcggaaaagtatgaagataatcatgtcatggcagacagccaagaacggttaatttgttttgaatttctaccagcatgtcttgataaatacatcaaagatccatcatgttcacttgaatggagacagcgctatcaaataatcaacggagtttgtcagggcttacatcaacttcatgagcatgaaattcttcacttggatctgaatccgagaaatatacttctagacgatgacatggtcccaaagatttctgattttggcatctccaagtgcttgaaaaaaaaccaaggccacttttatactgaaactataagtggaacaccgatatatatgtcaccggaacggggcaaacatggtccaatcacaacgaagtctgatttgtttagtcttggtgtcacagttatcgagataatgacagggaacaaggagaacattgatcaagccactgttgaagatgtatttgctagctgcatcaaaattttcaatgataaatcattgacagctgcacaagtgcggcagataatggtatgtgctgagatagggattaagtgccgcaacagtgaaccagacaagagaccatcaaatacaaaggaaataatcgataagcttgaagaggaagcaaggacagaggaatctcaagagtctggcaagctacttaaggtcctaccaaccctactcctgtttgatttgcatcccgggaaattgatcccatgctcactgcagctaacaaacgacacggatgaacacatggcatataagcttagtataacagagagtgtggactggtcaaagtacttcacgaccaagctgccgctatatggcattgtgcaggcgcgatccacttacactgtcattctgacagtgttgttggagtgtgatgctccggtcattaacagatcttgttatatgaccctgcagagctgtacactggcatatgagtacatctggaagttcaataacacacttgagtttgaggattttcttgaggttaagaaaacagagaatgcggtgaaggaagtgaaactgaaagcatttttgtgtgaggaaggacgatcaatttctaagcaaacgaggccgcgcgtcaagctcttgtccatagtgaaaccacaaacacctctgttgtcattggatgcacacccgaccaagccctgggtcataactggtcatgcctttggacatgttcgcatttggaaccatgagacacagaagctactgtattcgtttaaactatctctgggaccagtttattctgtcaaatttattgcacggaagcaatggttcgtctccagctctgcagaaggcctcatacatgtctacagtatggaaacaaaaatgcagaaggtcaagagttacagagctcatgacggcgtcagcatatcgctggccgtgcatccaaccctaccatatgtgctgtcatggccttgttcgggcccccacgagaagaagctatggaactgggaaaagggatgggactgcacacaaacatttgagagggagtacgttgcaaggaattttgtatgtcaagttgcttttgacccaaaggagaccaacagatttgctagcgcttcgaactatagggttaaggtttggagcgttgatcttcccaaatgtaactataatctgcctggtttttttaacgaagtgaacttcctggaattcttcacacgtgatgatcaacagtatttgattattactgtctctcatgataagactgcaaaaatatgggacatgcggaacaagaaatatgtttatgatagtatggaacaaaatttgatgtctcccgtgtcttctgtcttctcacatcccaatctgccgatactacttacacgttcaattgatggcacttctcatttctggagtcccaaagatttcaggtttgaggcagtccttgactgtcgttatggaggacatgtatggggcattgcatgtttgatgggatcaaaaagaaggtttgtaattggacaagaaactgcattaacaatcctggatgttggtgaccaagaatgccaggacatgagacaagaaggcacaagttctgaggtgataaccccagggtcaagcgagcttttgcttgacgtccacccgctgacactccactttcccttccatgcccacaagttgatcccgtgcacgctgcacctaacaaataaaacagatgaacatgtggcttttaatcttagtatagaagacggaatggagtcttggcagcagatctttgtaaggatgcccctaagtggaattgtgccaccaaaatccacttacactcttgttgtcacaatgagggagctgacgtatctaccaacacaaaactttaatttgaccctgcagtctaatatatgcgaagataggtacatctattcatttatgagcctatcagaatctgatcagttttttgaggatttaaaggagataaggaatgtggcgccgcctcaggtgaaactgaaagcagttttttctctgcaaggacagacaacgtttgagaacggatcgtcaactggagaaaacttagtccaacctttaattaacatatggactttgttcaaccctgccaaggatttttctagtatgctgatctctctagatgctgatccaacagagtcatgggttataacaggtcaccgccacggtgatgttgctttatggaagcacggcatgcagcatactcatctgggatcatagactggggtatttgctcgtccagagcgcttatcgttcatccaacccagccatatttgctctctacctgtgaagaaatgaagctttgggactgggacgatgattggaagtgcatacaaaaatttggtagggaacacactgattccatacttcaagtggcatttagcccaaatgacagttttgccagtgtttcaagtgatcacacaataaagctttggtgcctgaaatctcccacatcagagtgtactctgcacggccattcggacaaagtgaattgcttggatttcgtcacacatgatggtcagcaatatttgattagtggatctcaagactgtactgccaaggcatgggccttgaaggaaaaggaatgcgtccagacaatggatgttttcatgtcgccagttgtttctgtcatttcccttccggacactccatatataactacaggttcagcagatggcactattcatttgtggagttctgctaatttcaggcttgagagaatacttagccttggtttatgtggccctgtttgggatctacgtttgattgggccaacgaggatcgtgattcaaccgaacaactatgaaatatcagtcatcatggatattgacacaggttctgagctcgtcagctccctcaaatgagctgatccaggttgaccccaaagagttgcgcttcccggttgcccaagaggtgtcaagcacactagagatccgtaacgttacagatcaccatgtggcattctgtatgtggtcattgaaccatacagcaaattacattccagtgccgaacatagaagttctatcaccacagtcaatgcggcaagttgttataacaagaattgcacgacgagagcctgtgccagcagaccccgtcgacgacatagtctatgtgaagggcactaccgtggttcagggtacaacgagcgcagatgtcacttatgacatgttcgatggaacaaggacaggccaaattctgcaaccggccatggagctgaatgttgttctcgtagctgactccgagatcatacacaaagcaaggttaccatgggccttagatgtgcatccaacaatgccatggataatgatggctcaaggagattaccaaattcgtatatggaactataagacacgggcaattacttcggctaaatttataatgcacaagcaatggattctggcgggctgttctagtggacttgtctatgtgtaccgttatgaaccagaaaagaaaaaatcagtagagaaaatccgagttctacaaggacactcaaatgctatcaattccttggctgttcattcaactaagccatgcgtgctgtcagcatccaaagatggcaaaattttgatctgggactatgaaaatgagtgggagttaatgaaaacatttgatgtcaaaagtcctgtgcagcatgttgcgtttagcccaaaggactccaatatgttcgccagtgcccaggacaaaacagtaaagatatgggattggcattctggtaactgcaagtctacattgtctgggcattcagatttggtgttatgtctggattacttcagtcagggtgatcagctatacttgatcactggttcacgagacaaaactgccaagatatgggattgcaagacgaggagttgtgttcggacattggaagggcatacagatgttgttaatgttgcatgttgccatccagatcttctaatactaattacaggttcattgaacgggtcagttcgtctgtgggatttgaatcgctcaactacgttccgatatgagctcatatttgaccttggagaagtatatgctatagcaagtttgaagggtacaaggattgtgattggacacgaaataggattagcactggtagacatagacctagagggcaagaaggatggatatgtgaagagcaatgtcgcaattatggattcaaaaaatgacacagatcaaaatatgaaagagttaagcccaacagcttcctcaagtgaggtgcaaaaggtgtcaagcattatagcattggagactctatacaaaatgaagtcatcagaatcgtctatagatgtccatccaacagagacatggatggtcattacatccgacaaatatgttcatatatgggactaccatacaaggtcagattggctaaatttatagcccgcaagcaatgggttattgcgggtgctactagtggattcatcttcgtctatgattatgactcaaaaaaggaaataatacacgttttgtgtaaccacacagaacccatcaagtctttggctattcacggaactgagccccttgtgctgtcagcatccgtggatggcaaaattttgctgtgggactatgcaaatgactggcatttgattaaaacatttgatgcgagaagtcaacgtttggtgcaagtcgcgtttaatccaaaggacaccaatatgtttgctagtgctcagggcaaaacagtaaagatttgggatcgccagcatgatgaatgccaatacaaattagatgggcattcacatcagatcgagtgttttgattactttagtggtggtgattttgataagctatatatagtcaccggctctcaagataaaactgccaagatctgggactgcgagaatgcgggctgtgtccagacactggaaggacatgcaggtcccgttagagctgtctgttaccatcagaatctctcgttattaattacagggtgctctgacggatcaattcatctatggaactccactaccttcaggcttgagcataaactgaactttgctgacttcggattactgagttctgtagcttgtttgaaaggatcgaaaaggattgcaatcagaagcagggaaggattagcacttgtagacatagacatagaggacaagaaggatagcgatgtggagagcatcacgactactgcttccatgaacgacacaggtccaattacagaagagaacggagtggcagcagaccatatctctgatgaccacctggcgcagggcgtagtatatgtacatacagagattataggcaaagtcaattcagcatgcaccatagacgtccatccgacaaagccatggatggtcatcactcaagctaacaagtttgttcatgtttgggactaccatacaaaggtagtggaatggacgattcagattaagggagcgaaagttagttcagctaaatttatagccagccaggattggattgtggcgggtactacccgtggattcctccacgtgtacgattgcgaatcgaggaaggaaatacgccgtctttgtgaacacccgaaatctatcacgtcattggctgttgacgatgatgcccttgagctggtgctgtcagcgtccatcgatggcaagattttgatctggagctactggcactactatcacgcacgtagacgtagtacctggcatttggaaaaaacatttgacgcgggaagccagtgtctgaagcaagtcgcgtttattgctccaagtgtccatcgcagcagcagcactatcatcgctactgctcgagacggaacagtaaagatttgggatcccgatcgttctgacggatgccgtgagttcacattggctgcggattcaggtcagattgttgaatgtttcgattggtttagtcgtggtactgatatatacttggtcaccggttctcgagacaacactgccaagatctgggacatagaggatgggagttgtgtccgaacactggaaggacacgcagatcatgttaccgttgtctgttaccatccggatctttcaatgctcattacaggttcaagggacggctcgattcgtctgtggaactccactaccttcaggtttgagcatgagctgaactttgacctcgggtctctgagttctttagcttgtatcaagggatcaacaaggattgcaatcggatatgaaagaggtctagtactggcagacatttgcactcaggaacatagagcatgatctataaagcggcataataccttgagagcgacagaataaaatctaaacattgataaagcggcaaaaatccctggcaaacatttgctgatgcgatgggattgcatccaaacatttttcttggtaagctaatagactgcaataagtttttccatggacttgggaggtgtcgatctgcggatatgcttttgtatggtttaaacatatcatcggatagaaatttatactactatattaaaaatttaatatggaca

SEQ ID NO: 214925 - DNA, 5522 bp, Zea Mays
tccttggagttgatggtatttagagccgcatctaatgataaatagaagattgaagcgaaataggccgtaaacgtactgcattttggcttgttatgtggaaaccaaaaggtttgaggcagtccttgactgtcgttatggaggacatgtatggggcattgcatgtttgatgggatcaaaaagaaggtttgtaattggacaagaaactgcattaacaatcctggatgttggtgaccaagaatgccaggacatgagacaagaaggcacaagttctgaggtgataaccccagggtcaagcgagcttttgcttgacgtccacccgctgacactccactttcccttccatgcccacaagttgatcccgtgcacgctgcacctaacaaataaaacagatgaacatgtggcttttaatcttagtatagaagacggaatggagtcttggcagcagatctttgtaaggatgcccctaagtggaattgtgccaccaaaatccacttacactcttgttgtcacaatgagggagctgacgtatctaccaacacaaaactttaatttgaccctgcagtctaatatatgcgaagataggtacatctattcatttatgagcctatcagaatctgatcagttttttgaggatttaaaggagataaggaatgtggcgccgcctcaggtgaaactgaaagcagttttttctctgcaaggacagacaacgtttgagaacggatcgtcaactggagaaaacttagtccaacctttaattaacatatggactttgttcaaccctgccaaggatttttctagtatgctgatctctctagatgctgatccaacagagtcatgggttataacaggtcaccgccacggtgatgttgctttatggaagcacggcatgcagaaaatgatgtctttgattaacatatcgggagaagcaagccttcctcggaatagcttgaacacccaacatgatgtttattccgttaaattcattgcaaggaagcggtggtttgtagccgggacatgtgatggtttcatccatgtgtataagtatgaaacaagaataatggactgcataaagagattcagagcatactcatctgggatcatagactggggtatttgctcgtccagagcgcttatcgttcatccaacccagccatatttgctctctacctgtgaagaaatgaagctttgggactgggacgatgattggaagtgcatacaaaaatttggtagggaacacactgattccatacttcaagtggcatttagcccaaatgacagttttgccagtgtttcaagtgatcacacaataaaggctgcagagaagcttcttggatgaattagtgtgttgggttatgctttggtgcctgaaatctcccacatcagagtgtactctgcacggccattcggacaaagtgaattgcttggatttcgtcacacatgatggtcagcaatatttgattagtggatctcaagactgtactgccaaggtatcgatgttgtctgtgtgtatagacacattatagttccgcgcataacaattgctactgatccatgctatatttttgtcaaatgaggcatgggccttgaaggaaaaggaatgcgtccagacaatggatgttttcatgtcgccagttgtttctgtcatttcccttccggacactccatatataactacaggttcagcagatggcactattcatttgtggagttctgctaatttcaggcttgagagaatacttagccttggtttatgtggccctgtttgggatctacgtttgattgggccaacgaggatcgtgattcaaccgaacaactatgaaatatcagtcatcatggatattgacacaggttctgaggctagctcgtcagctccctcaaatgagctgatccaggttgaccccaaagagttgcgcttcccggttgcccaagaggtgtcaagcacactagagatccgtaacgttacagatcaccatgtggcattctgtatgtggtcattgaaccatacagcaaattacattccagtgccgaacatagaagttctatcaccacagtcaatgcggcaagttgttataacaagaattgcacgacgagagcctgtgccagcagaccccgtcgacgacatagtctatgtgaagggcactaccgtggttcagggtacaacgagcgcagatgtcacttatgacatgttcgatggaacaaggacaggccaaattctgcaaccggccatggagctgaatgttgttctcgtagctgactccgagatcatacacaaagcaaggttaccatgggccttagatgtgcatccaacaatgccatggataatgatggctcaaggagattaccaaattcgtatatggaactataagacacgggtgaaagtatgcatttgtattcgaggactaatcaattaatgtgtgctcatatcctgcagatagagaaacctattgctatcaaggggagagaagttacttcggctaaatttataatgcacaagcaatggattctggcgggctgttctagtggacttgtctatgtgtaccgttatgaaccagaaaagaaaaaatcagtagagaaaatccgagttctacaaggacactcaaatgctatcaattccttggctgttcattcaactaagccatgcgtgctgtcagcatccaaagatggcaaaattttgatctgggactatgaaaatgagtgggagttaatgaaaacatttgatgtcaaaagtcctgtgcagcatgttgcgtttagcccaaaggactccaatatgttcgccagtgcccaggacaaaacagtaaagatatgggattggcattctggtaactgcaagtctacattgtctgggcattcagatttggtgttatgtctggattacttcagtcagggtgatcagctatacttgatcactggttcacgagacaaaactgccaagatatgggattgcaagacgaggagttgtgttcggacattggaagggcatacagatgttgttaatgttgcatgttgccatccagatcttctaatactaattacaggttcattgaacgggtcagttcgtctgtgggatttgaatcgctcaactacgttccgatatgagctcatatttgaccttggagaagtatatgctatagcaagtttgaagggtacaaggattgtgattggacacgaaataggattagcactggtagacatagacctagagggcaagaaggatggatatgtgaagagcaatgtcgcaattatggattcaaaaaatgacacagatcaaaatatgaaagagttaagcccaacagcttcctcaagtgaggtgcaaaaggtgtcaagcattatagcattggagactctatacaaaatgaagtcatcagaatcgtctatagatgtccatccaacagagacatggatggtcattacatccgacaaatatgttcatatatgggactaccatacaaggtcagattggctaaatttatagcccgcaagcaatgggttattgcgggtgctactagtggattcatcttcgtctatgattatgactcaaaaaaggaaataatacacgttttgtgtaaccacacagaacccatcaagtctttggctattcacggaactgagccccttgtgctgtcagcatccgtggatggcaaaattttgctgtgggactatgcaaatgactggcatttgattaaaacatttgatgcgagaagtcaacgtttggtgcaagtcgcgtttaatccaaaggacaccaatatgtttgctagtgctcagggcaaaacagtaaagatttgggatcgccagcatgatgaatgccaatacaaattagatgggcattcacatcagatcgagtgttttgattactttagtggtggtgattttgataagctatatatagtcaccggctctcaagataaaactgccaagatctgggactgcgagaatgcgggctgtgtccagacactggaaggacatgcaggtcccgttagagctgtctgttaccatcagaatctctcgttattaattacagggtgctctgacggatcaattcatctatggaactccactaccttcaggcttgagcataaactgaactttgctgacttcggattactgagttctgtagcttgtttgaaaggatcgaaaaggattgcaatcagaagcagggaaggattagcacttgtagacatagacatagaggacaagaaggatagcgatgtggagagcatcacgactactgcttccatgaacgacacaggtccaattacagaagagaacggagtggcagcagaccatatctctgatgaccacctggcgcagggcgtagtatatgtacatacagagattataggcaaagtcaattcagcatgcaccatagacgtccatccgacaaagccatggatggtcatcactcaagctaacaagtttgttcatgtttgggactaccatacaaaggtagtggaatggacgattcagattaagggagcgaaagttagttcagctaaatttatagccagccaggattggattgtggcgggtactacccgtggattcctccacgtgtacgattgcgaatcgaggaaggaaatacgccgtctttgtgaacacccgaaatctatcacgtcattggctgttgacgatgatgcccttgagctggtgctgtcagcgtccatcgatggcaagattttgatctggagctactggcactactatcacgcacgtagacgtagtacctggcatttggaaaaaacatttgacgcgggaagccagtgtctgaagcaagtcgcgtttattgctccaagtgtccatcgcagcagcagcactatcatcgctactgctcgagacggaacagtaaagatttgggatcccgatcgttctgacggatgccgtgagttcacattggctgcggattcaggtcagattgttgaatgtttcgattggtttagtcgtggtactgatatatacttggtcaccggttctcgagacaacactgccaagatctgggacatagaggatgggagttgtgtccgaacactggaaggacacgcagatcatgttaccgttgtctgttaccatccggatctttcaatgctcattacaggttcaagggacggctcgattcgtctgtggaactccactaccttcaggtttgagcatgagctgaactttgacctcgggtctctgagttctttagcttgtatcaagggatcaacaaggattgcaatcggatatgaaagaggtctagtactggcagacatttgcactcaggaacatagagcatgatctataaagcggcataataccttgagagcgacagaataaaatctaaacattgataaagcggcaaaaatccctggcaaacatttgctgatgcgatgggattgcatccaaacatttttcttggtaagctaatagactgcaataagtttttccatggacttgggaggtgtcgatctgcggatatgcttttgtatggtttaaacatatcatcggatagaaatttatactactatattaaaaatttaatatggaca

SEQ ID NO: 214926 - DNA, 3625 bp, Zea Mays
gccatttctaaattcaggcaaagcgcaaacgccgggccgccgcgtagtaacatccatccaaccaatccgttccattcctacgccggctcggagacacacacacacacacacacacacacagagggaccgtccccttcccgtcgcgcgtcgcctctcgcctgctagtgcctgcccaccccgcctccatcgatcgatcgatcggcgttacgcacgcgtcgtcaagcaggcagtacatgagtttctagtgccctccctcctctctctagtcatatttccgcgcaatgtcgaatgcaaaagcggtgcttgaacctgcatttcaaggagctggccataaaccaggaacagagatatggaggatcgaggatttcaagccagtccctctgccaaaatcagattacggcaaattctactgtggggattcatacatagttctgcagacgacgtgcaaaggaggtgcttatcttttcgatatccacttctggatcgggaaggattctagccaggatgaagctggaaccgccgcgatcaagacggttgaactcgacagcatgcttggaggtcgcgcggtgcagcacagggaaccacagtgctacgagtccgacaaattcctctcgtatttcaagccatgcatcatacccatggagggtggttttgcctctggctttaagaagccagaagtggacaagttcgaaacgcggctgtatatttgcaaagggaagagagctatcagagttaaagaggttccctttgctcgctcgtcgttgaaccatgacgatgtctttatcttggacactgaaaataagatatatcaattcaacggcgccaactccaacattcaggaaagagccaaagcgttggaggtgatccaacatttgaaggagaaataccatgacggagtgtgtgctgttgcaattgtcgacgacgggaaattgcaagcagaatcagattcaggagaattctgggtcgtttttggaggctttgcgccaatagggaagaaagcagtaagtgatgatgatgttgttcttgaaactacatcaccaaggcttttcagtattagtaacggccaactgaagttagaagacactgttcttacaaaatcaattttggagaataccaaatgctttttacttgactgtggggctgagctatttgtgtgggttggtcgggtaacacaggtagaggacaggaaagctgccagtgcggcagttgagaaattcattattaaagaaaatagaccaaagacaacaagaataactcaagtgattcaaggttttgagaatcacacattcaagtctaagtttgagtcatggccagtaagtaacacggcagggagtgccagcacggaggaaggccgagggaaagttacagcactcttgaagcagaaaggtgttgatgtcaaaggaatatcaaaaactagtgtgccagcagtaaatgatgaaattcctccacctttgctagatggtggtggaaagctcgaggtttggtgtattaatgacagtgtgaagattgctcttccaaaggaagaacttggaaaattctacagtggagactgttatgttgttctctacacttatcattctgttgacaaaaaggaagagttctatctaacttactggattgggaaaaatagtgtacaggaagatcaagagtccgcttttcaaatagctaatacaacatggaattctttgaaaggaagacctgtcctgggtcgcatttatcaaggaaaagaaccaccacaatttgttgctcttttccagccaatggttattcttaagggtggtaccagctctggttataagaaatatgtagaagagaagggtctgaaagatgaaacatattgttctgatggcgtcgctctcattcaaatttctggaacagcagttcatagcaataaaacaattcaagttgatgcggtcccagcatccttgagttccacagattgttttgttttgcaatctaaaaactccatttttgtatggaatggaacttcaagttctgttgaacagcaacagtgggcttctaaagttgctgaatttctgaagaccggtgttgctgtcaaacattgtaaggagggcactgagagctctattttctggtcttctcttggtggaaagcagagttatacaagtagaaatgttgtacctgatgttgttcttagagaacctcatttgtataccttctctcttaggaatggttactgaaattttcaatttttcacaagatgatttgttgaccgaagacatgatgatacttgatacacactctgaggtttttgtctggatgggtcagtgcgtggagacaaaagaaaaacagaaagcatttgacattggccagaaatacgtacaaaatgccgtggcctttgaaggaatttctcctgatgtgcctctctataaagtcaatgaagggaatgaaccttgcttcttcaggacattcttctcctgggatagcacacggtccctggttcatggaaactcttttgagaagaaactttcagttcttttcggaatgcgttcagagggtggcaataagagctcaggtgatggtggaccaactcaaagggcatcagccttggcagctctttcatccgcattgaatccatcgtcgcaaggaaaacagtcagatgagaggcccacaaaacccagcagcacacaggcgcagtctcattcaggccaagggtcacagagagccgctgctgttgcagcactttccaatgttttgactgcagagggatcgcacagcccccgccacagtaggtcgtccccaacagcagatgctgagaagactgaattagctcctgcttctcctcaccagttggaaacagggcctgcagaagatgtccggacagagcctgatgtctcacaggaacaaactgctaacgaaaacggaggccagaccacctttagctacgaccgcttggtatcaaagtctactgaccctgtcagtgggatagaccacaagcgcagagagacatatttggtggacaatgagttcgagaccgtgtttggcatgaccaaagaggagttctacgagcagccaaggtggaagcaagagttgcagaagaagaaagctgatcttttctgaactcacacacacggctagctacgaataaaagccctccccgttgcgcgaccctttctctctccacggctgtcgtccagcattctcaccatgctcgttccacggatgcgtgatcaccagcagctttatccgtgagttgtatactctttatctgcacacgttttgggcgcgttatatatattattattattcccctagcccctccattattctggagtccacgttctggaagttgacctttcacgtgtttctttttgtaatcattaaaaatcaatttgttcagatgtcattaccagtgagattttcgtatgtaatgatgcactggcaccaaggtgtatggaacattttttttttttttgctataagacttgagcttctattgttctggcggtgttctactcgtctaattgaaggatccccggcctcctcgttgctcatgtttgtctcacggaatttcatcagcagaatgcatcttgctagtgctacctggcagggcaggacctcctttaccggaaggacagatctgaaccgtagaaatcagttggcc

SEQ ID NO: 214927 - DNA, 715 bp, Zea Mays
ggtggctactactcgcccttcatgcagatgcaaccgggcttggcgcccgccgattggagctttttccacgagcacgagcccgtcttcttcatgcccgacttagcgcacgctaagttcggcgcggccaccgccaccgccgctggcgctgctgggagcaacagcgcccaggccaagggggccgccaccaccaccgatgttgcacagaagattgttaagcaggttgagtatcagttcagcgacatcaacctggtggcaaacgagttcttgctcaagattatgaacaaggacacagaaggctatgttccgttgtcagtcattgcatcctggaagaagatcaagtctcttggggcaaccaaccagatgctggtgaaggctcttcgcacctccacaaagctcaatgtgagtgacgacggcaagaaagtccggcggaggcaggcattcacggagaagcacaaggaagagcttcagtcccgcatgatcatagcggagaatttgccagaggactcgtctcggaacagcctcgagaagatctttggcgtcgtgggaagtgtgaagaacatcaagatatgccatccacaagagcctaacaccgcaagggcttccaagtccgacacgcttgtcagcaacaagatgcacgcacttgtggagtacgagacgtcgcagcaagccgagaaagcactgaatgatgaacggaactggaggaaagggctccgtg

SEQ ID NO: 214928 - DNA, 3338 bp, Zea Mays
ccaatctttgtgtggaatggcgtccgcggtgacgccgcggtgagcgagtgcacacgcacgtaggaaccattggttgtgttggtgagctgatcggttctccggggatggcatcgtcgtcggggtacgcggatggcggcaccggaggtctaggcgacggagaccccccggtgccgtcgatgaggaagcaaccctcgcggatcgcgtcagggatgcgtcggctagcatccaaggtgtctgcggcggtgcccgagatgcggggcctcaagcgtacacagtccggtgcccagtcaggcttgcgcgggctgcgtttcctggacaagacgtctgccggcaaggatggctggaagaccgtcgagaagcggttcgacgagatgagcacggacggccggctgcagagagagaacttcgccaagtgcatcggtatggctgattcgaaggagtttgcaagcgaggtattcgtggcattggctaggagaagacacatcaatccggacgacggcgtaacaaaggaacaactgaaggagttttgggaggagatgacagatcagaacttcgattcccggctacgcattttcttcgacatgtgcgacaagaacggtgatggtaagctgacagaggatgaggtcaaggaggtcatcgtgctaagtgcctcggcaaacaagcttgcgaaactgaagaaacatgctgcaacctacgcctctctgatcatggaagagctggaccctgatcaccgcggctacatcgagatttggcagctggagaccctgctacgcgggatggtgaccgcctcagggccgacgaacatgggggcgtcagcatctctggcgaggacgatggtgccttccagccaccggaccccgctgcagcggcgcatgaacaaggccgtggacttggtccatgagaactggaagaggatatgggtgctctccctctggggcgtcctcaacatggccctcttcgtattcaagttcacccagtaccggaggcgcgcggtgttcgaggtgatgggctactgcgtatgcatagccaagggcgcggccgagaccctcaagctcaacatggcgctcatactgctgccggtgtgccggaacacgctgacgaggctgcggtccacggcgctcagcaaggtggtgccgttcgacgacaacataaacttccacaaggtcatcgctcttgcaattgccatcggatctgcaacccatacgcttgcacacgtcctctgcgacttccccaggctggtggcgtgccccaaggacaagttcatggagaagctggggcccttcttcaactacgctcaaccgacctgggcgaccctgctgtcgagcatcccggggtggaccgggatcctcctcatcctcataatgtccttctccttcacgctggcgacgcactcgttccggaggagcgtcgtgaagctgccgtcgccgctgcaccacctggcaggcttcaacgccttctggtacgcccaccacctgctggtgatcgcgtatgtgctcctggtcatgcactcctacttcatattcctcaccaagcagtggtacaagagaacgacatggatgtacttggcagtccctgtcgtgttctatgcctctgagagaagcatcagaagaattcgtgagaaaagctaccgcgtgagcatcataaaggcagcaatttacccgggaaacgtgctgtcactctacatgaagaagccaacaagcttcaagtacaaaagtgggatgtacatgtttgtaaaatgcccagacgtttcacctttcgaatggcaccccttctccatcacttcggctccgggagatgactacttgagcgttcatatccgtacgctaggcgactggacatcagaactcaggaatctgtttgggaaggcttgtgaagcagaagttacttctaagaaggctacactagcaagacttgaaacaactgttgtggcacatggtctggcagaggacactaggtgactgattgcctcatgatctgtttcatatatatacatctgacctggctggctttatccattaatttattaggtttcctaaggtcttcatagatggtccctacggcgcaccggctcaaaactaccgcaaatacgacatccttctgcttattgggctcggcattggtgcgactcctttcatcagcatactcaaggatctcctaaacaacataaagtccaacgagtttcaagaccaacgggccaggaagagcctacttctactgggttaccagagagcaaggctccttcgagtggttcaaaggtgttatgaacgacgttgccgagagtgatcacgacgatgtaatagagatgcacaactacctgaccagcgtgtacgaggaaggcgacgcgaggtcggccctgattgccatggtccagtcacttcaacatgccaaggacggcgtggatatcgtgtcaggcagcaagattcgaacgcattttgcaaggccaaactggagaaaagtgttctctgatctggctaatgcccacaagaactcacgcataggcgttttctactgtggatctccaacacttaccaagaccctgagagatctttcgatagaattcagcagtaccacgacgacccggttccatttccacaaagagaacttctaacaagcaatggcgccactcacatttcagtggccttggtagctttgtggaactgggagctaggcctgggcttgactggaccaagagcagtatgcttggtcaggtttggtgttggtatgcgcaacccagagaacagctgagcaaaaaaattcagagtaggaagttccatgtaggaaaatgataattgtaatgtaatttttttctctagccatgtctttagttgagtcacgaattgggacgtggtcaggtgggacctgattgctttagttcagttcgacaaggatgcagatgaacaccgtttctttctagacttctgctacaagcccatcaaacttattcatttttgtcggagaggaaattctccggccgagtggcggaacgcacccgccctaaatcctaagatggggagggttctaagcgttttgtctgtctgctacatgatcgatgaacacaagaacacacaagagcgtaataccctactccactgtgtgttgtattgagcttgagtgtatcagagtctaagtgagcgtgagagcgtgtgtcagtgtgagagtgtctgtcttgtaacgtcatgtgtcctcccttttatagctcaaagaggggcacgtacaaggatactgagcctcgacgtgtgggcccaggggcaaaatggaaggaaataactaatgcctataacgcctgggcgatctccgagcgccataatgttcgtagtccatacagtattgatatgtcg

SEQ ID NO: 214929 - DNA, 3236 bp, Zea Mays
tcccgaatcgatatatagccgaacacgaaccggcagtcctcaaatacagttgctgcaccgcaaccccgcgccaaagccagcgcggccaaacgacgtgacgaccaaacgaagcaaccaggcgccgaaaaggatagccgaagtgcgaaacccaacagcaaggagaaggcgaggggaaaaaagaaagaaaaggcgcatcgaaaaggcaaagagcgagctccctctacccgcgatccccgcacaccggccgccggcgttcgtcgccgccgcggatgagatgcgctccccctccggcggcggcagcgtggtggcccgcgcacgttcgtgaggggccctccgccacgcgcccaggttactgtggctccgagtccgagttcgctccccgcgcccgcgctatcgccgcggggcggagcggatcccccaacatgtggcttttctggcgcactaggaatcgcttctcccttgaggagctccggtatctaacagatcagctacaaaaggttcatgttgtcaatgaagctaataaggaatttgtgattgaagcattgcgatcaattgcggaacttatgatatacggtgaccagcatgatgctttgttttttgaatattttatggagaaacagatcatgggtgagtttgctcgtgttctaaggatctcaaagctgtcaagagtgtcactccaattgctacagacaatgagtatcatgatccaaaatctgagaaatgaacattcaatttattacatttttagcaatgagcacatcaacttcttggttacgtacccattcgattttcgaattgatgagatgttatcgtactacatatcttttctgcgggcgataagtgggaagttgaacaagaatacaatttctttgctcgtgaagacgaaaaatgatgaggtcacttcctttcctctttatgttgaggccttaaagtttgcttttcacgaggatagcatgattcgagttgctatacgtaccttgacactcaatgtctatcacgttggagatgaatctgttaacagatttgtttcccgcacgcctttatcagattatttttcagacatggttcagcattttcagaagcagtgcattgacttggataagttggttgcacgctcctcacgaaagggaaattcttctgtgccaatatcttctattgaagatgcaattgtgcaaattgaagacacactgtattatttcagtgatgttatgtcttctggtattcctgatcttgaaaggttcatcactgaaaatatcttgcgagttctggtatttcgattcttactcccgtcactgcagaggcagagcacagatttggacttaagtgtcactacatccatgtatctactttgttgtatactacacatttttaagaataaggatatggcaagtactgtagctgctgccctttttcatcaacctgatggccctgatgataggaagcaaaggacacctaatggatatacatctgagcatgatagttgcaaatctgagaatcattgcaccactgcctctggtatcgagcaatcaagtgaggagccaaattctttgtcttctgttagttggaaacacttgcccaacaattcatcgcgaagtgattgctgccaaggaaacacaccaagggaacacttgctgtcctatatcacagaaggagatgattcacaagctttgggttcattgtgcttattcgctacattattgcagacgaaagaacttgatgaatcaatgctggatgcccttggaatcctccctcaaagaaagcagcataagaaacttctattacaagctttagtaggtgaagaccttgctgaaacacaattattttcgtcaagcagcagtctaactgatgacagcatttgtagtgattttgatatttatgtaaggaagcttcaggataaatatgggctacaatgtcaccatccacggcaaatgacttccaaagctcacagatatcaggtgctcgatgctttagtcgaccttttctgcaggtcaaaggtttctgcagatgttcgtttggttggtggctggcttttccggcaactgctgccccatggagaggaagagttcactgcttttcatctaagacgactaaaggattcacacaaggattgtagctcaaagctttctgaggaatctggaggatgctggtgtgacatgcttcttcctattgttaaagaagcttggaggaactgcaagaaagcaattgaggcatcttcgccaccaaaaggatccaaatctattattgtacccatggatttgtgttcatttgaaggtgattcttctgttgccatcgcagaggcactctatgagatggttaagggttttgtgctgcagcatcaagttatactcttctgtcttggagaaactttcacagagctacctcctatttaccctctggttgatttgcctataaatactagggcaagcgctgcagattttggtggttcagttcctaaacctgggcttgaagtcaacttagccaagaatagatacaaagcatgggaagtggttacatctacgcattcgcccttcttcggtcccttttttggacactgagaagcataaagcgaagacaaagaagtatcttgttgatgggagatggacccttgcttttagggacgagcagtcctgtaaggttgcagagagtatggttattgaagagatgaaactccaacgaggtgctgttgcagagcaattgaagccattggttgaatttgacatgcctgaggatggaatgcagcacccccagacttcacatgaaaccccttctgatgatggatcatgactaaattttcatcaagtgcagtgttgagcttctcaattaaggagacatggcaacagatggccgcaaaagtgccgcattgaacatttcaagcatgctggcaggaaaacccaccatggcaagtcatcgacaattctgtacattacattgggagattagagatgtctccttgttaacacacaactgtagagtttcgggccgtcctgagttgaactagctggataggattctttgtacaatagtttgtttctctccttgcccgttgtaaccttatatatcacatcaaaacccattctttgttaagtttcagggcacagttgtgttgtgcacacgaaatgtttaaagaaatttgcagttagtcatacctgttgtcaaagcaagccttgcctatgtggtaataaaatgtcagatcgataatttttcttggaaatatgaatgttcatggactgttggtt

SEQ ID NO: 214930 - DNA, 2673 bp, Zea Mays
ctgcaatcctaaggcatcaaggtatctaacagatcagctacaaaaggttcatgttgtcaatgaagctaataaggaatttgtgattgaagcattgcgatcaattgcggaacttatgatatacggtgaccagcatgatgctttgttttttgaatattttatggagaaacagatcatgggtgagtttgctcgtgttctaaggatctcaaagctgtcaagagtgtcactccaattgctacagacaatgagtatcatgatccaaaatctgagaaatgaacattcaatttattacatttttagcaatgagcacatcaacttcttggttacgtacccattcgattttcgaattgatgagatgttatcgtactacatatcttttctgcgggcgataagtgggaagttgaacaagaatacaatttctttgctcgtgaagacgaaaaatgatgaggtcacttcctttcctctttatgttgaggccttaaagtttgcttttcacgaggatagcatgattcgagttgctatacgtaccttgacactcaatgtctatcacgttggagatgaatctgttaacagatttgtttcccgcacgcctttatcagattatttttcagacatggttcagcattttcagaagcagtgcattgacttggataagttggttgcacgctcctcacgaaagggaaattcttctgtgccaatatcttctattgaagatgcaattgtgcaaattgaagacacactgtattatttcagtgatgttatgtcttctggtattcctgatcttgaaaggttcatcactgaaaatatcttgcgagttctggtatttcgattcttactcccgtcactgcagaggcagagcacagatttggacttaagtgtcactacatccatgtatctactttgttgtatactacacatttttaagaataaggatatggcaagtactgtagctgctgccctttttcatcaacctgatggccctgatgataggaagcaaaggacacctaatggatatacatctgagcatgatagttgcaaatctgagaatcattgcaccactgcctctggtatcgagcaatcaagtgaggagccaaattctttgtcttctgttagttggaaacacttgcccaacaattcatcgcgaagtgattgctgccaaggaaacacaccaagggaacacttgctgtcctatatcacagaaggagatgattcacaagctttgggttcattgtgcttattcgctacattattgcagacgaaagaacttgatgaatcaatgctggatgcccttggaatcctccctcaaagaaagcagcataagaaacttctattacaagctttagtaggtgaagaccttgctgaaacacaattattttcgtcaagcagcagtctaactgatgacagcatttgtagtgattttgatatttatgtaaggaagcttcaggataaatatgggctacaatgtcaccatccacggcaaatgacttccaaagctcacagatatcaggtcaaaggtttctgcagatgttcgtttggttggtggctggcttttccggcaactgctgccccatggagaggaagagttcactgcttttcatctaagacgactaaaggattcacacaaggattgtagctcaaagctttctgaggaatctggaggatgctggtgtgacatgcttcttcctattgttaaagaagcttggaggaactgcaagaaaggtaaattttgatcttgatatgaatgttatctgtttgtgtcctgtatgtaacattcccacctaatatgtgttttttcttagcaattgaggcatcttcgccaccaaaaggatccaaatctattattgtacccatggatttgtgttcatttgaaggtgattcttctgttgccatcgcagaggcactctatgagatggttaagccaagaatagatacaaagcatgggaagtggttacatctacgcattcgcccttcttcggtcccttttttggacactgagaagcataaagcgaagacaaagaagtatcttgttgatgggagatggacccttgcttttagggacgagcagtcctgtaaggttgcagagagtatggttattgaagagatgaaactccaacgaggtgctgttgcagagcaattgaagccattggttgaatttgacatgcctgaggatggaatgcagcacccccagacttcacatgaaaccccttctgatgatggatcatgactaaattttcatcaagtgcagtgttgagcttctcaattaaggagacatggcaacagatggccgcaaaagtgccgcattgaacatttcaagcatgctggcaggaaaacccaccatggcaagtcatcgacaattctgtacattacattgggagattagagatgtctccttgttaacacacaactgtagagtttcgggccgtcctgagttgaactagctggataggattctttgtacaatagtttgtttctctccttgcccgttgtaaccttatatatcacatcaaaacccattctttgttaagtttcagggcacagttgtgttgtgcacacgaaatgtttaaagaaatttgcagttagtcatacctgttgtcaaagcaagccttgcctatgtggtaataaaatgtcagatcgataatttttcttggaaatatgaatgttcatggactgttggtt

SEQ ID NO: 214931 - DNA, 2531 bp, Zea Mays
cttgcttcttttgtttgaaccgctaagatgaggtcacttcctttcctctttatgttgaggccttaaagtttgcttttcacgaggatagcatgattcgagttgctatacgtaccttgacactcaatgtctatcacgttggagatgaatctgttaacagatttgtttcccgcacgcctttatcagattatttttcagacatggttcagcattttcagaagcagtgcattgacttggataagttggttgcacgctcctcacgaaagggaaattcttctgtgccaatatcttctattgaagatgcaattgtgcaaattgaagacacactgtattatttcagtgatgttatgtcttctggtattcctgatcttgaaaggttcatcactgaaaatatcttgcgagttctggtatttcgattcttactcccgtcactgcagaggcagagcacagatttggacttaagtgtcactacatccatgtatctactttgttgtatactacacatttttaagaataaggatatggcaagtactgtagctgctgccctttttcatcaacctgatggccctgatgataggaagcaaaggacacctaatggatatacatctgagcatgatagttgcaaatctgagaatcattgcaccactgcctctggtatcgagcaatcaagtgaggagccaaattctttgtcttctgttagttggaaacacttgcccaacaattcatcgcgaagtgattgctgccaaggaaacacaccaagggaacacttgctgtcctatatcacagaaggagatgattcacaagctttgggttcattgtgcttattcgctacattattgcagacgaaagaacttgatgaatcaatgctggatgcccttggaatcctccctcaaagaaagcagcataagaaacttctattacaagctttagtaggtgaagaccttgctgaaacacaattattttcgtcaagcagcagtctaactgatgacagcatttgtagtgattttgatatttatgtaaggaagcttcaggataaatatgggctacaatgtcaccatccacggcaaatgacttccaaagctcacagatatcaggtgctcgatgctttagtcgaccttttctgcaggtcaaaggtttctgcagatgttcgtttggttggtggctggcttttccggcaactgctgccccatggagaggaagagttcactgcttttcatctaagacgactaaaggattcacacaaggattgtagctcaaagctttctgaggaatctggaggatgctggtgtgacatgcttcttcctattgttaaagaagcttggaggaactgcaagaaaggcatcttcgccaccaaaaggatccaaatctattattgtacccatggatttgtgttcatttgaaggtgattcttctgttgccatcgcagaggcactctatgagatggttaagggttttgtgctgcagcatcaagttatactcttctgtcttggagaaactttcacagagctacctcctatttaccctctggttgatttgcctataaatactagggcaagcgctgcagattttggtggttcagttcctaaacctgggcttgaagtcaacttagtcgacgctgttccttgtcgaatagcatttgagaggggcaaagaacggcacttctgctttttagccatagctcatggaacttctggttggattcttcttctagaagaattacctctaaaacgggaacgaggaattgtccgtgtcatggcacctttggcaggatctgatccaagaatagatacaaagcatgggaagtggttacatctacgcattcgcccttcttcggtcccttttttggacactgagaagcataaagcgaagacaaagaagtatcttgttgatgggagatggacccttgcttttagggacgagcagtcctgtaaggttgcagagagtatggttattgaagagatgaaactccaacgaggtgctgttgcagagcaattgaagccattggttgaatttgacatgcctgaggatggaatgcagcacccccagacttcacatgaaaccccttctgatgatggatcatgactaaattttcatcaagtgcagtgttgagcttctcaattaaggagacatggcaacagatggccgcaaaagtgccgcattgaacatttcaagcatgctggcaggaaaacccaccatggcaagtcatcgacaattctgtacattacattgggagattagagatgtctccttgttaacacacaactgtagagtttcgggccgtcctgagttgaactagctggataggattctttgtacaatagtttgtttctctccttgcccgttgtaaccttatatatcacatcaaaacccattctttgttaagtttcagggcacagttgtgttgtgcacacgaaatgtttaaagaaatttgcagttagtcatacctgttgtcaaagcaagccttgcctatgtggtaataaaatgtcagatcgataatttttcttggaaatatgaatgttcatggactgttggtt

SEQ ID NO: 214932 - DNA, 1860 bp, Zea Mays
atcgaatcgaattggaaaaaaaaaaaggaacgtaaaattaatctgctactaggagaggcacaagtgcgtgcgtgcgtgcgttcgtccggggctccgggctgtgccggccgggcgatcgatcggcgatggcgccgccgtcgagggactactggctcggcttcttccgcggcgcgggggacaacatcttcgacgccatcgaggcggccatcaccgtcgccgcatccgaccacccggccgccctccgggagcgccgcgacggcatcgccgagcgcctcttcaccgcgctcctggtcaccagcgccgcggcagcggccgcgggggcggcggcggcggccccgggaggaggagcagcggggggaacccccgtggctggggcgcccactccggcacagctccaccccgagggcgccgccagcgtgcccagcctctgcagctccgaccgcgccgaggccatcgccgacgacgccgcgccgcgctgcgacgatcctgtcctcgccgagacggagcgcatcaaggccgtcctcctcagcgaccaagagaagccggaggccgagttgctggagctactccggcggctgcaggagctggacctcgcgttcgacaccttggatgccaccgcgattggcaaagcagttgccaacttccggaagcacagctccaagcagattcggaatctcgtgagatcgctcatcgaagactggaaacacacagttgacgtgtggattgctcaccgcagagatgctgttgtagatcaaacacctcagtccatgggtccttcaagcttggagcaggaggatcgaggggcggcttccacccacatggatgaaggcgacctcttcgcaacgccgagcactacaattcggctgtccgaggagaacatggatggcgatggaagcatcatgaccaatgacagtagggactgtgggcagcggtacccgatgatgaaccaagaaccggctagaaggcctccgccaatgggccagcggtacgacccagagccatgctggaggcagtctcggccgcaggaactgagcaacgggcagacaaaggagcagttcgtcgcggagatgcttgccagaccctcgagcgtggagtcgggccccgggagaccgcaggcgaggcctaggcagcagcaccaggacaccccagcagctcaagccaggccgcagccggctgcgtccgagaaaccggcggctcaactcgacgcgaactctgtgcgagcgaagctggagctcgcgaagaacgccaagctcgaggcgaccaagaggaaaccgcaggcgaggcctaggcagcagcaccaggacaccccagcagctcaagccaggccgcagccggctgcgtccgagaaaccggcggctcaactcgacgcgaactctgtgcgagcgaagctggagctcgcgaagaacgccaagctcgaggcgaccaagaggaagctccaggaagggtaccaagaatccgataacgcgaagaagcagaggaacgtacagatggtgggtccgcagaacctgcccaagcaagggaacacgaacaacaaccgtagtttccagcctagcggtagcggcaggccaaggagtagcggcaacgtcaatagcaacaggaactggtcaagatgagaggcaccgattccaattccgattccaattccttcaagagcggcaggatcccttttctttttctttttctttttacatcggctacaacaatttttagtctaggccagtagtacataaacagcaataaggcttgttttcggaattgcatgtttggcatgtcacaatgctcggctggctggtctttgccgatgaaacctgtaaagataacactaccaaattctgatcttgagcttactatccatgctag

SEQ ID NO: 214933 - DNA, 2872 bp, Zea Mays
attcagatatttcgggtactcagttaataataacctactctctgatgtctgatgtcgcaactcgcaactctagctcccagcctcccagtcttcccaggcggccggcggcgtcctaccagtccaagcctgaagcctcccaggccaatcctcccaggcggcgtcctcactcctctcccagtcccaggcggcaggcgcagccggccaggcggctgcaggcacacgcgcactggcgcaccgcggcaccgcgcactcgcgcaccagcaggcagcagccggccagtcccactgctccacaccgccccgaccaaccttcacacctagccggcccaaccccacgcacggacgttgaatcaggctagtcctcccagtctcccactcccaggcagcagggcggcaggcgcaggcgcgcagccaccagccggccaagcgctaccgcctttcccctctcctcctctcttttcccctcccttttccagcacggggagcgacctgcgctgccgccacgatgccgaagcactaccgccctgcgggtaagaagaaggaagggaatgcggcaaagtacatcacgaggaccaaggcggtcaactacctgcaagttagcctcgcaatctttaggaagctatgcattctaaagggtgtctttccacgtcagccaaagaagaaggtggaagggaaccacaagacctactaccacacaaaggatattgcattcctcgctcatgaccctttgatcgagaagttcagggagattaaggtccatcgaaggaaggttaaaaaggctgttgctaagaaaaacagggatcttgcagacaggctgttgaatcggccaccaacttacaagcttgataggcttgtccttgaaaggtatccaacattcgttgatgctcttcgtgacttggatgactgccttacaatggtgcatctgtttgcggcattacctgctgttgacggtgaacgtgttgaggtcaaacgaatccataactgccgcaggttaagccatgaatgcttgacatttatttccgtgaagggcatatattatcaggctgaagttcaaggacaaaagatcacctggctaactccgcatgctcttcagcaagtattaactgatgatgttgatttcaatgtgatgctttcttttctagaattctatgagactcttctaggatttgtgaacttcaaaatctatcattcaataaatgtaaattatcctcctattctggatccacgtctggaagctttagctgttgagctctatgcattgtgccgatacatgtctgctggttccagaagaatgattgggaattcacaaactgacgaagtaatggaagataaggatgagaaaagtaaagctgaggaagtaattgaggaagagaaggttgtgaagaataaagcaagctcaaaagcagatgaatctgagttcagattagcacagcttcaacatcagctcccaaccaatgaacctggtgcactgatgaatcttgtagaagaatcaactgccgatgatgcagatgatgatgatactaaagattgtaaaggtttatttaagaacttaaagttctacttgagtcgagaggtgcctagggagtccctgttatttataattccagcatttggagggactgtttcatgggaaggagaaggagctccatttaaagaaatagacgaagatatcactcaccaggttgattccatttgcaataatttattacaccaaagtttaactatatagacggagacattgtgtaccatccctaaagtaagatgccactctaagtaccacgacagcaatgccatactagggcaatagttactacaatacaatttttgtatgtggctaactgttcatattttacactctaccatcatatgatcatatctagcgaagtaaaataaaatggcctgtggatttttttatgcttgctagtatccatattgtaataaaaaataggagtataatatcacatcctcacactataacagtttaaagaatgaattgctcaaacaactagaaaaatctgagcaggaaaagaaacaccttgaagcaagtcttaaaactgagatgcaaaataattcaaatttgcaaaaatccttgaaggagcttcaagagaaatgcctaagcttcggcagccgatgcgtgcagcggctgaaggatgtgtttcattctattggagccagctctgaaaaatttacactttcagctgaaaacttgcccaacacattagaatatattgaaggcgaggttgaagctcttgacgaagttattggtagccatgctgacttctgcgccctggtagcttctcggggcacagctaccgcttttctgaaagctggttgcacgcatggaaaaattgttaataggcccaactacagcttatcatcatcagatctgatagatattccaagcctagctcgaagtatcggaaatagatttatgacccagatttgggtaaatggcgggcggaaaatggcgggtgacgaagctcgaagtcatcttaagccggtaaaaagcttatatttgttacttttaccttcttcttgaaatttgcacctttcttattctgttctttaatactcgtaggatgacgaagctgaagtataacaaatctgaagtatgacgaagctgaagcttgatagttgctacaatattctttcctgtaaaaattctggagagacttttgtaatattattatgtaaaaactcatgtaaatttgtacataccttgtaatatattttgtttccgctatctgtgtacaatctgctttgttgtggacgaaacttcttttttgagccgaaggcgaaaaacatattcccttcttttcgtacataacgaagcataaaaattttcctttttcaaagtctttcctcattcccga

SEQ ID NO: 214934 - DNA, 2277 bp, Zea Mays
attcagatatttcgggtactcagttaataataacctactctctgatgtctgatgtcgcaactcgcaactctagctcccagcctcccagtcttcccaggcggccggcggcgtcctaccagtccaagcctgaagcctcccaggccaatcctcccaggcggcgtcctcactcctctcccagtcccaggcggcaggcgcagccggccaggcggctgcaggcacacgcgcactggcgcaccgcggcaccgcgcactcgcgcaccagcaggcagcagccggccagtcccactgctccacaccgccccgaccaaccttcacacctagccggcccaaccccacgcacggacgttgaatcaggctagtcctcccagtctcccactcccaggcagcagggcggcaggcgcaggcgcgcagccaccagccggccaagcgctaccgcctttcccctctcctcctctcttttcccctcccttttccagcacggggagcgacctgcgctgccgccacgatgccgaagcactaccgccctgcgggtaagaagaaggaagggaatgcggcaaagtacatcacgaggaccaaggcggtcaactacctgcaagttagcctcgcaatctttaggaagctatgcattctaaagggtgtctttccacgtcagccaaagaagaaggtggaagggaaccacaagacctactaccacacaaaggatattgcattcctcgctcatgaccctttgatcgagaagttcagggagattaaggtccatcgaaggaaggttaaaaaggctgttgctaagaaaaacagggatcttgcagacaggctgttgaatcggccaccaacttacaagcttgataggcttgtccttgaaaggtatccaacattcgttgatgctcttcgtgacttggatgactgccttacaatggtgcatctgtttgcggcattacctgctgttgacggtgaacgtgttgaggtcaaacgaatccataactgccgcaggttaagccatgaatgcttgacatttatttccgtgaagggcatatattatcaggctgaagttcaaggacaaaagatcacctggctaactccgcatgctcttcagcaagtattaactgatgatgttgatttcaatgtgatgctttcttttctagaattctatgagactcttctaggatttgtgaacttcaaaatctatcattcaataaatgtaaattatcctcctattctggatccacgtctggaagctttagctgttgagctctatgcattgtgccgatacatgtctgctggttccagaagaatgattgggaattcacaaactgacgaagtaatggaagataaggatgagaaaagtaaagctgaggaagtaattgaggaagagaaggttgtgaagaataaagcaagctcaaaagcagatgaatctgagttcagattagcacagcttcaacatcagctcccaaccaatgaacctggtgcactgatgaatcttgtagaagaatcaactgccgatgatgcagatgatgatgatactaaagattgtaaaggtttatttaagaacttaaagttctacttgagtcgagaggtgcctagggagtccctgttatttataattccagcatttggagggactgtttcatgggaaggagaaggagctccatttaaagaaatagacgaagatatcactcaccagctgaaaacttgcccaacacattagaatatattgaaggcgaggttgaagctcttgacgaagttattggtagccatgctgacttctgcgccctggtagcttctcggggcacagctaccgcttttctgaaagctggttgcacgcatggaaaaattgttaataggcccaactacagcttatcatcatcagatctgatagatattccaagcctagctcgaagtatcggaaatagatttatgacccagatttgggtaaatggcgggcggaaaatggcgggtgacgaagctcgaagtcatcttaagccggatgacgaagctgaagtataacaaatctgaagtatgacgaagctgaagcttgatagttgctacaatattctttcctgtaaaaattctggagagacttttgtaatattattatgtaaaaactcatgtaaatttgtacataccttgtaatatattttgtttccgctatctgtgtacaatctgctttgttgtggacgaaacttcttttttgagccgaaggcgaaaaacatattcccttcttttcgtacataacgaagcataaaaattttcctttttcaaagtctttcctcattcccga

SEQ ID NO: 214935 - DNA, 3852 bp, Zea Mays
agaataccctcgccgccgcgaccgcctcccggagcaaggcgccgacggaggagaccgcgtccggagctgggcccatgtacgtgaaggtgagcatggatggcgcgccctacctcaggaaggtggacatcaagatgtactccagctacgaggacctctccctggcgctcgagaagatgttcagctgcttcatcgctgcctgtgattttaaaggtcaaagtggtctgcataaatcatcgagcaaagacagactgactaatggctcaaaggtggatgccctcaaagatcaggagtatgtccttacatatgaggataaggatgcagactggatgcttgtcggtgatcttccctgggagatcgagcttggcgcaagggcacccgacgctggtcctgctacagccggagatcggcctggacatcgacaagctccagatgttgccatcctttgaggcccagggcgcgtggctggtggaggcgtcgctggaggaccacgcaggcctcctcgccgccgtggcacaggccgacgtggtggtctcggccatgtccggggcgcacatccgcagccacaatcactccctgcagcataagctcctcaaggctatcaaggaggctgggaacatcaagggtttgtttggttagaaggggattgaagaaagcttcctttttaatccattttgttgattgagtcgcattcccgaatccatacttgaacatcaggatctcatatgcgaggtatcatctcgggacactggaaagactatggttgatgcttcattaggagagataatgaccacatgttagaagattacctagcaaaatgaagactggtacttaattattgttgtcacatgatgtttttactcgggagatctggaggttggcgaacgcccggggagaaactattcaaggaactattatttagtcaatttgtttcttttggagaaactttgcacagttgagggatataacttagtttttcaagcctgtccatctccagcagatggtttagttgggaaagaatcttatgctcaggtacaaattggtaggcaaattctaggcaaaggagttgggttaacatgggaagaggccaagctctagttatacatggttgttcagatgtgacagcaatgactaatgggacaaatgtcgagataggtccaaaaggccaagaaccaccatcaattagctctggcaatattagttttgttgttcgtgtattggctaagttattgcagatggcgcttgccttttgcttcagctgatcaagatctagaattcgaattgggccatgtgaagcatttcacatttcacgatctgcaaagtgcaacggacaattttaattccaagaatatattaggtcaaggaggttttggaattgtgtataaaggctgtttgagaaatggaactttagtggcagtgaagagattaaaagatcctgatgttaccggtgaagtccagtttcaaacagaagttgagttgattggccttgctgtgcacaggaatctcttgcgtttgtatgaattttgcatgacctctaaagaacgattgcttgtatatccatatatgctaaatggcagtgttgctgaccgcttgagaggaagctatgcattctaaagggtgtctttccacgtcagccaaagaagaaggtggaagggaaccacaagacctactaccacacaaaggatattgcattcctcgctcatgaccctttgatcgagaagttcagggagattaaggtccatcgaaggaaggttaaaaaggctgttgctaagaaaaacagggatcttgcagacaggctgttgaatcggccaccaacttacaagcttgataggcttgtccttgaaaggtatccaacattcgttgatgctcttcgtgacttggatgactgccttacaatggtgcatctgtttgcggcattacctgctgttgacggtgaacgtgttgaggtcaaacgaatccataactgccgcaggttaagccatgaatgcttgacatttatttccgtgaagggcatatattatcaggctgaagttcaaggacaaaagatcacctggctaactccgcatgctcttcagcaagtattaactgatgatgttgatttcaatgtgatgctttcttttctagaattctatgagactcttctaggatttgtgaacttcaaaatctatcattcaataaatgtaaattatcctcctattctggatccacgtctggaagctttagctgttgagctctatgcattgtgccgatacatgtctgctggttccagaagaatgattgggaattcacaaactgacgaagtaatggaagataaggatgagaaaagtaaagctgaggaagtaattgaggaagagaaggttgtgaagaataaagcaagctcaaaagcagatgaatctgagttcagattagcacagcttcaacatcagctcccaaccaatgaacctggtgcactgatgaatcttgtagaagaatcaactgccgatgatgcagatgatgatgatactaaagattgtaaaggtttatttaagaacttaaagttctacttgagtcgagaggtgcctagggagtccctgttatttataattccagcatttggagggactgtttcatgggaaggagaaggagctccatttaaagaaatagacgaagatatcactcaccaggttgattccatttgcaataatttattacaccaaagtttaactatatagacggagacattgtgtaccatccctaaagtaagatgccactctaagtaccacgacagcaatgccatactagggcaatagttactacaatacaatttttgtatgtggctaactgttcatattttacactctaccatcatatgatcatatctagcgaagtaaaataaaatggcctgtggatttttttatgcttgctagtatccatattgtaataaaaaataggagtataatatcacatcctcacactataacagtttaaagaatgaattgctcaaacaactagaaaaatctgagcaggaaaagaaacaccttgaagcaagtcttaaaactgagatgcaaaataattcaaatttgcaaaaatccttgaaggagcttcaagagaaatgcctaagcttcggcagccgatgcgtgcagcggctgaaggatgtgtttcattctattggagccagctctgaaaaatttacactttcagctgaaaacttgcccaacacattagaatatattgaaggcgaggttgaagctcttgacgaagttattggtagccatgctgacttctgcgccctggtagcttctcggggcacagctaccgcttttctgaaagctggttgcacgcatggaaaaattgttaataggcccaactacagcttatcatcatcagatctgatagatattccaagcctagctcgaagtatcggaaatagatttatgacccagatttgggtaaatggcgggcggaaaatggcgggtgacgaagctcgaagtcatcttaagccggtaaaaagcttatatttgttacttttaccttcttcttgaaatttgcacctttcttattctgttctttaatactcgtaggatgacgaagctgaagtataacaaatctgaagtatgacgaagctgaagcttgatagttgctacaatattctttcctgtaaaaattctggagagacttttgtaatattattatgtaaaaactcatgtaaatttgtacataccttgtaatatattttgtttccgctatctgtgtacaatctgctttgttgtggacgaaacttcttttttgagccgaaggcgaaaaacatattcccttcttttcgtacataacgaagcataaaaattttcctttttcaaagtctttcctcattcccga

SEQ ID NO: 214936 - DNA, 3194 bp, Zea Mays
ctacgaggacctctccctggcgctcgagaagatgttcagctgcttcatcgctgcctgtgattttaaaggtcaaagtggtctgcataaatcatcgagcaaagacagactgactaatggctcaaaggtggatgccctcaaagatcaggagtatgtccttacatatgaggataaggatgcagactggatgcttgtcggtgatcttccctgggagataggatcgagcttggcgcaagggcacccgacgctggtcctgctacagccggagatcggcctggacatcgacaagctccagatgttgccatcctttgaggcccagggcgcgtggctggtggaggcgtcgctggaggaccacgcaggcctcctcgccgccgtggcacaggccgacgtggtggtctcggccatgtccggggcgcacatccgcagccacaatcactccctgcagcataagctcctcaaggctatcaaggaggctgggaacatcaagggtttgtttggttagaaggggattgaagaaagcttcctttttaatccattttgttgattgagtcgcattcccgaatccatacttgaacatcaggatctcatatgcgaggtatcatctcgggacactggaaagactatggttgatgcttcattaggagagataatgaccacatgttagaagattacctagcaaaatgaagactggtacttaattattgttgtcacatgatgtttttactcgggagatctggaggttggcgaacgcccggggagaaactattcaaggaactattatttagtcaatttgtttcttttggagaaactttgcacagttgagggatataacttagtttttcaagcctgtccatctccagcagatggtttagttgggaaagaatcttatgctcaggtacaaattggtaggcaaattctaggcaaaggagttgggttaacatgggaagaggccaagctctagttatacatggttgttcagatgtgacagcaatgactaatgggacaaatgtcgagataggtccaaaaggccaagaaccaccatcaattagctctggcaatattagttttgttgttcgtgtattggctaagttattgcagatggcgcttgccttttgcttcagctgatcaagatctagaattcgaattgggccatgtgaagcatttcacatttcacgatctgcaaagtgcaacggacaattttaattccaagaatatattaggtcaaggaggttttggaattgtgtataaaggctgtttgagaaatggaactttagtggcagtgaagagattaaaagatcctgatgttaccggtgaagtccagtttcaaacagaagttgagttgattggccttgctgtgcacaggaatctcttgcgtttgtatgaattttgcatgacctctaaagaacgattgcttgtatatccatatatgctaaatggcagtgttgctgaccgcttgagaggaagctatgcattctaaagggtgtctttccacgtcagccaaagaagaaggtggaagggaaccacaagacctactaccacacaaaggatattgcattcctcgctcatgaccctttgatcgagaagttcagggagattaaggtccatcgaaggaaggttaaaaaggctgttgctaagaaaaacagggatcttgcagacaggctgttgaatcggccaccaacttacaagcttgataggcttgtccttgaaaggtatccaacattcgttgatgctcttcgtgacttggatgactgccttacaatggtgcatctgtttgcggcattacctgctgttgacggtgaacgtgttgaggtcaaacgaatccataactgccgcaggttaagccatgaatgcttgacatttatttccgtgaagggcatatattatcaggctgaagttcaaggacaaaagatcacctggctaactccgcatgctcttcagcaagtattaactgatgatgttgatttcaatgtgatgctttcttttctagaattctatgagactcttctaggatttgtgaacttcaaaatctatcattcaataaatgtaaattatcctcctattctggatccacgtctggaagctttagctgttgagctctatgcattgtgccgatacatgtctgctggttccagaagaatgattgggaattcacaaactgacgaagtaatggaagataaggatgagaaaagtaaagctgaggaagtaattgaggaagagaaggttgtgaagaataaagcaagctcaaaagcagatgaatctgagttcagattagcacagcttcaacatcagctcccaaccaatgaacctggtgcactgatgaatcttgtagaagaatcaactgccgatgatgcagatgatgatgatactaaagattgtaaaggtttatttaagaacttaaagttctacttgagtcgagaggtagggagtccctgttatttataattccagcatttggagggactgtttcatgggaaggagaaggagctccatttaaagaaatagacgaagatatcactcaccagctgaaaacttgcccaacacattagaatatattgaaggcgaggttgaagctcttgacgaagttattggtagccatgctgacttctgcgccctggtagcttctcggggcacagctaccgcttttctgaaagctggttgcacgcatggaaaaattgttaataggcccaactacagcttatcatcatcagatctgatagatattccaagcctagctcgaagtatcggaaatagatttatgacccagatttgggtaaatggcgggcggaaaatggcgggtgacgaagctcgaagtcatcttaagccggtaaaaagcttatatttgttacttttaccttcttcttgaaatttgcacctttcttattctgttctttaatactcgtaggatgacgaagctgaagtataacaaatctgaagtatgacgaagctgaagcttgatagttgctacaatattctttcctgtaaaaattctggagagacttttgtaatattattatgtaaaaactcatgtaaatttgtacataccttgtaatatattttgtttccgctatctgtgtacaatctgctttgttgtggacgaaacttcttttttgagccgaaggcgaaaaacatattcccttcttttcgtacataacgaagcataaaaattttcctttttcaaagtctttcctcattcccga

SEQ ID NO: 214937 - DNA, 3162 bp, Zea Mays
cctctccctggcgctcgagaagatgttcagctgcttcatcgctgtggtctgcataaatcatcgagcaaagacagactgactaatggctcaaaggtggatgccctcaaagatcaggagtatgtccttacatatgaggataaggatgcagactggatgcttgtcggtgatcttccctgggagatcgagcttggcgcaagggcacccgacgctggtcctgctacagccggagatcggcctggacatcgacaagctccagatgttgccatcctttgaggcccagggcgcgtggctggtggaggcgtcgctggaggaccacgcaggcctcctcgccgccgtggcacaggccgacgtggtggtctcggccatgtccggggcgcacatccgcagccacaatcactccctgcagcataagctcctcaaggctatcaaggaggctgggaacatcaagggtttgtttggttagaaggggattgaagaaagcttcctttttaatccattttgttgattgagtcgcattcccgaatccatacttgaacatcaggatctcatatgcgaggtatcatctcgggacactggaaagactatggttgatgcttcattaggagagataatgaccacatgttagaagattacctagcaaaatgaagactggtacttaattattgttgtcacatgatgtttttactcgggagatctggaggttggcgaacgcccggggagaaactattcaaggaactattatttagtcaatttgtttcttttggagaaactttgcacagttgagggatataacttagtttttcaagcctgtccatctccagcagatggtttagttgggaaagaatcttatgctcaggtacaaattggtaggcaaattctaggcaaaggagttgggttaacatgggaagaggccaagctctagttatacatggttgttcagatgtgacagcaatgactaatgggacaaatgtcgagataggtccaaaaggccaagaaccaccatcaattagctctggcaatattagttttgttgttcgtgtattggctaagttattgcagatggcgcttgccttttgcttcagctgatcaagatctagaattcgaattgggccatgtgaagcatttcacatttcacgatctgcaaagtgcaacggacaattttaattccaagaatatattaggtcaaggaggttttggaattgtgtataaaggctgtttgagaaatggaactttagtggcagtgaagagattaaaagatcctgatgttaccggtgaagtccagtttcaaacagaagttgagttgattggccttgctgtgcacaggaatctcttgcgtttgtatgaattttgcatgacctctaaagaacgattgcttgtatatccatatatgctaaatggcagtgttgctgaccgcttgagaggaagctatgcattctaaagggtgtctttccacgtcagccaaagaagaaggtggaagggaaccacaagacctactaccacacaaaggatattgcattcctcgctcatgaccctttgatcgagaagttcagggagattaaggtccatcgaaggaaggttaaaaaggctgttgctaagaaaaacagggatcttgcagacaggctgttgaatcggccaccaacttacaagcttgataggcttgtccttgaaaggtatccaacattcgttgatgctcttcgtgacttggatgactgccttacaatggtgcatctgtttgcggcattacctgctgttgacggtgaacgtgttgaggtcaaacgaatccataactgccgcaggttaagccatgaatgcttgacatttatttccgtgaagggcatatattatcaggctgaagttcaaggacaaaagatcacctggctaactccgcatgctcttcagcaagtattaactgatgatgttgatttcaatgtgatgctttcttttctagaattctatgagactcttctaggatttgtgaacttcaaaatctatcattcaataaatgtaaattatcctcctattctggatccacgtctggaagctttagctgttgagctctatgcattgtgccgatacatgtctgctggttccagaagaatgattgggaattcacaaactgacgaagtaatggaagataaggatgagaaaagtaaagctgaggaagtaattgaggaagagaaggttgtgaagaataaagcaagctcaaaagcagatgaatctgagttcagattagcacagcttcaacatcagctcccaaccaatgaacctggtgcactgatgaatcttgtagaagaatcaactgccgatgatgcagatgatgatgatactaaagattgtaaaggtttatttaagaacttaaagttctacttgagtcgagaggtgcctagggagtccctgttatttataattccagcatttggagggactgtttcatgggaaggagaaggagctccatttaaagaaatagacgaagatatcactcaccagctgaaaacttgcccaacacattagaatatattgaaggcgaggttgaagctcttgacgaagttattggtagccatgctgacttctgcgccctggtagcttctcggggcacagctaccgcttttctgaaagctggttgcacgcatggaaaaattgttaataggcccaactacagcttatcatcatcagatctgatagatattccaagcctagctcgaagtatcggaaatagatttatgacccagatttgggtaaatggcgggcggaaaatggcgggtgacgaagctcgaagtcatcttaagccggtaaaaagcttatatttgttacttttaccttcttcttgaaatttgcacctttcttattctgttctttaatactcgtaggatgacgaagctgaagtataacaaatctgaagtatgacgaagctgaagcttgatagttgctacaatattctttcctgtaaaaattctggagagacttttgtaatattattatgtaaaaactcatgtaaatttgtacataccttgtaatatattttgtttccgctatctgtgtacaatctgctttgttgtggacgaaacttcttttttgagccgaaggcgaaaaacatattcccttcttttcgtacataacgaagcataaaaattttcctttttcaaagtctttcctcattcccga

SEQ ID NO: 214938 - DNA, 3679 bp, Zea Mays
ctctccctggcgctcgagaagatgttcagctgcttcatcgctgtggtctgcataaatcatcgagcaaagacagactgactaatggctcaaaggtggatgccctcaaagatcaggagtatgtccttacatatgaggataaggatgcagactggatgcttgtcggtgatcttccctgggagataggatcgagcttggcgcaagggcacccgacgctggtcctgctacagccggagatcggcctggacatcgacaagctccagatgttgccatcctttgaggcccagggcgcgtggctggtggaggcgtcgctggaggaccacgcaggcctcctcgccgccgtggcacaggccgacgtggtggtctcggccatgtccggggcgcacatccgcagccacaatcactccctgcagcataagctcctcaaggctatcaaggaggctgggaacatcaagggtttgtttggttagaaggggattgaagaaagcttcctttttaatccattttgttgattgagtcgcattcccgaatccatacttgaacatcaggatctcatatgcgaggtatcatctcgggacactggaaagactatggttgatgcttcattaggagagataatgaccacatgttagaagattacctagcaaaatgaagactggtacttaattattgttgtcacatgatgtttttactcgggagatctggaggttggcgaacgcccggggagaaactattcaaggaactattatttagtcaatttgtttcttttggagaaactttgcacagttgagggatataacttagtttttcaagcctgtccatctccagcagatggtttagttgggaaagaatcttatgctcaggtacaaattggtaggcaaattctaggcaaaggagttgggttaacatgggaagaggccaagctctagttatacatggttgttcagatgtgacagcaatgactaatgggacaaatgtcgagataggtccaaaaggccaagaaccaccatcaattagctctggcaatattagttttgttgttcgtgtattggctaagttattgcagatggcgcttgccttttgcttcagctgatcaagatctagaattcgaattgggccatgtgaagcatttcacatttcacgatctgcaaagtgcaacggacaattttaattccaagaatatattaggtcaaggaggttttggaattgtgtataaaggctgtttgagaaatggaactttagtggcagtgaagagattaaaagatcctgatgttaccggtgaagtccagtttcaaacagaagttgagttgattggccttgctgtgcacaggaatctcttgcgtttgtatgaattttgcatgacctctaaagaacgattgcttgtatatccatatatgctaaatggcagtgttgctgaccgcttgagaggaagctatgcattctaaagggtgtctttccacgtcagccaaagaagaaggtggaagggaaccacaagacctactaccacacaaaggatattgcattcctcgctcatgaccctttgatcgagaagttcagggagattaaggtccatcgaaggaaggttaaaaaggctgttgctaagaaaaacagggatcttgcagacaggctgttgaatcggccaccaacttacaagcttgataggcttgtccttgaaaggtatccaacattcgttgatgctcttcgtgacttggatgactgccttacaatggtgcatctgtttgcggcattacctgctgttgacggtgaacgtgttgaggtcaaacgaatccataactgccgcaggttaagccatgaatgcttgacatttatttccgtgaagggcatatattatcaggctgaagttcaaggacaaaagatcacctggctaactccgcatgctcttcagcaagtattaactgatgatgttgatttcaatgtgatgctttcttttctagaattctatgagactcttctaggatttgtgaacttcaaaatctatcattcaataaatgtaaattatcctcctattctggatccacgtctggaagctttagctgttgagctctatgcattgtgccgatacatgtctgctggttccagaagaatgattgggaattcacaaactgacgaagtaatggaagataaggatgagaaaagtaaagctgaggaagtaattgaggaagagaaggttgtgaagaataaagcaagctcaaaagcagatgaatctgagttcagattagcacagcttcaacatcagctcccaaccaatgaacctggtgcactgatgaatcttgtagaagaatcaactgccgatgatgcagatgatgatgatactaaagattgtaaaggtttatttaagaacttaaagttctacttgagtcgagaggtagggagtccctgttatttataattccagcatttggagggactgtttcatgggaaggagaaggagctccatttaaagaaatagacgaagatatcactcaccaggttgattccatttgcaataatttattacaccaaagtttaactatatagacggagacattgtgtaccatccctaaagtaagatgccactctaagtaccacgacagcaatgccatactagggcaatagttactacaatacaatttttgtatgtggctaactgttcatattttacactctaccatcatatgatcatatctagcgaagtaaaataaaatggcctgtggatttttttatgcttgctagtatccatattgtaataaaaaataggagtataatatcacatcctcacactataacagtttaaagaatgaattgctcaaacaactagaaaaatctgagcaggaaaagaaacaccttgaagcaagtcttaaaactgagatgcaaaataattcaaatttgcaaaaatccttgaaggagcttcaagagaaatgcctaagcttcggcagccgatgcgtgcagcggctgaaggatgtgtttcattctattggagccagctctgaaaaatttacactttcagctgaaaacttgcccaacacattagaatatattgaaggcgaggttgaagctcttgacgaagttattggtagccatgctgacttctgcgccctggtagcttctcggggcacagctaccgcttttctgaaagctggttgcacgcatggaaaaattgttaataggcccaactacagcttatcatcatcagatctgatagatattccaagcctagctcgaagtatcggaaatagatttatgacccagatttgggtaaatggcgggcggaaaatggcgggtgacgaagctcgaagtcatcttaagccggtaaaaagcttatatttgttacttttaccttcttcttgaaatttgcacctttcttattctgttctttaatactcgtaggatgacgaagctgaagtataacaaatctgaagtatgacgaagctgaagcttgatagttgctacaatattctttcctgtaaaaattctggagagacttttgtaatattattatgtaaaaactcatgtaaatttgtacataccttgtaatatattttgtttccgctatctgtgtacaatctgctttgttgtggacgaaacttcttttttgagccgaaggcgaaaaacatattcccttcttttcgtacataacgaagcataaaaattttcctttttcaaagtctttcctcattcccga

SEQ ID NO: 214939 - DNA, 1843 bp, Zea Mays
tttgcatgacctctaaagaacgattgcttgtatatccatatatgctaaatggcagtgttgctgaccgcttgagaggaagctatgcattctaaagggtgtctttccacgtcagccaaagaagaaggtggaagggaaccacaagacctactaccacacaaaggatattgcattcctcgctcatgaccctttgatcgagaagttcagggagattaaggtccatcgaaggaaggttaaaaaggctgttgctaagaaaaacagggatcttgcagacaggctgttgaatcggccaccaacttacaagcttgataggcttgtccttgaaaggtatccaacattcgttgatgctcttcgtgacttggatgactgccttacaatggtgcatctgtttgcggcattacctgctgttgacggtgaacgtgttgaggtcaaacgaatccataactgccgcagcggatatttattattttcttatcatatgatgaaccatgaatgcttgacatttatttccgtgaagggcatatattatcaggctgaagttcaaggacaaaagatcacctggctaactccgcatgctcttcagcaagtattaactgatgatgttgatttcaatgtgatgctttcttttctagaattctatgagactcttctaggatttgtgaacttcaaaatctatcattcaataaatgtaaattatcctcctattctggatccacgtctggaagctttagctgttgagctctatgcattgtgccgatacatgtctgctggttccagaagaatgattgggaattcacaaactgacgaagtaatggaagataaggatgagaaaagtaaagctgaggaagtaattgaggaagagaaggttgtgaagaataaagcaagctcaaaagcagatgaatctgagttcagattagcacagcttcaacatcagctcccaaccaatgaacctggtgcactgatgaatcttgtagaagaatcaactgccgatgatgcagatgatgatgatactaaagattgtaaaggtttatttaagaacttaaagttctacttgagtcgagaggtgcctagggagtccctgttatttataattccagcatttggagggactgtttcatgggaaggagaaggagctccatttaaagaaatagacgaagatatcactcaccagctgaaaacttgcccaacacattagaatatattgaaggcgaggttgaagctcttgacgaagttattggtagccatgctgacttctgcgccctggtagcttctcggggcacagctaccgcttttctgaaagctggttgcacgcatggaaaaattgttaataggcccaactacagcttatcatcatcagatctgatagatattccaagcctagctcgaagtatcggaaatagatttatgacccagatttgggtaaatggcgggcggaaaatggcgggtgacgaagctcgaagtcatcttaagccggtaaaaagcttatatttgttacttttaccttcttcttgaaatttgcacctttcttattctgttctttaatactcgtaggatgacgaagctgaagtataacaaatctgaagtatgacgaagctgaagcttgatagttgctacaatattctttcctgtaaaaattctggagagacttttgtaatattattatgtaaaaactcatgtaaatttgtacataccttgtaatatattttgtttccgctatctgtgtacaatctgctttgttgtggacgaaacttcttttttgagccgaaggcgaaaaacatattcccttcttttcgtacataacgaagcataaaaattttcctttttcaaagtctttcctcattcccga

SEQ ID NO: 214940 - DNA, 2330 bp, Zea Mays
cttgtatatccatatatgctaaatggcagtgttgctgaccgcttgagaggaagctatgcattctaaagggtgtctttccacgtcagccaaagaagaaggtggaagggaaccacaagacctactaccacacaaaggatattgcattcctcgctcatgaccctttgatcgagaagttcagggagattaaggtccatcgaaggaaggttaaaaaggctgttgctaagaaaaacagggatcttgcagacaggctgttgaatcggccaccaacttacaagcttgataggcttgtccttgaaaggtatccaacattcgttgatgctcttcgtgacttggatgactgccttacaatggtgcatctgtttgcggcattacctgctgttgacggtgaacgtgttgaggtcaaacgaatccataactgccgcagcggatatttattattttcttatcatatgatgaaccatgaatgcttgacatttatttccgtgaagggcatatattatcaggctgaagttcaaggacaaaagatcacctggctaactccgcatgctcttcagcaagtattaactgatgatgttgatttcaatgtgatgctttcttttctagaattctatgagactcttctaggatttgtgaacttcaaaatctatcattcaataaatgtaaattatcctcctattctggatccacgtctggaagctttagctgttgagctctatgcattgtgccgatacatgtctgctggttccagaagaatgattgggaattcacaaactgacgaagtaatggaagataaggatgagaaaagtaaagctgaggaagtaattgaggaagagaaggttgtgaagaataaagcaagctcaaaagcagatgaatctgagttcagattagcacagcttcaacatcagctcccaaccaatgaacctggtgcactgatgaatcttgtagaagaatcaactgccgatgatgcagatgatgatgatactaaagattgtaaaggtttatttaagaacttaaagttctacttgagtcgagaggtagggagtccctgttatttataattccagcatttggagggactgtttcatgggaaggagaaggagctccatttaaagaaatagacgaagatatcactcaccaggttgattccatttgcaataatttattacaccaaagtttaactatatagacggagacattgtgtaccatccctaaagtaagatgccactctaagtaccacgacagcaatgccatactagggcaatagttactacaatacaatttttgtatgtggctaactgttcatattttacactctaccatcatatgatcatatctagcgaagtaaaataaaatggcctgtggatttttttatgcttgctagtatccatattgtaataaaaaataggagtataatatcacatcctcacactataacagtttaaagaatgaattgctcaaacaactagaaaaatctgagcaggaaaagaaacaccttgaagcaagtcttaaaactgagatgcaaaataattcaaatttgcaaaaatccttgaaggagcttcaagagaaatgcctaagcttcggcagccgatgcgtgcagcggctgaaggatgtgtttcattctattggagccagctctgaaaaatttacactttcagctgaaaacttgcccaacacattagaatatattgaaggcgaggttgaagctcttgacgaagttattggtagccatgctgacttctgcgccctggtagcttctcggggcacagctaccgcttttctgaaagctggttgcacgcatggaaaaattgttaataggcccaactacagcttatcatcatcagatctgatagatattccaagcctagctcgaagtatcggaaatagatttatgacccagatttgggtaaatggcgggcggaaaatggcgggtgacgaagctcgaagtcatcttaagccggtaaaaagcttatatttgttacttttaccttcttcttgaaatttgcacctttcttattctgttctttaatactcgtaggatgacgaagctgaagtataacaaatctgaagtatgacgaagctgaagcttgatagttgctacaatattctttcctgtaaaaattctggagagacttttgtaatattattatgtaaaaactcatgtaaatttgtacataccttgtaatatattttgtttccgctatctgtgtacaatctgctttgttgtggacgaaacttcttttttgagccgaaggcgaaaaacatattcccttcttttcgtacataacgaagcataaaaattttcctttttcaaagtctttcctcattcccga

SEQ ID NO: 214941 - DNA, 1829 bp, Zea Mays
gggggttcattaatgtatgtgatttgatgcgctgaggcatcgacatcacgggtgtaagcagctagctgctgaggtctgccttgccttatcgtcgcgattaataaagctgtttctttctctgcttgcattgccaaagccgcggtttgggctctgcagacgtaacgtaacgatgccaaccctatattttgaaaagccaacgagagcggtttgagctcctagtaaagtagtaatagcgtgcctgtttctacagggcttcccgtactgacactgatacctgcctggatattattagtaggatatagtatatattatggtctcaagggctgctaccgattggagggtcaggtcttcattcgcaaaacacagacatttgacttgcgctctccctttctctctctctctctctgtgtatgtgtgtgtgtctcaggttctcagcaaagagcagggaggataagcttggaatgccttggcagtgagagctgcaactgcaacaaagcaaccggcgtccatggtggagagggaaaggggcgagggagaagccagggccctggccagcgggccagggcagcagcagcagcaggaaggagcagcggagggcgagagggtcgagaaagaaggagacgagcgggaggaggaggatcgagacgacgaagccgtggagtggtccgagatacggctcgccatcgaggagctgtccccggcggcccatctcaagcgcgtcgacggcgatggcaaggcggccgcgtcgtccctgcccacgctccgcttcctggcgctgtcgcacctcctcgttcgagtgctcgataagatcgggccgaccatggccgtgctgaggctcgacgtccaacggaacatcgagaggctgcaggagctgtacctgctggacccagccacgtactcgaccctgacggggatagtggagaaggaagtgaaggagggcacagcgaggaaggtcgacagctgcgcaagggcgatcctgtggcttgctagctgcgctgttacagaggctggaggaggactctacgcagcagcagcagcagagcctcgcgcagctcgtggaggccgcgtacgaggccaccctgaagccgtggcacggctggatctcctcggcggcgtgcaagatagcgtggaagctcatccccgagaggaaggtcttcaccggcatgctgctggggacgggccaggactgctctgcacttgaagacgagatcgggcggctcgcgctgttgcttcggcccttccttgatgacatccactccatgatggccaagttcagactggacaggctcaagtcgacgtgatccatggcgaacccgacgcaagcccaagccatggacatggacatggtccgatccccgtccttcgctgtgaatactgcctgccctggcttccgtcttcgagtcgcatttgcttgcggttaggtctagtttagacgctgctgctctctagtctgtacataggtcttttgcttgtagaatagactcccaagatctgcatgcggtgcccttttttcgtggtaggctacgtttggacagcgcccctcctcaattgcctctgcctgtgccaatacgttggccggccaaactttggctgcccaagaaacggccaactttggcagggaaaatgaactagcaagttgttcacgatgccaaactttggcaggcagcaaccatccaaacatacaagatgccaatagtcaacgaccttttattggtttggctggctggtaatgggctctaaattttacgctataaaatttaagaatcgagttatatttttatttatttttaaactaaaattaccttttaggccgaagaaacatttgaatc

SEQ ID NO: 214942 - DNA, 1544 bp, Zea Mays
gttgaatccggtagtggtgttgatggtgaggagggagatctcgctgcagcaagtgcatacttccatccctcattcatttcagtgtacaaactccgaccgtcaaatggtgtctgcttcagactagtcacgtaggatgactgagtctgcaatctccatcaaaggctcaaggcactcaggagaaaacttgcgggcgaacatgtaagagtgtgtcatgttcgacttcctcagctccctgatcaagctcgcagatacctctccaggcccatacaagtgtgggtggcctgcaaccgaatccgtccaatttacccttgttagggtatacttagtacacccctcagaatcctgcatatccagtagtgtggggaagtaatgctcctcggggtagcatgaatccctgcgctcgatcagacagggcaacttgaacttcttccaaagcctcatatccctcacgaccatgatggcatgccttctcgtgagcacaaagaactgtgagccagcccggaactgatcatatggaacctcagggagcatggcatcgtcacctcgagcatagtacctgtcatgcagcagcttggtgtcgttgtccatgttgtccattatctctatgaaactgcggtggcggctatgagggccagcattgtcagagaggagtgcattgtagagggttgggaactggtggagcgggatgcaggactgcgacaggagcgcgaagaactggttgttggggtcgtcaaggagcgcggtggctaggaggcggcgcgcggcggatatgagggtaggggaggcgcgctgcgtggccttggcggggacgaagcggccgcggaaggatggcgtgggcggcatctcgaggacggagtaggggtcggcgtggacgtagaggttgaagaggtgggtgtgcccgcggaagaacttctcccagagcggggagaagacgaggtccgagttggtgaggaagaggaaggcgatcttgggcgccgggcggcgccagaaaaagtaggagcccgcggaggtgggcgtgggagtggctgacgaggaggagaggatggctcggcggaagagggcaaggtcgtcggactcgtcggcgtccgggatggccgggagcgtcttgggcgggagcaggcgcggcgcgaggaggaagacgaccgggatggagatgagcagcagcagggagagcaggaacggcgaggcgtacggcgacgtcatctccggccagcggctgctgccgcgcctgcgggctcttggatcaggattcgcagaatacgcgcaggccgcggccaatgcagcggaggatcttgggtgcgtgaggaaccgggcaagcaattgctccaaaatggtgtggcaatggcgcggcaccgctaggctgggaaccgacgacaccccatgcggggcaggatctggctcgagatccgcgaacggcaggccaggagaacccgggccaagagcggggacgggacagccaggaacaacgcagccggagcaggaaacccggcgcgggaccgggaatggcggatccgggacagcgtgcgactgacctcgcgcggagg

SEQ ID NO: 214943 - DNA, 1930 bp, Zea Mays
gcccgcttcggttcttcctcccagtcccgtccgtcgcttggctgctgtagaggtcgcccgtcgccgtctcccccctgtccggtccggctatctctctctccctccctgctcggctttgacctcagctcgcaatgaactctctactgcggccgccgctgccggggccgacgcctagactgagcgcgaggcgtcgggtctcgtcgccagcgccggtgcgggtcggctcggcggtgctggccggcggcgagcgcagatgccaacgggggctagcagtggcgacgtcggtggctccgtcgtggatggaggaggccggggtggcggtgctggaggagggcgggcggaggaacccgtcagtgtcggactcgtaccgcgcggcggggctgccgcagcccaacgccacggtgctggatgcgcaggcgcgggtgtgcacagggcccgcacagacgcgcccgctcggggaggagcaggccatgcgcgtcctcgacactatcctccgctccgcaattggagaactcaaagaggagccagtctctagtgcacagttaggtgcattcttcgcaggcatgacaataagagctaactcgtttccagaggccacccaatggagtgagggcgagcgacgcgccatgagcatattttggccacgccttgtgcaggtccttcctcctgaggtgaagtttatagcagaccctgaaggcacgatcttgggtgcgaatggtttagcagagcctcggtatgttggccaaggaactggagagatgagactcgtcggtgctctgagggaagtgcttgctggtggccatttaggttatgaggaggttcaatgcgtactaaaggatatcctaccaattggatcgagttcagattcgacagtggttagtcaagcactgctagcggcatttttgattggacagcggatgaatagagaaactgatcgtgagctcaaagcgtattgcctagcctttgatgatgaactaggtcctcctccggttgctgacgtcaagtcgttgacacactatggtgaaccatatgatggcaatacacgtttttttaagagtactctatttgttgcagcggttcgagcctgctatggtgaatcctgcctcctccacggtgttgaatggatgccacccaagggtggaataacagaaggacaaatgcttaaattcatgggtgcaaacatacacttatccccaacacaagccaagatattgttggaggatgaaactgctggttttgcatacttgaatcttcaggaagcttgtccaccattatattcgattattggactcagggagcatattaagaaacggccaccgttggctacctctgagaaagttcaacaatttgtgaggttatgcctatggatacctttaaagattgaaaactttaccttgaaagaattttcagagcctcctgatctttgaacaactaataaggtaaagatttagtaaatcactgtcacactttcttaataaattgccaggtggtttactagctttagctttcacctttcaaagtatctcttcactaggatattttacgcaaaaaaaatctcgtgggacttttttaaggtttaaggactgtcaagataattcaagtatttcttatgatgatacaatttggtgtcattgaagttgaagatctttattttttttttctcgaaagcgcaggagaactgcgcgatattatattaaagaagaaggacaattacagaagaaaacaaaagaggcgcctatggcggccagtaacaggcatacagaaacccatccatgtctaaagaagaacctaacacaaataaccacaatgctagctaactagcagggatgcctggaatgggggcggtgagcaaagacaacttttttgcaccagccatctcccataagtgaacctccaactcaactcttctaatagcatcagcaatactggg

SEQ ID NO: 214944 - DNA, 1627 bp, Zea Mays
actgaaaatagcaatttaggttaggtaggctggaatagttccagaacgcgcccttggggaagctcggaaaagcgtcacctactcacctgactcgacacctaccgcgctctccgggtggtgcgagtgcgagtgccacgagccccacgaaagcaaaggaacagacgcacgcggaccgtagcgctgtcacgttgcgtcacgcggcactatctcagccagccgtccagcacagcggaccggtccatcgatcaccgatggcctcctcgctccgccatttcgcgggcctcggctgtttctccgccgcggcgtctagctctgcctccaccagcttcctgcccggctacgcccccgacttctgcgtattcgtggcgctccgtccgatcaagccgcccgccaccgccgtagcgaaccctcccgcctctccatctccgctggaggaggagcaccggcagcaggccgccgttccatggcacagcgacgacccgccagcaccatccgttcctgcgccgctgcgggtggggatcgtcgggttcggcaactttggacagttcatcgcgggcggcgtgcagcggcagggccacaccgtgctcgcggcctccagaaccgactactctgcctactgcgcccagcatggaattcgcttcttcaggagcgtcgacgcgctgtgcgaggagcagccggacgtgctgctcatctgcagctccatcctgtccacggagagcgtcgtccgagccatccccttccacaagctccgccccgacaccatcgtcgccgacgtgctctccgtcaaggagttcccccgcaatctcctcctcgagaatccgtcacttgatttcctctgaatttcctggtgatgacgaagacgtacgcttatgctggaccggccaactgcactgcactgcacttacaagggaatggtgcattgccgtgtctggaatccggaacgaggatcgttgatacactgatgaacacatcgccaatctgtcaggttctcccaccaggattcgggatcatctgcacacacccgatgttcgggccggagagtggcaaacacggctggggcaagcttcccttcgtcttcgacaaggtccgtgtcgcggacgacggggatcaggcggcaacgtgcgaccggttcttgagcatatttgagcaggagggttgtaggatggtggagatgtcgtgtgccgagcatgatcgctacgccgcggggagccagttcatcacgcacacaattgggagggttctgtcacagctgaacctcagttcaaccccaatcaacaccaagggctacgagaccctgctgcaacttacccagaacaccgtaagcgacagtttcgacctgtactacgggctcttcatgtacaatatcaatgccacagagcagctcgacaggctggaaatggcatttgagaaggtgagacagatgttgtctggcaggctccacgacttcataagaaagcagattgtggagagggcggacccttcaggaaaattggcaaatggcaggtccagttctcctgcagcgcaccacttatcgacattaacagaagaaaataagacacgtatgcgaggtgacgatgaacttgaagtccaacctttgggtcaacatctgaactacaaggttatctca

SEQ ID NO: 214945 - DNA, 1728 bp, Zea Mays
actgaaaatagcaatttaggttaggtaggctggaatagttccagaacgcgcccttggggaagctcggaaaagcgtcacctactcacctgactcgacacctaccgcgctctccgggtggtgcgagtgcgagtgccacgagccccacgaaagcaaaggaacagacgcacgcggaccgtagcgctgtcacgttgcgtcacgcggcactatctcagccagccgtccagcacagcggaccggtccatcgatcaccgatggcctcctcgctccgccatttcgcgggcctcggctgtttctccgccgcggcgtctagctctgcctccaccagcttcctgcccggctacgcccccgacttctgcgtattcgtggcgctccgtccgatcaagccgcccgccaccgccgtagcgaaccctcccgcctctccatctccgctggaggaggagcaccggcagcaggccgccgttccatggcacagcgacgacccgccagcaccatccgttcctgcgccgctgcgggtggggatcgtcgggttcggcaactttggacagttcatcgcgggcggcgtgcagcggcagggccacaccgtgctcgcggcctccagaaccgactactctgcctactgcgcccagcatggaattcgcttcttcaggagcgtcgacgcgctgtgcgaggagcagccggacgtgctgctcatctgcagctccatcctgtccacggagagcgtcgtccgagccatccccttccacaagctccgccccgacaccatcgtcgccgacgtgctctccgtcaaggagttcccccgcaatctcctcctcgaggactaagttttagctctacgtatccaacacccacacccttacgcctactctgtggtccagaatccgtcacttgatttcctctgaatttcctggtgatgacgaagacgtacgcttatgctggaccggccaactgcactgcactgcacttacaagggaatggtgcattgccgtgtctggaatccggaacgaggatcgttgatacactgatgaacacatcgccaatctgtcaggttctcccaccaggattcgggatcatctgcacacacccgatgttcgggccggagagtggcaaacacggctggggcaagcttcccttcgtcttcgacaaggtccgtgtcgcggacgacggggatcaggcggcaacgtgcgaccggttcttgagcatatttgagcaggagggttgtaggatggtggagatgtcgtgtgccgagcatgatcgctacgccgcggggagccagttcatcacgcacacaattgggagggttctgtcacagctgaacctcagttcaaccccaatcaacaccaagggctacgagaccctgctgcaacttacccagaacaccgtaagcgacagtttcgacctgtactacgggctcttcatgtacaatatcaatgccacagagcagctcgacaggctggaaatggcatttgagaaggtgagacagatgttgtctggcaggctccacgacttcataagaaagcagattgtggagagggcggacccttcaggaaaattggcaaatggcaggtccagttctcctgcagcgcaccacttatcgacattaacagaagaaaataagacacgtgtatcccccgctcttactctagcctctcctacgctttagttaaacttgtataaatttgaccatgttttgttaataaaaaaatattgatatatacagatctaaatgaa

SEQ ID NO: 214946 - DNA, 5298 bp, Zea Mays
tgaaatacaaagccttaaaagcatcatttcacagctaaacactgagaagaatgcagctgtgcttcaacaccagcagtctgtggagctggtttcggtactcgaatctcagctgtcaaagctacagtcagagctagatgagactgagcagagagtacagttgctaacacaagatcttgaaaagaagaaagaagaagcagataatgtccatctcaagctgcaagatgaatgccataggcgtatgcaaattgaagcagctcttctcatgacagagggtctgcattcccagttgcaagaaaaaatgcaaatgttgacacaagattttgatggatcaacaaagaagctcagtgagttggaaaataataagttagacctggagagcacactgaaagaactgaataacaccattttaggtttgaactcggagaaggatgcagcactccttcaacaacagcagtctttacagaaagtatctaatttggagttagaactctcaatgatgcagttggaaatggacaagtctgaacaaaaaattctcttactggaacaagaaattgcacggaagaatggaagtgtcgacagcctggagataagtttgaaagatgaatgtgagaagaggctacaagcccaaaaaatgtattcccagtcacaggaagacgttagtaggttgtacatagagatagagaagcagaatggcaagttgaatgagttggagaacttgatatccgaacttaacaacaccatcctacttataaacactgagaaagatgccaccctccatgagaaccagcagtcctcagtgagaatatcagatcttgaatctgaactcatggccttgaaaaccgaactggaaaatgttgaagggaaagttcatgcggtagagcaagaactcatatataagaaagaagaagcagataacctccaaattagcctacaagatgaaattcaaaaacgagttgaaggtgaagaatctcttcttatgatgacaaatcttcactctgggtcacaaaatgaagtgagagggttggcattggaacttgagaagctgaatggtaatttaagacaggtggagaacagtaaggttgatcttgagaacattgtaaccaagcataccgaggaaattcatatccttcgtgaacggaatctttctactgaccttatgataaaggaccttcatcttgaattggacgcactgaaggatttgaacgtgaaacttcagacagaaatggggttacacataggtgaaaaagaagcacttcagagagaatttacttctcaaagggaagagaagaaaaatctagaggggatacaccacactctggttgatgagatgagtaccctaaaaaccactgcaacaatgaaccagaagctgattgaggaactgcaaattacaaactcaaaactgaaggaggtgtgtgcaaagagtgaggttgagaaggcacttctctcagaaaaactccaagaggtggagaagctatctgaagaatgttcactcttggagaactcactttcagatgcaaatgctgaaatggatgcattgagggataaaataaaggcacttgaggctttagaaagctctctcaaggatataatttcctgtcatgtttctgagaaggctgttcttgtatcagagctagagatccttggtaaaagattatctgatgcttcagagaagaattctatcatggatagctcattgtttgatatgaaaatggacctagaagacttgagaacaaagttgaaagattctgaagaatcctgtcaggctctccttgcaaataattcagctctttctggtgaagtggatgcattaagagagaagataaaagcactacaggactcagaaagctctctgaaggatgcaatttcctgttatgtttctgaaaaggctgttcttgcatcagagctagagatccttggtaaaagtttatctgaggtttcagagaagaactctattttggatatctcattatgtgatatgaaaactgagctagatgaattgagaacaaagctgaaagattctgaagaatcctgccaggctcacctaacaaataattcagctctttctgctgaaaagaacaatctgttctctcagttggagagcattacattggctatgaaagccctagaaggtatgcatgccaatctggaacagaagcactcctctgtatcaagagagaaggattttgcatatgatcaagtaagggaactgcaggatcaattgagaattaagaacgaggaatttgaagtgtcagcaaagtcacatcaacttcaagcaaacagctatgagaaacaaattttttctctacaagagaaaaaccattatatggaggaggtgcttcaacaggaacaacagaaaaacataaatgcttctattagtacagttattttggagaactgtttggtcgatgagcaagacaagaaggttgctcttttcactgaatgccaaaagtatgctgtggaaaatcattcagccaatatgttagtttcagagttaatggaggaagctagatatcatggggaggagagaaaaaaattgctagcgcacaatgaaaaactgagggaagggatttcaaatcaaatgaagtttctgaatatctgcaaagatctaggacctgctgatttagctgaggacgaagttctgttgcagactgtttcagatgaaactattaacattatgagacttaaggatgaaactgaagatgtgaataggctcatggacaccgagctctcagttctctcagtagttttgttgcaagtagggatggagcttagagacttgcatttacagaagtgtgcccttgagaaagaagtggagagtggagaaaaagagacgctttctttgcaaaatcaaaaccagcagatgttggaacagaatgaacaactaaggagtggattacaggaaagcagtgaaggggtggaggtgctgaaaactgaagtatttgtgatacaagagaaactatcttgcttgagagagtcctaccagacctcacaagatgaaatttccaacctgactaaaaaaaatgagtccttgtctaaggaataccagtccttgagtgagaagtacaatgccttggaagatgagaatgatactatttttgaagaatgcatgatgctcaagaacttgtgcctgttctttaggggacataataatgagattgcatctgcattggcttctcttaccgatgagatggctttgttgagtttggctaagggcgacctcgatctccaagttaatgagctgaacagaaggtcagtaatgcttgaatcagaaaattatcacttaaaggactatatcatctacttggtagagattctcaggactagattagtcctttcagagtttgatttggacaccaatcgaagtgtcttccaggagttagttgtggaacttgagaattgcatgacacagttggtgcagaaggatgatgagctaatggaagcagaagagaaggttcaactcttgcaagaaaagaaccgggaactctgtggagttgttgggtctcttcaggttgcaatggaaggtgctaaagtggtgaaaggagaactggagaagaaaatcacaatactgattgaacagtgttctagcaaggacgacaaaattttacttcttcaccaagacaatgaggcattgcaatcagagattgagcaatgtgagagggaatttgttgagctgatggatgatgccattactttttcagtgaattctgcggtctatgaagaaaaagcattcgagcttatgatgaatggtaaagctacagagaatagagcaatatcccaaaaggagttgctaatgaaggagatctcttctcgagatgctaatattgaggagttgcagaaaaggctggctggtattcaggatgaacatgcagaactaaaagctgagttgaacacacatctagctctcatagcatcattggttgatcatgtcagtgtgctggaagaagatgttcgttctctgtcaaaaccatgtagtacagaaggcaaagaggaaactgcaagggtacatcatgtgcaagagggcgacgatgggctggaatctcattgcttagtcaatggaactccaaagttacaagggttgattgcaagaatagaagcacttcaagtggttgtattaaatgctaaagatcgtcaagatcgtaaatcagccgagtctgcagctaaactggcggcagcaagtgcagaaattcaagagcttaaaacaagaggcggctcacgcatggaggcaaaagaaatatgttctgacaatgagaaacaagatgttgaggtctccaaagggaagcaagtccagatcatgaaggatattgagctggaccaaatatctacttgccctccatatggcgctggagctgccctctacccccatggaactggtgcaaatgctgaactagatgacgatatgcttcagctgtgggaggctgcggagaggagctgcaagaaccaaacggccaagtcctcgtcatctgagcacgacatacaggcggtcgaggatctggagagcgagtgcccttcgtctgagctagcgaggggaagagaccttggaaccaataagctagaagtgccaaagggagctgtagagcctcacgaggcgtggagcaagaacgtgcttgagaggctcacttctgatgcccagaggctgttgagcatccaagcgagcatcgaggaactgaagaagaaaatggaggggtcctcgaagggtacgaattctgagtacggcagtgtgagcgctcaggtgcatgagacggagggtcttgtcttggaacagatcaattccaacaacaagttgagcaggaaggctgagaactaccccgcattgtcagataatacgagcaccgagcgaggagggtattccagcaggaggaagatctcggagcaggtgcagagagggtcggaaaacgtggcaaggttggaactggagctccagaagatccagtacgtcttgctgaagcttgaggaggagcacgagtacacaaggctcaaagtctctgataagcgcactcgtgtgcttttgagggactacctgtatggaaggaaggaccgtggaggcgggcagaagggaaagaagaagcgggtcccgttctgtggttgtgttcgttcgaaatcaagaacagagccgtagcctttttgttctcgcacccctgcgcgttggaagaggtggtggtgtcctttaggatgaatcccctttgtaactgagtttagtatcctgatgaagaagcctatgtactagatttttggtttcctgtctagatgaggccgttcttctagccagtttaatctcaggttcagactgcagaagcaatg

SEQ ID NO: 214947 - DNA, 4731 bp, Zea Mays
cggcattgcgttgctccgccccgcgcggcgcctgctcactcccattttccattgacctcgcccctctcgtccgtctcctccctccctgtcccggagcttcgatttttcccttcgagaggagccacatgattcaccgtcggaaagaggcaaggcaacggaacccgagccgctccgcttgaggtgaggtggggtccccgtctgggtcgggggggcattaccttgccgcccccgcgcgaagggagattcccgccacctatagtcgtcctctcgtgggccattttctgccttggggagagcatagacgcagcgccgcgggaaagccgggcgccgcatggatcgagacatctggtgttcccgtctcaagagtcttggcgtagcggggcggaggaggaggacggggttccggagcgcagggccgcggcggcacgccgggatttcagaggcgccgcgctgttgagtgttgacgtcttctcgatcctgggaggagctgatttctctgctgagggcctggggtggctctcggttcagtccctctccctgtgcagtttatttgctttttttaggtagttgggggctacttgttggttgggagaggagctgaattattgcgagctgcattcttggagattcttgctgctcgaatctcagctgctcttcttcagagggaattgccaattgcgttctgcagtaagattgatttggacaaggttggagcgaattggctgctacggcggggagttccaaaaaaaacccgtgaggttttggccttgtcgacttcttggggcatctgggagtagctttggtgcagtgattcacttgagtctggaggaatggcgccgacgaagaggctggagaaacttaagctcagcacattgttgactttcatgcgttgtcacgggggctctagtgatgaccacttacggattgggacagtggggttctccagagtcgtgtacgtcaatgagcctgataggcttgaagaggagggattcagttacctgctgaatgaggtgtcgacgacaaagtacaatctggccaccttcctgcccaagtccctcttcgagcagttcaggagggtggccaatttctacttccttgtctctggtatccttgccttgactccacttgcaccatacacggcagtgagcgcgcttgcgccgctgtgtgtcgtgattgtagccaccatggcaaaagaaggggttgaggactggcggaggaaacaacaggatcacgagcttaacaatcggatagtcaaagtgcatagggggaatggtcattttgaagagtcaaaatggaagaatatcaaagttggagatgtaataaaggtggagaaggataatttcttccccgctgatatgattctgctttcatctaactatccggatggaatctgttatgtagagaccatgaacctcgatggtgaaacaaatttgaaaattaaacaagctctcaaggtgacattggatttacatgaggacataaagttcagggaagtcagacaaacaataaaatgcgaagacccaaatgcgaacctctactcctttgtcggttcaatggaatggagaggccagcagtatcccctgtcatccctacagcttcttcttcgagactcaaaactacggaacactgactacatatatggggctgtcatcttcacaggccatgatacaaaagtgatgcaaaatgcaactgatccaccatctaaaagaagtaaggttgagaagaaaatggatcaaattatttatcttctaatgtcttctctactcatgattgcattacttggttctgtcttctttgggatctggaccaaagaggacctaagagatggtgagctcaaacggtggtatcttcggccagatgctactaccatattctatgatccaaagagagcagctctggcatctttctttcatttgttgacgtccttgatgctgtacagctacttcatacccatttctttgtatatatccatcgagatggtcaagatcttgcaagctctattcatcaaccaggatattcgaatgtatcatgaagaatcagataagccaactcatgctcgtacttcaaatctaaatgaagaactgggtatggttgatacaattctatcggataagactggaacattgacgtgcaacatgatggagttcatcaagtgttcaattgctggaactgcctatggtcaaggcgtcactgaagttgagagagctatggctatgaggaaaggtgctaggttagatgatgacattgaaaatggagaccacaaagacaaaaaaaatgacaacagtccccatgttaaagggttcaatttcaaggatcaacgaataatggatgggaaatgggttcatgagcctaacagagttatgataagagattttttccggctcctagccatctgccacacatgcattgctgaaatagatgaaaatgagaaggtttcatatgaagctgagtcccctgatgaagctgcatttgttattgcagcaagagaactagggtttgagttttacaagaggtcgctagcaactataattgttcgtgaacggaatccaagtcagaatgttgttgagaaaagaaagtatgaactcctaaatatgttggagttcagtagctcaaggagtcggatgtctgtgatagtgaaggaaccagagggaagaatattacttctcagcaagggtgcagacagtgtgatgttcaaaaggcttgcaccaattggaagaaaatttgaagaagaaacaagaagtcacataaatcagtattctgactctggtctaagaacctttgttctggcataccgtgtcttagatgagaaagagtacaaggaattcaatgaaaaattgaacgctgccaaagcatctgtaagtgctgataaagatgaaaaaattgagcaggttgctgatagcattgaacgggacttgattcttcttggtgctaccgcagttgaagataaacttcaacaaggggtgcctgaatgcatagacaagcttgcacaagccggaattaagatgtgggtcctgacaggcgataagctggagacagctatcaatattgggtttgcttgtagccttcttagacaaggcatgacacagataatcgtcacactggaacaacctgatatcatcgcattggagaaaaatggtgacaaaccaaaaattgctaagatgatgttaagtttaagttcttggatcttgctctcaagtgtgcatcagtgatatgttgccgatcttcaccaaaacagaaggcactggttacaagacttgttaaagaagtaacacataaagtgactttagcaataggtgatggggcaaatgatgttggcatgcttcaagaagctgacataggggttggcatcagtggtgctgaaggaatgcaggctgtcatggctagtgatgttgctgttgcccaattccgcttcttggaacggctacttctggtgcatggacattggtgttaccggcgtatttcactgatgatatgctatttcttctacaagaatgttacttttggtgtaactatctttctgtacgaagcatttgcatctttctccgggaagccagcttataatgattggttcttgtcactatataatgttttcttcacctcccttcctgtcattgctctgggggtatttgaccaggatgtgtctgctaggctgtgcatacagtatccacagctataccaagaaggagtgcaaaatatattattcagttggcgtcggatacttggctggatgtttaatggtgttatgaatgctgtcttaatctttttcttctgcatcactgccttcgaggaccaggcattccgtcgcgacggtcaagttgcgggcttggatgctcttggtgtcgtcatgtacacttgtattgtatgggttgttaactgtcaaatggcgctctctgtgaactacttcaccataatccagcacatattcatatggggcagcattgcagtatggtacctcttcctcttggtttatggtgccataaacccgaggttctcaactacagcctacatggtcttcatcgaacagctggccccagccctctcattttggctggtgacactttttgttgtggtggcaacacttgtcccctactttagctatgccgccatccagatccgctttttcccgatgttccacaacaagattcagtggaaacggtacttggggaaggctgaagatccagaggtggcaaggcagttgtcatcaaaacaccgcacatcattgcagcacaggatggttggtatctctgctcgtcgtgacggcaaggctgtgcaaataacaaaggagacagagctacaagttcaggagtagcattgtcagtagattttgcgttttgtacagcttataggatcttgtctccagcaagatgacagctgaactgattgggacttgagatgttcctggattgctgcttctgtgatgcctgtcatgggagttgttccagttcagatgatagagcaagaccacagattgcttagataggtcgcaaggaggccaagagaatacctgctgcaaagttcaatttttagcagttcaaggattttgtgggttttttccctgcttctcttacacatgtaaatgcttgtaaccagattggtagaatttctcctttttaccccccttgcctgccctcgactgtttcaaacaataatggtaagacttctgatttgtgtgacttcatgcttttattatttggaaagaatcataaatgggtgtcttacaatctaaagttg

SEQ ID NO: 214948 - DNA, 4653 bp, Zea Mays
cggcattgcgttgctccgccccgcgcggcgcctgctcactcccattttccattgacctcgcccctctcgtccgtctcctccctccctgtcccggagcttcgatttttcccttcgagaggagccacatgattcaccgtcggaaagaggcaaggcaacggaacccgagccgctccgcttgaggtgaggtggggtccccgtctgggtcgggggggcattaccttgccgcccccgcgcgaagggagattcccgccacctatagtcgtcctctcgtgggccattttctgccttggggagagcatagacgcagcgccgcgggaaagccgggcgccgcatggatcgagacatctggtgttcccgtctcaagagtcttggcgtagcggggcggaggaggaggacggggttccggagcgcagggccgcggcggcacgccgggatttcagaggcgccgcgctgttgagtgttgacgtcttctcgatcctgggaggagctgatttctctgctgagggcctggggtggctctcggttcagtccctctccctgtgcagtttatttgctttttttaggtagttgggggctacttgttggttgggagaggagctgaattattgcgagctgcattcttggagattcttgctgctcgaatctcagctgctcttcttcagagggaattgccaattgcgttctgcagtaagattgatttggacaaggttggagcgaattggctgctacggcggggagttccaaaaaaaacccgtgaggttttggccttgtcgacttcttggggcatctgggagtagctttggtgcagtgattcacttgagtctggaggaatggcgccgacgaagaggctggagaaacttaagctcagcacattgttgactttcatgcgttgtcacgggggctctagtgatgaccacttacggattgggacagtggggttctccagagtcgtgtacgtcaatgagcctgataggcttgaagaggagggattcagttacctgctgaatgaggtgtcgacgacaaagtacaatctggccaccttcctgcccaagtccctcttcgagcagttcaggagggtggccaatttctacttccttgtctctggtatccttgccttgactccacttgcaccatacacggcagtgagcgcgcttgcgccgctgtgtgtcgtgattgtagccaccatggcaaaagaaggggttgaggactggcggaggaaacaacaggatcacgagcttaacaatcggatagtcaaagtgcatagggggaatggtcattttgaagagtcaaaatggaagaatatcaaagttggagatgtaataaaggtggagaaggataatttcttccccgctgatatgattctgctttcatctaactatccggatggaatctgttatgtagagaccatgaacctcgatggtgaaacaaatttgaaaattaaacaagctctcaaggtgacattggatttacatgaggacataaagttcagggaagtcagacaaacaataaaatgcgaagacccaaatgcgaacctctactcctttgtcggttcaatggaatggagaggccagcagtatcccctgtcatccctacagcttcttcttcgagactcaaaactacggaacactgactacatatatggggctgtcatcttcacaggccatgatacaaaagtgatgcaaaatgcaactgatccaccatctaaaagaagtaaggttgagaagaaaatggatcaaattatttatcttctaatgtcttctctactcatgattgcattacttggttctgtcttctttgggatctggaccaaagaggacctaagagatggtgagctcaaacggtggtatcttcggccagatgctactaccatattctatgatccaaagagagcagctctggcatctttctttcatttgttgacgtccttgatgctgtacagctacttcatacccatttctttgtatatatccatcgagatggtcaagatcttgcaagctctattcatcaaccaggatattcgaatgtatcatgaagaatcagataagccaactcatgctcgtacttcaaatctaaatgaagaactgggtatggttgatacaattctatcggataagactggaacattgacgtgcaacatgatggagttcatcaagtgttcaattgctggaactgcctatggtcaaggcgtcactgaagttgagagagctatggctatgaggaaaggtgctaggttagatgatgacattgaaaatggagaccacaaagacaaaaaaaatgacaacagtccccatgttaaagggttcaatttcaaggatcaacgaataatggatgggaaatgggttcatgagcctaacagagttatgataagagattttttccggctcctagccatctgccacacatgcattgctgaaatagatgaaaatgagaaggtttcatatgaagctgagtcccctgatgaagctgcatttgttattgcagcaagagaactagggtttgagttttacaagaggtcgctagcaactataattgttcgtgaacggaatccaagtcagaatgttgttgagaaaagaaagtatgaactcctaaatatgttggagttcagtagctcaaggagtcggatgtctgtgatagtgaaggaaccagagggaagaatattacttctcagcaagggtgcagacaggttgctgatagcattgaacgggacttgattcttcttggtgctaccgcagttgaagataaacttcaacaaggggtgcctgaatgcatagacaagcttgcacaagccggaattaagatgtgggtcctgacaggcgataagctggagacagctatcaatattgggtttgcttgtagccttcttagacaaggcatgacacagataatcgtcacactggaacaacctgatatcatcgcattggagaaaaatggtgacaaaccaaaaattgctaaggcatcaaagcaacgggttatgggtcagatagaggatggaatcaaacaaattccaccttcaactcaaattagcactgcatcattcgcgctaatcattgatggtaaatcactaacttatgctttggaagatgatgttaagtttaagttcttggatcttgctctcaagtgtgcatcagtgatatgttgccgatcttcaccaaaacagaaggcactggttacaagacttgttaaagaagtaacacataaagtgactttagcaataggtgatggggcaaatgatgttggcatgcttcaagaagctgacataggggttggcatcagtggtgctgaaggaatgcaggctgtcatggctagtgatgttgctgttgcccaattccgcttcttggaacggctacttctggtgcatggacattggtgttaccggcgtatttcactgatgatatgctatttcttctacaagaatgttacttttggtgtaactatctttctgtacgaagcatttgcatctttctccgggaagccagcttataatgattggttcttgtcactatataatgttttcttcacctcccttcctgtcattgctctgggggtatttgaccaggatgtgtctgctaggctgtgcatacagtatccacagctataccaagaaggagtgcaaaatatattattcagttggcgtcggatacttggctggatgtttaatggtgttatgaatgctgtcttaatctttttcttctgcatcactgccttcgaggaccaggcattccgtcgcgacggtcaagttgcgggcttggatgctcttggtgtcgtcatgtacacttgtattgtatgggttgttaactgtcaaatggcgctctctgtgaactacttcaccataatccagcacatattcatatggggcagcattgcagtatggtacctcttcctcttggtttatggtgccataaacccgaggttctcaactacagcctacatggtcttcatcgaacagctggccccagccctctcattttggctggtgacactttttgttgtggtggcaacacttgtcccctactttagctatgccgccatccagatccgctttttcccgatgttccacaacaagattcagtggaaacggtacttggggaaggctgaagatccagaggtggcaaggcagttgtcatcaaaacaccgcacatcattgcagcacaggatggttggtatctctgctcgtcgtgacggcaaggctgtgcaaataacaaaggagacagagctacaagttcaggagtagcattgtcagtagattttgcgttttgtacagcttataggatcttgtctccagcaagatgacagctgaactgattgggacttgagatgttcctggattgctgcttctgtgatgcctgtcatgggagttgttccagttcagatgatagagcaagaccacagattgcttagataggtcgcaaggaggccaagagaatacctgctgcaaagttcaatttttagcagttcaaggattttgtgggttttttccctgcttctcttacacatgtaaatgcttgtaaccagattggtagaatttctcctttttaccccccttgcctgccctcgactgtttcaaacaataatggtaagacttctgatttgtgtgacttcatgcttttattatttggaaagaatcataaatgggtgtcttacaatctaaagttg

SEQ ID NO: 214949 - DNA, 4854 bp, Zea Mays
cggcattgcgttgctccgccccgcgcggcgcctgctcactcccattttccattgacctcgcccctctcgtccgtctcctccctccctgtcccggagcttcgatttttcccttcgagaggagccacatgattcaccgtcggaaagaggcaaggcaacggaacccgagccgctccgcttgaggtgaggtggggtccccgtctgggtcgggggggcattaccttgccgcccccgcgcgaagggagattcccgccacctatagtcgtcctctcgtgggccattttctgccttggggagagcatagacgcagcgccgcgggaaagccgggcgccgcatggatcgagacatctggtgttcccgtctcaagagtcttggcgtagcggggcggaggaggaggacggggttccggagcgcagggccgcggcggcacgccgggatttcagaggcgccgcgctgttgagtgttgacgtcttctcgatcctgggaggagctgatttctctgctgagggcctggggtggctctcggttcagtccctctccctgtgcagtttatttgctttttttaggtagttgggggctacttgttggttgggagaggagctgaattattgcgagctgcattcttggagattcttgctgctcgaatctcagctgctcttcttcagagggaattgccaattgcgttctgcagtaagattgatttggacaaggttggagcgaattggctgctacggcggggagttccaaaaaaaacccgtgaggttttggccttgtcgacttcttggggcatctgggagtagctttggtgcagtgattcacttgagtctggaggaatggcgccgacgaagaggctggagaaacttaagctcagcacattgttgactttcatgcgttgtcacgggggctctagtgatgaccacttacggattgggacagtggggttctccagagtcgtgtacgtcaatgagcctgataggcttgaagaggagggattcagttacctgctgaatgaggtgtcgacgacaaagtacaatctggccaccttcctgcccaagtccctcttcgagcagttcaggagggtggccaatttctacttccttgtctctggtatccttgccttgactccacttgcaccatacacggcagtgagcgcgcttgcgccgctgtgtgtcgtgattgtagccaccatggcaaaagaaggggttgaggactggcggaggaaacaacaggatcacgagcttaacaatcggatagtcaaagtgcatagggggaatggtcattttgaagagtcaaaatggaagaatatcaaagttggagatgtaataaaggtggagaaggataatttcttccccgctgatatgattctgctttcatctaactatccggatggaatctgttatgtagagaccatgaacctcgatggtgaaacaaatttgaaaattaaacaagctctcaaggtgacattggatttacatgaggacataaagttcagggaagtcagacaaacaataaaatgcgaagacccaaatgcgaacctctactcctttgtcggttcaatggaatggagaggccagcagtatcccctgtcatccctacagcttcttcttcgagactcaaaactacggaacactgactacatatatggggctgtcatcttcacaggccatgatacaaaagtgatgcaaaatgcaactgatccaccatctaaaagaagtaaggttgagaagaaaatggatcaaattatttatcttctaatgtcttctctactcatgattgcattacttggttctgtcttctttgggatctggaccaaagaggacctaagagatggtgagctcaaacggtggtatcttcggccagatgctactaccatattctatgatccaaagagagcagctctggcatctttctttcatttgttgacgtccttgatgctgtacagctacttcatacccatttctttgtatatatccatcgagatggtcaagatcttgcaagctctattcatcaaccaggatattcgaatgtatcatgaagaatcagataagccaactcatgctcgtacttcaaatctaaatgaagaactgggtatggttgatacaattctatcggataagactggaacattgacgtgcaacatgatggagttcatcaagtgttcaattgctggaactgcctatggtcaaggcgtcactgaagttgagagagctatggctatgaggaaaggtgctaggttagatgatgacattgaaaatggagaccacaaagacaaaaaaaatgacaacagtccccatgttaaagggttcaatttcaaggatcaacgaataatggatgggaaatgggttcatgagcctaacagagttatgataagagattttttccggctcctagccatctgccacacatgcattgctgaaatagatgaaaatgagaaggtttcatatgaagctgagtcccctgatgaagctgcatttgttattgcagcaagagaactagggtttgagttttacaagaggtcgctagcaactataattgttcgtgaacggaatccaagtcagaatgttgttgagaaaagtatgaactcctaaatatgttggagttcagtagctcaaggagtcggatgtctgtgatagtgaaggaaccagagggaagaatattacttctcagcaagggtgcagacagtgtgatgttcaaaaggcttgcaccaattggaagaaaatttgaagaagaaacaagaagtcacataaatcagtattctgactctggtctaagaacctttgttctggcataccgtgtcttagatgagaaagagtacaaggaattcaatgaaaaattgaacgctgccaaagcatctgtaagtgctgataaagatgaaaaaattgagcaggttgctgatagcattgaacgggacttgattcttcttggtgctaccgcagttgaagataaacttcaacaaggggtgcctgaatgcatagacaagcttgcacaagccggaattaagatgtgggtcctgacaggcgataagctggagacagctatcaatattgggtttgcttgtagccttcttagacaaggcatgacacagataatcgtcacactggaacaacctgatatcatcgcattggagaaaaatggtgacaaaccaaaaattgctaaggcatcaaagcaacgggttatgggtcagatagaggatggaatcaaacaaattccaccttcaactcaaattagcactgcatcattcgcgctaatcattgatggtaaatcactaacttatgctttggaagatgatgttaagtttaagttcttggatcttgctctcaagtgtgcatcagtgatatgttgccgatcttcaccaaaacagaaggcactggttacaagacttgttaaagaagtaacacataaagtgactttagcaataggtgatggggcaaatgatgttggcatgcttcaagaagctgacataggggttggcatcagtggtgctgaaggaatgcaggctgtcatggctagtgatgttgctgttgcccaattccgcttcttggaacggctacttctggtgcatggacattggtgttaccggcgtatttcactgatgatatgctatttcttctacaagaatgttacttttggtgtaactatctttctgtacgaagcatttgcatctttctccgggaagccagcttataatgattggttcttgtcactatataatgttttcttcacctcccttcctgtcattgctctgggggtatttgaccaggatgtgtctgctaggctgtgcatacagtatccacagctataccaagaaggagtgcaaaatatattattcagttggcgtcggatacttggctggatgtttaatggtgttatgaatgctgtcttaatctttttcttctgcatcactgccttcgaggaccaggcattccgtcgcgacggtcaagttgcgggcttggatgctcttggtgtcgtcatgtacacttgtattgtatgggttgttaactgtcaaatggcgctctctgtgaactacttcaccataatccagcacatattcatatggggcagcattgcagtatggtacctcttcctcttggtttatggtgccataaacccgaggttctcaactacagcctacatggtcttcatcgaacagctggccccagccctctcattttggctggtgacactttttgttgtggtggcaacacttgtcccctactttagctatgccgccatccagatccgctttttcccgatgttccacaacaagattcagtggaaacggtacttggggaaggctgaagatccagaggtggcaaggcagttgtcatcaaaacaccgcacatcattgcagcacaggatggttggtatctctgctcgtcgtgacggcaaggctgtgcaaataacaaaggagacagagctacaagttcaggagtagcattgtcagtagattttgcgttttgtacagcttataggatcttgtctccagcaagatgacagctgaactgattgggacttgagatgttcctggattgctgcttctgtgatgcctgtcatgggagttgttccagttcagatgatagagcaagaccacagattgcttagataggtcgcaaggaggccaagagaatacctgctgcaaagttcaatttttagcagttcaaggattttgtgggttttttccctgcttctcttacacatgtaaatgcttgtaaccagattggtagaatttctcctttttaccccccttgcctgccctcgactgtttcaaacaataatggtaagacttctgatttgtgtgacttcatgcttttattatttggaaagaatcataaatgggtgtcttacaatctaaagttg

SEQ ID NO: 214950 - DNA, 2815 bp, Zea Mays
cacagacccaaagcaacccgaccgttgccggtgccgcctcagccccaggaaaaaggaagcccctcgtccgtcaacatccctggtcctgtcatccacgcgcgcacgttcaccggcggcccctctctttcagttcggtcggagggccaacccgacctccgaggcctgagcggcctcgatgtcggcgcggcgggcggccaagagccagcacgcggcggcgacgccgaggaccatcaacctcaacctggcgaggaggccgggcggcgggaggcccagccggggcgcggggcgcgcgcagacccgcccggcgccgccgcagccggcgaggcaggtgcaggtcaacctcggcgcgctgttcgagatggagcgccgcgtgcgcgggctggagtccgcaccgccatcgccggcgccggcgtcgcagtcgcaggaagacgccgaggaacgggaggagaagtggcagttccaggcggagatactccgcgccgagtgcaacttcctccggatggagcgcgaggtcgcgctgcgcaagctcgaccgccaccgcggccagatggaggccgcgctcaagtccgccgtcgaaacgctcgtatcggggaggaagaaggtcgacgggaagggcgacgtcggcgttgcggcggcgctggacgaggggatcgaggacctcgaggagatgatggaggagctgcgtgtggagaaggagagcgggaggagggcgatgggcggtgcccgtgagctgcagcggagccgcggcaggaacttcgatcggcaggcgtcctcgctccgccggcgcctcgagaagatgccgcctgccaatcccgatcccctcgtcaaggacatccgcgagatcgccctgcccgtccccgcgccaccgccaccgccaccagcggctgagcaaagcggcgacgatgaacgcgtccacggcgccaacacctctgatgtggaaatgctgaggatgaagatggaggggatgtcaaagggcatgcgcgagcggatggcggagtacagccggcgcctggaagccgtcgcctccggcgacaacgctggctgccagtcaaggaaatgcggcaaccggcacagccgaaaggcgagcgcaggcagccagagaagctggagcgggggcagcaccgcgagcaacggcaacgccccgtcggccctcgacgccggcccgcacgcccgcagccgccagaacgtggcggcggagaagcgtcagcagcagcacgtgattatgtctggagagtgcaaattggtgggctccgcaagttgcagggactgcagggaaatcatgtggaagataatggagcaagtaaatgcagaatctgatcaatggactgagatgcaagatatgttggagcaggtcaggttggagatgcaagagctgcagtcttccagagatacctggcagcatcgggctatggcttctgacatcagtctccgctccttaaattctcattactggagtggaaaaatcggggacaggcgtacgaacagcgtgcggaggagctgcacaggaagatttcagagctcgaaagcaagctacacacttccaaagcccatttaccagccccagctgttattcctaaccaaaatcagtggtcagatgcgtgcaagatggagcacccaagaggaaatcctcagcaccagccatccaaggaacccggcaaggaggagatcaagaagcacgtcctcatctgccgcgtgaagcactcgcccagcagcgtgctcccgaagcggtcgccgttccaggagataggcaacatcaggttgccgcggcatcggtgagcatgggtgggcaggtggccatgtgttatgtgagactgtgacctgtgtgagtgatgggctgctgcagcgaaactgcgaaggattcaggcgcaagagagaactctctttcggtttggcgtccacagtagcatcgatcagcttctacgtaataaataatttatttgtgacccactgatgagtaacatggcccgcctgactgtcagatcggtagtaataatcataagtagtcagtacagtgatgaataggtgagatatgtatgtaacggggtaacgctttatgtatgtgcaattttgttcctgctccatccaattttccatttttttgcccactgtgtgatttgttcatggtacattggtatatgagctcgagtcaaattctgattagcgctgaaatgaacacagaacactgatggtacattggtatatggtttcatcatgcacactgatgcaagcacaactgcacaagtaacaatggaaattgaggctttattggatttggatctaaatatactacaggtacagcatccatatgcaactaacagcaacgatcttttctaccttgaagatcagcaacggtatagatgattacagcaccaagtcagtggttaatcatagagagccaagcgcagtacgtgcacacgagcttctgagagatgtacacgtacacggcgaaggagaagctcatgagcgtgacgtccttccagtcccccttctgcttggggctcaggctctcccgcgctgccatcccggccttcaccacgtcgccgcgcagcctctcggccgtggcagcccaccacggggtcgtcttctcctcaccacctcctcccccgccgccgccgcttgccggcggcccggacgggaggtgactttggcagacgaggtaggatctcggcctagacgacacggcgtcgctacatcgtcgcctgcagccctgcggaacatgtggggtgctgctgatggtaaacatgcacagggaagccatgcatggacggtcggtcagatctagcctgtggccttgtgggctggagatgggtttgtt

SEQ ID NO: 214951 - DNA, 1325 bp, Zea Mays
gagggcggttccggagagacgcggccgcatgggtccaccaccaaagccttgggagcgatctggaactgaaggaacttcaggtccagcacctttcaagcccccatctggtggaagcaccagtgatgttgttgaagcttctggtaccgctaaacccagcgaaaatgttactgcgatggaggggaatgccgctcctaatgtaaatagcactgtttcaaggcctatgccacagcggccttggcagcagacaggttatggaaacacctatggagggtatggtggatccaacatgtatagttcatatggtggatttggcaacacttatggtaccggtggactcggaaatagcatgtactcgagttacggaggaggttatggtggtggcatgtacggcggtggcatgtatggaggaggcatgtatggtgggatgggaggttatggtggttacggcatgggcggaatgggtggtatgggcatgggtccatacggtaatcaggatccaaattcgatgggccctcctgcatccccgccaggtttctgggtgtccttcctccgagtgatgcatggtgttgtcaatttcttcggacgaatctcattccttgttgaacagaacactcaggcatcctatttcttcatgacagcaatgctgcagctcttcgaccggtccggtatgctctacggtgagcttgcacggtttgtgctgcgtttgctaggagtgagaagaaagccaaagaaggggggcagcattcaggggccagaagcgctggcgttcgagggacctagccggcagtctaccgaggcaccgaaaacgaacaactgggacaacgtctggggaaactgagatcatgcctatgggtgcaacgagttgaatcatatagaagaagtgcaagggctatgacctatgggagtttgcttgccttttgattcatcaaaaagaagattgcggccagataccgcctttggtggcaacttaggggaagctgtgaagaagaaactgctgggcctctcttgcttttcccagctttgccttgatgtacctgcgagggccatggcccatgacactggtaggttttttttttcatcgcaactgtaaggtttggtgaagaacggtttcacagtgcactgatatatatgtagctgcttgctgctgttgtgatatcagtgtgggtatcgattgtttgtatatctctatctgggtaaatagtgtccgccttcgaaaagaatacatcaaatgtttgtgcaccctttacagcctcgtctaacttggttttgaatttggacttggacttgttgagagtccccaccccatgcaagtgtcgattctgttg

SEQ ID NO: 214952 - DNA, 3469 bp, Zea Mays
cttcctcccgtggcgccaaaaatttcatttcattttccccaaacccatcccccaattcccccccaaaaccttcccagtgtgtcttctcgacgaaggaagccatctcgtctctctccgctccggcgattgatcggcggcgccgatggtgttcctgcagcgcagccgccccgtcaacccccgcaagcgcccggcaccgccgcccgagctcgagcccgagcccgagccccccaggcccggcccggacgcttcatccgccgtcgacgcggcggcggcgctgctcgcggacgcgggctgcacgctcctcgtcccgccgcaccagccgccgtccctcccctcgccgcactccttcgctgcccgcctctcccgcaagctctccgccggcggggacgcctcctcgccctcggcccccgcccggcgcctcctcgagggcctcgccgccttcgcggcctcctcccccgcgcggctccgccagctgctcctcccgacggcgccgcacgagccgagccttgcccgcgcgctcctctccgtccccgcgctccagccgggcctgctcgcgctgctcctcgagaagctgcccgagcacttcggcggcgacggcgcgctcgacggatcgccgctgcaggacgacgtggggaggctcatcgtgtcgcagttccgctggctcgatttcctcgccgacgccgacgccttcgtcgacaagctcgtggaggtgctctccgtggccccgcaccgcctgaagaaggagatcatcggctcgctcccggagatcgttggcgacaagagccacgccgccgtggtcgccgcgctcgagaagctcctgcaggaggactccgaaatcgttgtcgccgtgctcgatgtgctgtcggatcttaacctcaacgaggagctgcaggagcaggcagtgactgttgcgatatcatgcatccggacaattgctccagaccagacgcctcatctgctcaggttcttgctgttgtcggctacaccagtcaatgctgggaggattatatcgcagatacgtgagcagctcaagtttgttggtgttgtcgatccacgggctgcacggagtaagaagctcaaagggaaggcatcagctaatagcactgatggggcaatacttgatacactgagatcaggcctacggtttaagaatatgctttgtgaggctttcctgaaggagctgaagtcagttgaccacccgagggatcacaaagtgattgatgtttggctcatcatgcttatctatgccaatggtggtgctctagagaaggctgcaaagaaaatactgaagtccaagatcttacatgagtgcataagagagacactgtttgatcaatgtattcatgggaacactgaactggtaaaggaacatttcatgtcatacctctcagttagcgattacttgttggcttgcaaggaagagaaagctagagagtttgcggcttatttgttcacagcactatttgaagagttcactgatacatactccaggcaagagcttgtgggttcattggtcactcatataggatctggggttagttacgaagtttcatctgctctggatatcatgatttctttaacatccaacaattcggaagaactgattcctatatcttcacacataactggaatattggattacttggagagttttggcgaagataatcttcggaaggtttatgatatcttctgtcgtttggcactggctgctggcttcaatactggttcaggtggctcttcagttgctaacgaggttctaatggtggtgaggaagcaggttagtaatccagacatgaagtatagacggatgggaataattggggttttaaggatagtttctactatcgcttccactgatgtcaatgctgctgtgaactgttcatcatctcagcaaccaaattgtgaggaggccctagaattgctgaagatgtctgtcaactcatgcaaatttgtgacattactcttgatttttctatatgatgaattagctgctttgctggatagcaaagttatccactcttcaattcatgactgggtaggagagcatgttgcagagttatttgagacaccttttcttgccgatcttgaaaatggtgaactaccagagaaatatctatgtgatggcatagaaggagaattatggatgaagttggatggaaatatctctccagtatgtgtaaatattatgcgtctagcccccacttcgccccaaaagtaaaatatcattagttattaatgatgtcattgttttgatcccaatcctgcttgcagatccttatgtcccaattttcacttttaacaacaattgaacgtttaggaaatgaaggctcacttggtggaatagatgcactacttggctgtcctttgcaccttccctctaccaagcacttggatggagctaactggggaaacctgtcaggattgcagaaaaaaacagtgtgctattccctatactatgcaataaactggatcagggagttgctcaatgctttcggcacacaggttgaaagtagggttgataatgtttcacagaaagcaaggaacgagacagcagtaaaacttctgaagcgtctaagaaatctgatattacttgaaggcttgctgaatgcatttctcaaagattatccattatctttacctgagttgcgatatcttggggattgctctggatcagcaagcaccagcaaattcaacattccaaagaacatgggagaggagagcataaatggtgcttccagcaaaagacagaagggttgcaagggcaaagtctcagaaaaagtgaatcctgatgataaactcaagcaacctacaatactggatgctttcaaaagagcaggagtaacagtcagtcaagcaacaaataaagcttcttcacaaccatcatcaagtggaatgatgtcaaaggatatcgaacaagatgctactgatcctggtgaacttgggcttatagatttaatggcagcaccagttaaactagatatgcaaagatacaaattcagaactatccgtgcaacgtgcttgtctttgttgaactactcagagtgtcaaggttcatcttcttaccttcaaactgagttaccaacatatctatatcttctccgtgatctgcataacaaattagataatctgaatccttcaatcaagccttttcttagtacttctaaagcaaaatatactcctactcattgccataagagtacacaagattttcttgacaaaatccagccactattcttagttttaaggaagcatctggatggagcagtttcaatgatcaaagatggtaaccgtctattccataatttctgcttcctgttacttttacagtgtttgaattaataattagtgggctgagtcggtttcttaatggtcggggttgtatgtgctgggagggatcccccccctttatggatcttttcttcttagtgaaatgacacacagctttcctgcgttgcttgagaaaaacaat

SEQ ID NO: 214953 - DNA, 3431 bp, Zea Mays
cttcctcccgtggcgccaaaaatttcatttcattttccccaaacccatcccccaattcccccccaaaaccttcccagtgtgtcttctcgacgaaggaagccatctcgtctctctccgctccggcgattgatcggcggcgccgatggtgttcctgcagcgcagccgccccgtcaacccccgcaagcgcccggcaccgccgcccgagctcgagcccgagcccgagccccccaggcccggcccggacgcttcatccgccgtcgacgcggcggcggcgctgctcgcggacgcgggctgcacgctcctcgtcccgccgcaccagccgccgtccctcccctcgccgcactccttcgctgcccgcctctcccgcaagctctccgccggcggggacgcctcctcgccctcggcccccgcccggcgcctcctcgagggcctcgccgccttcgcggcctcctcccccgcgcggctccgccagctgctcctcccgacggcgccgcacgagccgagccttgcccgcgcgctcctctccgtccccgcgctccagccgggcctgctcgcgctgctcctcgagaagctgcccgagcacttcggcggcgacggcgcgctcgacggatcgccgctgcaggacgacgtggggaggctcatcgtgtcgcagttccgctggctcgatttcctcgccgacgccgacgccttcgtcgacaagctcgtggaggtgctctccgtggccccgcaccgcctgaagaaggagatcatcggctcgctcccggagatcgttggcgacaagagccacgccgccgtggtcgccgcgctcgagaagctcctgcaggaggactccgaaatcgttgtcgccgtgctcgatgtgctgtcggatcttaacctcaacgaggagctgcaggagcaggcagtgactgttgcgatatcatgcatccggacaattgctccagaccagacgcctcatctgctcaggttcttgctgttgtcggctacaccagtcaatgctgggaggattatatcgcagatacgtgagcagctcaagtttgttggtgttgtcgatccacgggctgcacggagtaagaagctcaaagggaaggcatcagctaatagcactgatggggcaatacttgatacactgagatcaggcctacggtttaagaatatgctttgtgaggctttcctgaaggagctgaagtcagttgaccacccgagggatcacaaagtgattgatgtttggctcatcatgcttatctatgccaatggtggtgctctagagaaggctgcaaagaaaatactgaagtccaagatcttacatgagtgcataagagagacactgtttgatcaatgtattcatgggaacactgaactggtaaaggaacatttcatgtcatacctctcagttagcgattacttgttggcttgcaaggaagagaaagctagagagtttgcggcttatttgttcacagcactatttgaagagttcactgatacatactccaggcaagagcttgtgggttcattggtcactcatataggatctggggttagttacgaagtttcatctgctctggatatcatgatttctttaacatccaacaattcggaagaactgattcctatatcttcacacataactggaatattggattacttggagagttttggcgaagataatcttcggaaggtttatgatatcttctgtcgtttggcactggctgctggcttcaatactggttcaggtggctcttcagttgctaacgaggttctaatggtggtgaggaagcaggttagtaatccagacatgaagtatagacggatgggaataattggggttttaaggatagtttctactatcgcttccactgatgtcaatgctgctgtgaactgttcatcatctcagcaaccaaattgtgaggaggccctagaattgctgaagatgtctgtcaactcatgcaaatttgtgacattactcttgatttttctatatgatgaattagctgctttgctggatagcaaagttatccactcttcaattcatgactgggtaggagagcatgttgcagagttatttgagacaccttttcttgccgatcttgaaaatggtgaactaccagagaaatatctatgtgatggcatagaaggagaattatggatgaagttggatggaaatatctctccagtatgtgtaaatattatgcgtctagcccccacttcgccccaaaaatcccaatcctgcttgcagatccttatgtcccaattttcacttttaacaacaattgaacgtttaggaaatgaaggctcacttggtggaatagatgcactacttggctgtcctttgcaccttccctctaccaagcacttggatggagctaactggggaaacctgtcaggattgcagaaaaaaacagtgtgctattccctatactatgcaataaactggatcagggagttgctcaatgctttcggcacacaggttgaaagtagggttgataatgtttcacagaaagcaaggaacgagacagcagtaaaacttctgaagcgtctaagaaatctgatattacttgaaggcttgctgaatgcatttctcaaagattatccattatctttacctgagttgcgatatcttggggattgctctggatcagcaagcaccagcaaattcaacattccaaagaacatgggagaggagagcataaatggtgcttccagcaaaagacagaagggttgcaagggcaaagtctcagaaaaagtgaatcctgatgataaactcaagcaacctacaatactggatgctttcaaaagagcaggagtaacagtcagtcaagcaacaaataaagcttcttcacaaccatcatcaagtggaatgatgtcaaaggatatcgaacaagatgctactgatcctggtgaacttgggcttatagatttaatggcagcaccagttaaactagatatgcaaagatacaaattcagaactatccgtgcaacgtgcttgtctttgttgaactactcagagtgtcaaggttcatcttcttaccttcaaactgagttaccaacatatctatatcttctccgtgatctgcataacaaattagataatctgaatccttcaatcaagccttttcttagtacttctaaagcaaaatatactcctactcattgccataagagtacacaagattttcttgacaaaatccagccactattcttagttttaaggaagcatctggatggagcagtttcaatgatcaaagatggtaaccgtctattccataatttctgcttcctgttacttttacagtgtttgaattaataattagtgggctgagtcggtttcttaatggtcggggttgtatgtgctgggagggatcccccccctttatggatcttttcttcttagtgaaatgacacacagctttcctgcgttgcttgagaaaaacaat

SEQ ID NO: 214954 - DNA, 2032 bp, Zea Mays
aaaacggaagtggaccaaatctttcatctctctctgctatatactgcatgagctcgctcttgcagttcatccacttattaaggctcgcacttgctgatgcgaatcatgtgatgtatttttgtgtttcaaaatgggtggtgacagtaaagtgagctgccttgcaagctgagaaagacgttctgctggatgtgaaacaatgcaacacacacatacaaacgtagtttacacaaataaatccatggtttttttaattattttaaagttgaaacacgcgcctactcactttcaataggtgttttatttatggcaccaccgctaaagggcgagatcaaagtcaaaaggaaatccgggctgctgtagtaaactcagatctagagggagcagcaaggcacagctgacctttgcatactgctgcagagcgctcattgaaccctgttcgcgagggtcaaataacttgttcagaggatggcccagtgccgtggaggtccatgcctatctttttatgtcgtaccttcatcaccacacatccacgccatgatctatagtgctctggactttggaccactacatggggtacccagttggaggacagttggtagatgtttcactttcacggcctcaccacataagatcgatgggcatagtcacatggccgtccttgtgagaacaatgaagcatggcctgctcagcaatggtgactttgagacagcaccaagtggtggttttgtaaaatctgcttctgttgctgagggtgcatcgtcaatccctggttggacgatcaacggcacggttgaactcatttcagcaggccaacaccagggtggcatgatcctgattgttccacaggcaggtggtggacgttgagaagggttcggagtatgctatcacattcagtgctgcccggacatgtgcacaactggaggcactgaatgtttccgtgctaggtggcgtgtctcagacagtagacttgcagacgttgtacaacatagaaggctgggatgcgtacgcgttggcttttcaggcgacggaagagcaggcacatcttcaattcatgaaccctggcatggaggatgatccaacttgtggtcctatcctagacaacgttgccgtcaagaagctcttcaccccagacaaaccaaaggataacgtggtgctgaatggagactttgaggagggtccatggatgttccccaacacgagcttcggcgtgctgctcccaactaaccttgacgagcaaacgtctgccatacctggttggatgatcgagtcaaaccgcgccgtccgctacatagactctgatgagtacaaggttccccagggaaagcgtgccattgagcttctgtcaggcaaggaaggtatcatctcccagatggttgagaccacccctcagaaggtttacagcctgacgttcacactgggcacggcgggggactcgtgccaaccaccaatggccgtcatggcattcgcgggggatcaggcccagaacttccactactccccaatgggcaacgccaccagccaggctgcgaatgtgacgttcactgcacgcgctgagagaacacgtgtggcgttctatagcgtgtattacaacacgaggagtgacgaccacagctcgctgtgtggcccggtgattgacgatgtccgggtatgggcattgaacgccgcggctgggttgaaggcaagtattgggctggttcttggcattgttggtgtcgttggcatggtgttgttctgaaatctgaatctctcggtgccagtggtcttgggaagtatggatgtataacttcttctgttagttggaggcttactagttttggtagtaagcttgaagtttgttgagtgatatgagcttaggttaaaaagctacgagaacctacatggtattgcttgtgttacttcattggtgacatgcagttgtatggtattgtgtggcttgtttgccctagcttgtaatatgagatgtcagaattattcgaagatcatctcttcaatatattagaaaagagtaaagtgcaacatcaattgtccaatg

SEQ ID NO: 214955 - DNA, 1418 bp, Zea Mays
cagcgaggatcaaccagatactaggcctgctcagcaatggtgactttgagacagcaccaagtggtggttttgtaaaatctgcttctgttgctgagggtgcatcgtcaatccctggttggacgatcaacggcacggttgaactcatttcagcaggccaacaccagggtggcatgatcctgattgttccacagggggaccatgcagtaaggctagggaatgatgctagcgttgggcaggtggtggacgttgagaagggttcggagtatgctatcacattcagtgctgcccggacatgtgcacaactggaggcactgaatgtttccgtgctaggtggcgtgtctcagacagtagacttgcagacgttgtacaacatagaaggctgggatgcgtacgcgttggcttttcaggcgacggaagagcaggcacatcttcaattcatgaaccctggcatggaggatgatccaacttgtggtcctatcctagacaacgttgccgtcaagaagctcttcaccccagacaaaccaaaggataacgtggtgctgaatggagactttgaggagggtccatggatgttccccaacacgagcttcggcgtgctgctcccaactaaccttgacgagcaaacgtctgccatacctggttggatgatcgagtcaaaccgcgccgtccgctacatagactctgatgagtacaaggttccccagggaaagcgtgccattgagcttctgtcaggcaaggaaggtatcatctcccagatggttgagaccacccctcagaaggtttacagcctgacgttcacactgggcacggcgggggactcgtgccaaccaccaatggccgtcatggcattcgcgggggatcaggcccagaacttccactactccccaatgggcaacgccaccagccaggctgcgaatgtgacgttcactgcacgcgctgagagaacacgtgtggcgttctatagcgtgtattacaacacgaggagtgacgaccacagctcgctgtgtggcccggtgattgacgatgtccgggtatgggcattgaacgccgcggctgggttgaaggcaagtattgggctggttcttggcattgttggtgtcgttggcatggtgttgttctgaaatctgaatctctcggtgccagtggtcttgggaagtatggatgtataacttcttctgttagttggaggcttactagttttggtagtaagcttgaagtttgttgagtgatatgagcttaggttaaaaagctacgagaacctacatggtattgcttgtgttacttcattggtgacatgcagttgtatggtattgtgtggcttgtttgccctagcttgtaatatgagatgtcagaattattcgaagatcatctcttcaatatattagaaaagagtaaagtgcaacatcaattgtccaatg

SEQ ID NO: 214956 - DNA, 1378 bp, Zea Mays
caggcagcgaggatcaaccagatactaggcctgctcagcaatggtgactttgagacagcaccaagtggtggttttgtaaaatctgcttctgttgctgagggtgcatcgtcaatccctggttggacgatcaacggcacggttgaactcatttcagcaggccaacaccagggtggcatgatcctgattgttccacagggtggtggacgttgagaagggttcggagtatgctatcacattcagtgctgcccggacatgtgcacaactggaggcactgaatgtttccgtgctaggtggcgtgtctcagacagtagacttgcagacgttgtacaacatagaaggctgggatgcgtacgcgttggcttttcaggcgacggaagagcaggcacatcttcaattcatgaaccctggcatggaggatgatccaacttgtggtcctatcctagacaacgttgccgtcaagaagctcttcaccccagacaaaccaaaggataacgtggtgctgaatggagactttgaggagggtccatggatgttccccaacacgagcttcggcgtgctgctcccaactaaccttgacgagcaaacgtctgccatacctggttggatgatcgagtcaaaccgcgccgtccgctacatagactctgatgagtacaaggttccccagggaaagcgtgccattgagcttctgtcaggcaaggaaggtatcatctcccagatggttgagaccacccctcagaaggtttacagcctgacgttcacactgggcacggcgggggactcgtgccaaccaccaatggccgtcatggcattcgcgggggatcaggcccagaacttccactactccccaatgggcaacgccaccagccaggctgcgaatgtgacgttcactgcacgcgctgagagaacacgtgtggcgttctatagcgtgtattacaacacgaggagtgacgaccacagctcgctgtgtggcccggtgattgacgatgtccgggtatgggcattgaacgccgcggctgggttgaaggcaagtattgggctggttcttggcattgttggtgtcgttggcatggtgttgttctgaaatctgaatctctcggtgccagtggtcttgggaagtatggatgtataacttcttctgttagttggaggcttactagttttggtagtaagcttgaagtttgttgagtgatatgagcttaggttaaaaagctacgagaacctacatggtattgcttgtgttacttcattggtgacatgcagttgtatggtattgtgtggcttgtttgccctagcttgtaatatgagatgtcagaattattcgaagatcatctcttcaatatattagaaaagagtaaagtgcaacatcaattgtccaatg

SEQ ID NO: 214957 - DNA, 2368 bp, Zea Mays
gatccttagaactgtacatttttaccaatcttgtttgaatctaaattgagatgaggtctgatctactactactaaaactggtgctgctgaccaactctttcttttactgaaaaatgaatgcaccgcgctgaaaaaggacagaacaaagaaagatcttcaaatcaaagctaaagaagcggagattcaaaatctgaaaaaagctaatgtcagctccatgaaagatgtttgcagtgcagggatgaacattgatcagtcctttcacgcccctgcaaatgaggctttgcatactggggtttcttctaggcgaacagacaagatgagtggcaaagataaggatgcccattcattgcgagacgatctctatctaaagcaagggcatcaaactgatttacttgaggctttagaactgaggcgtcgcaccatgattgataacggaatgagtacatctggagtagtgtctctggaggaggacacccattttgaaccaagaaacgctacatgcaaggaaattaaggcgataggagtccagacagataacacatctgacaatgaacatcttgactgcaagaaattattggttgagcgtatatctggtaacctacgtgcaatgtggggcatgtcacctaacagtttatcaagcaggaatttgatatcaaagatcaatgtttcttgttcagaagaaattttgtcacttctccagcatacgagattgtcagacaactgtgaaccctcttctcaagcaatctcctccatgaatgaagctatttcccaactgtatgacacgttcattaagatgaatagtgggaagatgtcaatacaaactttccttgaagcattgctaaatctatgtgcttttgatgatgctgctatagtcagtagaactttgagggtattcctcaaagttttacagcacttactgcaacatggagccaagtctagtgaaagtgtaccctcaggaacaatgtttctgttgaaccatatgttaacgtactcatggagaacaaccacaaagactgttcgaccttgttgagaccagtggatgcagaagattcattgagactgcataatatgtttcttccttttactttctggagttcacttttcactggcatgcttcaaattggggtcaagtactcacaagagacaattcgtactgatgcattatccataatgattctcattgtaaggacaacagatcccatagaggaacgccagaaattcggatttacttcagtaatgacgagattgcatctgctattgcagaaagagaacggattgcttgttaagaagcattctgtgcgtctacttttcttgcttctgaattgcccagtgatgttgaagttgctgtgtagtggaggcaaagacggctccaaacagatgggatcggaagcttgtgaaagtaatagatcacaagaagtcataagctcagttcttgtggatttatctgattgtttgacatgtggggaaacttgttctctggggattgagctttgcaggctcgtcatcattctgctagcttatatagcttccagtggcaaattgggatatgaggtgcttttagttccagtgagtgcccgtggtgccagttttttggagatgataatggaagtccttgcatcgcagatgcaatatgaaacacgagagttactaaaagaaagatgtttggtgatgagagaagctcttatcctgctaaaccggctggcatcacacgcaaactattcgaaaccaaccttggaagtgctgacgagaagcaagttatgcgcgacctggacgatcgatgttgcgaaccggctgccccatacgtggatggcaaatgatctcgcggagctggcccagaaattcaggtcgcgagtgtatgctttcatagaggagaaacccttgacaagcgacggtaccaatctgggcgcttctaataagagatgagatacccaggactggcgcagcctgaggtagcttgggtagtaatatggaaagcatattgctagcggctcgacaagtttagtttcttttttttcccttactgacactagggttttgtttaggagttagactggcttggctggggcgagtcgctagcttttgctggcggtgtacagaggcgaatgcttcctcgccatttttgagggggagggagaatgtagttgtactacggcaagtccttgggaacgtacatcataattgttgtttggacatcatctcatggctttggcattgaccatcgcagcttttttgaattgaaagttttagtttttttcttaccaggatgatctgactgtaagcaattgaggatattggatgggtttgttggttgtgaagtatgggtggatgcctgtttgaatgtactagttaatagatagttggctaaaaa

SEQ ID NO: 214958 - DNA, 2370 bp, Zea Mays
atgtatttctgtggatccttagaactgtacatttttaccaatcttgtttgaatctaaattgagatgaggtctgatctactactactaaaactggtgctgctgaccaactctttcttttactgaaaaatgaatgcaccgcgctgaaaaaggacagaacaaagaaagatcttcaaatcaaagctaaagaagcggagattcaaaatctgaaaaaagctaatgtcagctccatgaaagatgtttgcagtgcagggatgaacattgatcagtcctttcacgcccctgcaaatgaggctttgcatactggggtttcttctaggcgaacagacaagatgagtggcaaagataaggatgcccattcattgcgagacgatctctatctaaagcaagggcatcaaactgatttacttgaggctttagaactgaggcgtcgcaccatgattgataacggaatgagtacatctggagtagtgtctctggaggaggacacccattttgaaccaagaaacgctacatgcaaggaaattaaggcgataggagtccagacagataacacatctgacaatgaacatcttgactgcaagaaattattggttgagcgtatatctggtaacctacgtgcaatgtggggcatgtcacctaacagtttatcaagcaggaatttgatatcaaagatcaatgtttcttgttcagaagaaattttgtcacttctccagcatacgagattgtcagacaactgtgaaccctcttctcaagcaatctcctccatgaatgaagctatttcccaactgtatgacacgttcattaagatgaatagtgggaagatgtcaatacaaactttccttgaagcattgctaaatctatgtgcttttgatgatgctgctatagtcagtagaactttgagggtattcctcaaagttttacagcacttactgcaacatggagccaagtctagtgaaaggaacaatgtttctgttgaaccatatgttaacgtactcatggagaacaaccacaaagactgttcgaccttgttgagaccagtggatgcagaagattcattgagactgcataatatgtttcttccttttactttctggagttcacttttcactggcatgcttcaaattggggtcaagtactcacaagagacaattcgtactgatgcattatccataatgattctcattgtaaggacaacagatcccatagaggaacgccagaaattcggatttacttcagtaatgacgagattgcatctgctattgcagaaagagaacggattgcttgttaagaagcattctgtgcgtctacttttcttgcttctgaattgcccagtgatgttgaagttgctgtgtagtggaggcaaagacggctccaaacagatgggatcggaagcttgtgaaagtaatagatcacaagaagtcataagctcagttcttgtggatttatctgattgtttgacatgtggggaaacttgttctctggggattgagctttgcaggctcgtcatcattctgctagcttatatagcttccagtggcaaattgggatatgaggtgcttttagttccagtgagtgcccgtggtgccagttttttggagatgataatggaagtccttgcatcgcagatgcaatatgaaacacgagagttactaaaagaaagatgtttggtgatgagagaagctcttatcctgctaaaccggctggcatcacacgcaaactattcgaaaccaaccttggaagtgctgacgagaagcaagttatgcgcgacctggacgatcgatgttgcgaaccggctgccccatacgtggatggcaaatgatctcgcggagctggcccagaaattcaggtcgcgagtgtatgctttcatagaggagaaacccttgacaagcgacggtaccaatctgggcgcttctaataagagatgagatacccaggactggcgcagcctgaggtagcttgggtagtaatatggaaagcatattgctagcggctcgacaagtttagtttcttttttttcccttactgacactagggttttgtttaggagttagactggcttggctggggcgagtcgctagcttttgctggcggtgtacagaggcgaatgcttcctcgccatttttgagggggagggagaatgtagttgtactacggcaagtccttgggaacgtacatcataattgttgtttggacatcatctcatggctttggcattgaccatcgcagcttttttgaattgaaagttttagtttttttcttaccaggatgatctgactgtaagcaattgaggatattggatgggtttgttggttgtgaagtatgggtggatgcctgtttgaatgtactagttaatagatagttggctaaaaa

SEQ ID NO: 214959 - DNA, 2639 bp, Zea Mays
gttatcattcgtggcagtattatgtatttctgtggatccttagaactgtacatttttaccaatcttgtttgaatctaaattgagatgaggtctgatctactactactaaaactggtgctgctgaccaactctttcttttactgaaaaatgaatgcaccgcgctgaaaaaggacagaacaaagaaagatcttcaaatcaaagctaaagaagcggagattcaaaatctgaaaaaagctaatgtgtaagtactactggtttcatatgtactcattatttcagtcaccatgatgctgactgtgagctaacatactagtcatctatctgtatctgaagaatttgaacatgtcttgcttcttctgagcgaaggactgtgcgggggtgttttttttaaatattacttgagtcaccatatattgttttctgcatcagttccaaggctgttgacactgttttctgcttcaatttcttttttactcagcagctccatgaaagatgtttgcagtgcagggatgaacattgatcagtcctttcacgcccctgcaaatgaggctttgcatactggggtttcttctaggcgaacagacaagatgagtggcaaagataaggatgcccattcattgcgagacgatctctatctaaagcaagggcatcaaactgatttacttgaggctttagaactgaggcgtcgcaccatgattgataacggaatgagtacatctggagtagtgtctctggaggaggacacccattttgaaccaagaaacgctacatgcaaggaaattaaggcgataggagtccagacagataacacatctgacaatgaacatcttgactgcaagaaattattggttgagcgtatatctggtaacctacgtgcaatgtggggcatgtcacctaacagtttatcaagcaggaatttgatatcaaagatcaatgtttcttgttcagaagaaattttgtcacttctccagcatacgagattgtcagacaactgtgaaccctcttctcaagcaatctcctccatgaatgaagctatttcccaactgtatgacacgttcattaagatgaatagtgggaagatgtcaatacaaactttccttgaagcattgctaaatctatgtgcttttgatgatgctgctatagtcagtagaactttgagggtattcctcaaagttttacagcacttactgcaacatggagccaagtctagtgaaagtgtaccctcaggaacaatgtttctgttgaaccatatgttaacgtactcatggagaacaaccacaaagactgttcgaccttgttgagaccagtggatgcagaagattcattgagactgcataatatgtttcttccttttactttctggagttcacttttcactggcatgcttcaaattggggtcaagtactcacaagagacaattcgtactgatgcattatccataatgattctcattgtaaggacaacagatcccatagaggaacgccagaaattcggatttacttcagtaatgacgagattgcatctgctattgcagaaagagaacggattgcttgttaagaagcattctgtgcgtctacttttcttgcttctgaattgcccagtgatgttgaagttgctgtgtagtggaggcaaagacggctccaaacagatgggatcggaagcttgtgaaagtaatagatcacaagaagtcataagctcagttcttgtggatttatctgattgtttgacatgtggggaaacttgttctctggggattgagctttgcaggctcgtcatcattctgctagcttatatagcttccagtggcaaattgggatatgaggtgcttttagttccagtgagtgcccgtggtgccagttttttggagatgataatggaagtccttgcatcgcagatgcaatatgaaacacgagagttactaaaagaaagatgtttggtgatgagagaagctcttatcctgctaaaccggctggcatcacacgcaaactattcgaaaccaaccttggaagtgctgacgagaagcaagttatgcgcgacctggacgatcgatgttgcgaaccggctgccccatacgtggatggcaaatgatctcgcggagctggcccagaaattcaggtcgcgagtgtatgctttcatagaggagaaacccttgacaagcgacggtaccaatctgggcgcttctaataagagatgagatacccaggactggcgcagcctgaggtagcttgggtagtaatatggaaagcatattgctagcggctcgacaagtttagtttcttttttttcccttactgacactagggttttgtttaggagttagactggcttggctggggcgagtcgctagcttttgctggcggtgtacagaggcgaatgcttcctcgccatttttgagggggagggagaatgtagttgtactacggcaagtccttgggaacgtacatcataattgttgtttggacatcatctcatggctttggcattgaccatcgcagcttttttgaattgaaagttttagtttttttcttaccaggatgatctgactgtaagcaattgaggatattggatgggtttgttggttgtgaagtatgggtggatgcctgtttgaatgtactagttaatagatagttggctaaaaa

SEQ ID NO: 214960 - DNA, 2346 bp, Zea Mays
atggacggcggcctcgacgacgagtgggaagctagcttcctcgacgagagagagctggaccgtgtctccaaggaaaggaatgaattgaaaaatgaatgcaccgcgctgaaaaaggacagaacaaagaaagatcttcaaatcaaagctaaagaagcggagattcaaaatctgaaaaaagctaatgtcagctccatgaaagatgtttgcagtgcagggatgaacattgatcagtcctttcacgcccctgcaaatgaggctttgcatactggggtttcttctaggcgaacagacaagatgagtggcaaagataaggatgcccattcattgcgagacgatctctatctaaagcaagggcatcaaactgatttacttgaggctttagaactgaggcgtcgcaccatgattgataacggaatgagtacatctggagtagtgtctctggaggaggacacccattttgaaccaagaaacgctacatgcaaggaaattaaggcgataggagtccagacagataacacatctgacaatgaacatcttgactgcaagaaattattggttgagcgtatatctggtaacctacgtgcaatgtggggcatgtcacctaacagtttatcaagcaggaatttgatatcaaagatcaatgtttcttgttcagaagaaattttgtcacttctccagcatacgagattgtcagacaactgtgaaccctcttctcaagcaatctcctccatgaatgaagctatttcccaactgtatgacacgttcattaagatgaatagtgggaagatgtcaatacaaactttccttgaagcattgctaaatctatgtgcttttgatgatgctgctatagtcagtagaactttgagggtattcctcaaagttttacagcacttactgcaacatggagccaagtctagtgaaagtgtaccctcaggaacaatgtttctgttgaaccatatgttaacgtactcatggagaacaaccacaaagactgttcgaccttgttgagaccagtggatgcagaagattcattgagactgcataatatgtttcttccttttactttctggagttcacttttcactggcatgcttcaaattggggtcaagtactcacaagagacaattcgtactgatgcattatccataatgattctcattgtaaggacaacagatcccatagaggaacgccagaaattcggatttacttcagtaatgacgagattgcatctgctattgcagaaagagaacggattgcttgttaagaagcattctgtgcgtctacttttcttgcttctgaattgcccagtgatgttgaagttgctgtgtagtggaggcaaagacggctccaaacagatgggatcggaagcttgtgaaagtaatagatcacaagaagtcataagctcagttcttgtggatttatctgattgtttgacatgtggggaaacttgttctctggggattgagctttgcaggctcgtcatcattctgctagcttatatagcttccagtggcaaattgggatatgaggtgcttttagttccagtgagtgcccgtggtgccagttttttggagatgataatggaagtccttgcatcgcagatgcaatatgaaacacgagagttactaaaagaaagatgtttggtgatgagagaagctcttatcctgctaaaccggctggcatcacacgcaaactattcgaaaccaaccttggaagtgctgacgagaagcaagttatgcgcgacctggacgatcgatgttgcgaaccggctgccccatacgtggatggcaaatgatctcgcggagctggcccagaaattcaggtcgcgagtgtatgctttcatagaggagaaacccttgacaagcgacggtaccaatctgggcgcttctaataagagatgagatacccaggactggcgcagcctgaggtagcttgggtagtaatatggaaagcatattgctagcggctcgacaagtttagtttcttttttttcccttactgacactagggttttgtttaggagttagactggcttggctggggcgagtcgctagcttttgctggcggtgtacagaggcgaatgcttcctcgccatttttgagggggagggagaatgtagttgtactacggcaagtccttgggaacgtacatcataattgttgtttggacatcatctcatggctttggcattgaccatcgcagcttttttgaattgaaagttttagtttttttcttaccaggatgatctgactgtaagcaattgaggatattggatgggtttgttggttgtgaagtatgggtggatgcctgtttgaatgtactagttaatagatagttggctaaaaa

SEQ ID NO: 214961 - DNA, 2834 bp, Zea Mays
ttcgcagctgccgccgccagtgccggtgagaagagtagggaggcgcagcgcggggatggacggcggcctcgacgacgagtgggaagctagcttcctcgacgaggtgatacgcgcgacggatgaggctgaggctgtcgtctcccgcaaccctaaccccactcccacccccgcgcccgctcccatccccacgtattatcccttggccgccgcccccgtctcctacctcccagcctcttcggtctcctacatccctgccgcttcgcacctccgctccgcgatcagcttctcccctccacgggacctctcccagaggccgccgctcccgccgccgaccgctgccaccagcaccagggatgcgctggcgacgggggccgacgtcggtcgcgacttctctcctccgccccagctctcccagcgcccggcggctgatgagggcagcctcgtggccttcgcggcgtcgagctcagccagcgaccgccgcttcattagcacgggctgtggagaagcgggcgcgaagagggaagcgagggagatcgagaggctcaaaagagagctggaccgtgtctccaaggaaaggaatgaattgaaaaatgaatgcaccgcgctgaaaaaggacagaacaaagaaagatcttcaaatcaaagctaaagaagcggagattcaaaatctgaaaaaagctaatgtcagctccatgaaagatgtttgcagtgcagggatgaacattgatcagtcctttcacgcccctgcaaatgaggctttgcatactggggtttcttctaggcgaacagacaagatgagtggcaaagataaggatgcccattcattgcgagacgatctctatctaaagcaagggcatcaaactgatttacttgaggctttagaactgaggcgtcgcaccatgattgataacggaatgagtacatctggagtagtgtctctggaggaggacacccattttgaaccaagaaacgctacatgcaaggaaattaaggcgataggagtccagacagataacacatctgacaatgaacatcttgactgcaagaaattattggttgagcgtatatctggtaacctacgtgcaatgtggggcatgtcacctaacagtttatcaagcaggaatttgatatcaaagatcaatgtttcttgttcagaagaaattttgtcacttctccagcatacgagattgtcagacaactgtgaaccctcttctcaagcaatctcctccatgaatgaagctatttcccaactgtatgacacgttcattaagatgaatagtgggaagatgtcaatacaaactttccttgaagcattgctaaatctatgtgcttttgatgatgctgctatagtcagtagaactttgagggtattcctcaaagttttacagcacttactgcaacatggagccaagtctagtgaaaggaacaatgtttctgttgaaccatatgttaacgtactcatggagaacaaccacaaagactgttcgaccttgttgagaccagtggatgcagaagattcattgagactgcataatatgtttcttccttttactttctggagttcacttttcactggcatgcttcaaattggggtcaagtactcacaagagacaattcgtactgatgcattatccataatgattctcattgtaaggacaacagatcccatagaggaacgccagaaattcggatttacttcagtaatgacgagattgcatctgctattgcagaaagagaacggattgcttgttaagaagcattctgtgcgtctacttttcttgcttctgaattgcccagtgatgttgaagttgctgtgtagtggaggcaaagacggctccaaacagatgggatcggaagcttgtgaaagtaatagatcacaagaagtcataagctcagttcttgtggatttatctgattgtttgacatgtggggaaacttgttctctggggattgagctttgcaggctcgtcatcattctgctagcttatatagcttccagtggcaaattgggatatgaggtgcttttagttccagtgagtgcccgtggtgccagttttttggagatgataatggaagtccttgcatcgcagatgcaatatgaaacacgagagttactaaaagaaagatgtttggtgatgagagaagctcttatcctgctaaaccggctggcatcacacgcaaactattcgaaaccaaccttggaagtgctgacgagaagcaagttatgcgcgacctggacgatcgatgttgcgaaccggctgccccatacgtggatggcaaatgatctcgcggagctggcccagaaattcaggtcgcgagtgtatgctttcatagaggagaaacccttgacaagcgacggtaccaatctgggcgcttctaataagagatgagatacccaggactggcgcagcctgaggtagcttgggtagtaatatggaaagcatattgctagcggctcgacaagtttagtttcttttttttcccttactgacactagggttttgtttaggagttagactggcttggctggggcgagtcgctagcttttgctggcggtgtacagaggcgaatgcttcctcgccatttttgagggggagggagaatgtagttgtactacggcaagtccttgggaacgtacatcataattgttgtttggacatcatctcatggctttggcattgaccatcgcagcttttttgaattgaaagttttagtttttttcttaccaggatgatctgactgtaagcaattgaggatattggatgggtttgttggttgtgaagtatgggtggatgcctgtttgaatgtactagttaatagatagttggctaaaaa

SEQ ID NO: 214962 - DNA, 947 bp, Zea Mays
aacgagccagctcgagctcggtcgagccgaggggtcgatatccacccctagctgcctggtgcccacgataacccagagacctcgagaacggctggaagaaccgagagcgctccggaaatgtcggcgggtgagctgcggttggagctggacgagctgcggcggctggagagcctcgccaagcacccccgcgtccagatcctcctcgccaacgaaatccgcaacgttgaagcgaagatatatgtttcccttgagggagttgagcaagagaaggtggagactactttcaagccaacatcagtggatataaagtttcatgatgtcaaaggcaagaattaccggtgtgctataccaaagctgaacaaggaaattgttcctgagaaatgtaaggttgtggtgaaaccaaccagggttgttgttactcttttcaagggttctaaaggcaactggttagacttgcacttcaaggaagacaagttcaagccaaacatggacaaggaaaaagatccgatgtcaggaattatggacttaatgaagaacatgtacgaggagggcgacgaggatatgaagcgcacaatagccaaagcttggtctgatgccaggtctgggaagacgactgattcgatgagcggattacgttgagctggtataatcagttgatgggcttaagttttctgcgctagcccctgcagccgaagtgtttctgatggttcaaatagcgttgcagtgccttgttggtgttagtccttgtttatcttacatttgtgagtgaagttggacgtgccaaacatatttaaatatatcctcttgaacgggggaaagatcatatcaagtccaagaggttttgtgcttttgtggaattaccacggcgtttctgtttgctacgaaacgatggtagtaacagcttgagccttgccagaaatttcctgtttgtgacgctgtttttaaaa

SEQ ID NO: 214963 - DNA, 2362 bp, Zea Mays
ccttggtgagagcacacaaataccttatacaaagcagcaagagaagaaggaagacaagtcagacaaaacagaagacgagaagaggttcctaccataacacttaagcaaggaatcctgtacacttctctcctggggttgtgacttgtatattgtcaaggatcacttggatgtggtaaatgctatactggacactgatgatagctgcataaggattgtgcgaaaaaacgggaagacatccctacatactgctgcaaggattggataccatcgtattgtcaaggcactcatagagagggatccaggaattgttccgatcaaggataggaagggacaaactgcacttcacatggctgtgaaaggcaagaacacagatgtagtggaagagttactgatggctgatgtttccattctcaatgtgcgggacaagaagggaaatactgctttgcacatagctacatggaaatgggagaattttgggattatgaaacaccgcagacgtggcttcgacgaaacggaggcgtaggcgagggattcgacattatgaaaaaccagagaagatactacactctaaaatggacatgaatcctctattaccagggaaggatgatgtttattacactgaaacagacgctgtctcacatccgttacccgcactagacgcacccagtctttctacagagagaatcgcgccgttcttgaatctgccattcgctgaatctgccattcgctgctgttgtttctggacagtgaagcagtattccggacagtgaacaaaaatctgggaacacatttcattttcactgtcattggctaccagagtccgggaacaaaatctgggaacaaaatctgggaacacaaaaatctgggaacaaaatctgcctttggctaccagagtttattgctcccatatcattcgctgtccatttcactgtccattcgctgaacacaaaaagctgggaacaaactcattttcccagtgaacaggtagcacaatttagttcacaaaatctgggagcacaatttagttcacaaaatctgggagcaataaacaggttgaacaggtagaacaaaatctgggagcaataaactgccatcccagaacaaaattcgcagctcacatttcagttcacaagctagttcacaatttagttcccaggtaccacaatttagttcacaagctagttcacaagctcacatttcaatggagcaatacacaggtagcagtttgacaagctattacacaagctcacatttctgggagcaatacacaggtagcagtttcacaagctatcacacaagctcacatttctgggagcaaaaaacaggtggcgtagtagcagtcgtgtgttcatcttcatttgcagcaacgacaagttcacggcttggtgcttcatcttcatttccagctacaacaacgacaagccacctgctttggcgcggactagggttgtggtcgcagcgccgccgccacctgctttggcgcggggccgcgagcagcaagggagaagacgcggagtttggagagaaggaggtgcagcgccgccgccacctgctttggcgcgggaccacgggcagcagatctccgggcagcaggggaggagactagcaggggagggaaatggagattgaagaaaatgagatggaaggaagaggcttgacgggagagagaagaaccttgaagagagaagaacggctctggacggcagaagaaaacggcgcgtgggctgatagcgacggaagatcattattcgttctcctgaacgactaataacgatgggatctggaataacaggagcctgatggttgcatcagtagagttgaccacttctcagtattgcgagatgcatcttacatggtcaagaagataattcctattctgaactacttgctcgtgttcgtgtacaagtctccttatcatgtcctcctttcaagccagtctattctttgcttgattcatcacgggtgcacattattgtaattagaatcttcagagtactcgaaggatagttaaagctgtttggctagtccttcagattactaaaaatatagttaagaacatttgtattttgctatttcgatttccaacagtacaactattggggatgattgcttttctttataaaagcaatcaagtaatttcttagctaagttctagctataagttctgcatgacatgctattgcccatgataattctgacaggattgcttcaactctttcaggttgatcagttttgcctagtcccagtaccatacaaagatgttcaggtgaacctgaaaattcttctcaatttgacttgcaagctttctgatgcgagcactaaatagtgatttttttgcaattttgtatgagccttgtttgag

SEQ ID NO: 214964 - DNA, 2225 bp, Zea Mays
tccttggtgagagcacacaaataccttatacaaagcagcaagagaagaaggaagacaagtcagacaaaacagaagacgagaagaggttcctaccataacacttaagcaaggaatcctgtacacttctctcctggggttgtgacttgtatattgtcaaggatcacttggatgtggtaaatgctatactggacactgatgatagctgcataaggattgtgcgaaaaaacgggaagacatccctacatactgctgcaaggattggataccatcgtattgtcaaggcactcatagagagggatccaggaattgttccgatcaaggataggaagggacaaactgcacttcacatggctgtgaaaggcaagaacacagatgtagtggaagagttactgatggctgatgtttccattctcaatgtgcgggacaagaagggaaatactgctttgcacatagctacatggaaatgggagaattttgggattatgaaacaccgcagacgtggcttcgacgaaacggaggcgtaggcgagggattcgacattatgaaaaaccagagaagatactacactctaaaatggacatgaatcctctattaccagggaaggatgatgtttattacactgaaacagacgctgtctcacatccgttacccgcactagacgcacccagtctttctacagagagaatcgcgccgttcttgaatctgccattcgctgaatctgccattcgctgctgttgtttctggacagtgaagcagtattccggacagtgaacaaaaatctgggaacacatttcattttcactgtcattggctaccagagtccgggaacaaaatctgggaacaaaatctgggaacacaaaaatctgggaacaaaatctgcctttggctaccagagtttattgctcccatatcattcgctgtccatttcactgtccattcgctgaacacaaaaagctgggaacaaactcattttcccagtgaacaggtagcacaatttagttcacaaaatctgggagcacaatttagttcacaaaatctgggagcaataaacaggttgaacaggtagaacaaaatctgggagcaataaactgccatcccagaacaaaattcgcagctcacatttcagttcacaagctagttcacaatttagttcccaggtaccacaatttagttcacaagctagttcacaagctcacatttcaatggagcaatacacaggtagcagtttgacaagctattacacaagctcacatttctgggagcaatacacaggtagcagtttcacaagctatcacacaagctcacatttctgggagcaaaaaacaggtagcagtttcacaagctcacatttcagatctatggtttttcagtttctttctaggggtaattttcttaactacccatttgacacttctaggtggcgtagtagcagtcgtgtgttcatcttcatttgcagcaacgacaagttcacggcttggtgcttcatcttcatttccagctacaagtattggtgcttcatcttcatttgcagcttcgactattggtgcttctacttcatttgcagcttcgactattggtgcttctacttcatttgcagcaacgacaagccacctgctttggcgcggactagggttgtggtcgcagcgccgccgccacctgctttggcgcggggccgcgagcagcaagggagaagacgcggagtttggagagaaggaggtgcagcgccgccgccacctgctttggcgcgggaccacgggcagcagatctccgggcagcaggggaggagactagcaggggagggaaatggagattgaagaaaatgagatggaaggaagaggcttgacgggagagagaagaaccttgaagagagaagaacggctctggacggcagaagaaaacggcgcgtgggctgatagcgacggaagatcattattcgttctcctgaacgactaataacgatgggatctggaataacaggagcctgatggttgcatcagtagagttgaccacttctcagtattgcgagatgcatcttacatggtcaagaagataattcctattctgaactacttgctcgtgttcgtgttgatcagttttgcctagtcccagtaccatacaaagatgttcaggtgaacctgaaaattcttctcaatttgacttgcaagctttctgatgcgagcactaaatagtgatttttttgcaattttgtatgagccttgtttgag

SEQ ID NO: 214965 - DNA, 4487 bp, Zea Mays
caacttccagatcgttctcatcccatcgtttcctcctctgctcaagcacggcagccagtccagccaccatttgggtgctcatctccctctgctcggcacccagccccagctcgcccgagctccctgcgccgacctcatcctccccatggtgcgtcaccttctactcctctccttcccacggcacagcagcgcccctgcagctccccttctccagatccatggcgcccaacaccttgagcgcccctgccgctgctcctccaccgggatctcctcctccactaggcgtccaggcttgtcccaccatggctgcccctcctccatctcctccctccccaccaggttacccagattccatggccgccgccgccccagccatctccctggtggccgacctcgcccctgccccagccacagctcccccttcggccctgctgctgcaagcactcagcccctcccatggcacacgccccatctgcaacaccgtcgacccccgacgaggtcctgttctcgccctgtcgttttagtactcggcgtcgattaagtagatgctaaccgtgtgtatattcgtgtgttcttgtgaggagaaatcccatgatttgggggaagacgaagtccaagcacaacccccgccaatcgctcgatgaaaaatctaaaccaaaaccctcagcgttttcatgggttccggagggattttatgttggtaaggtgttgtgcggtgtgatctccaattccctattgctgatgtcttactccatcatgaccttagggaaggatgttttcctctaaattactcgtaataattatgcttggtgtatgtgttgttttagctacttgatgaaatgttttagttgtgtgcgataatatggttgccgttcgagtggaaagtagatgtgttgtatgacctgagttggagttgaagcaagtatgtgtgtctcgtattacgaaactaattagagatatgcatgatgtttgtagatggattatgtgtagagtgttttagtacaagtatttttttaggtatagttgaaccaattattgtatatgaattgtgcgatatcaaggttgttctaatgttcttttaacatcttgctaataaggtgttagagtattctaaatgccaaacataggataattttacaagccaaatagaagttaaattgaaggtattgatgtttagggctgtaggtatagttttagttatgcagctagtccaataaagtagatcatgttttctgtagaagcgttatatataaaacttgtagataatctctttatcttacttgtgtaaaaatttcatgaccataggtgtagtagtttaggagttatgatttttccaagtccagtctcagaatctgtccgaattctatacaggtttcgaaaattggattgtttggctaagctaaactgagaatcagcccttagtaattatagaagaattgtagtacttttcttaagctttccaacaaattttggagcaccctttttggtggtctagagatcaagttacagctgtttgaactatagagtctgaatctgtccaaatctggacagcgaagtctgtttgtagtaactgactttgatatgtattgaattaacctgagatgtttataaatgaattgtagacaattctattaactttctaaaaagtctaggatcaccggatttggatttcggaaactccagttctggacttttgaagtagttagtcgaattctgtccaaatctggacaaaatttatgtttagcgctgtttgacctttctaaaggtcgaatcttgttgtgatggtaatacaaaagttatagaggactttataagctttccaaaaagtcctagtttactatttttggatacatattttatgaattgtgagctaaacagatagttgttgacttgctgttctgctgtccaaacacatgtctactgtctgaaaatagctcattttgtagttacatttgcatcaggctttgatgattgctgtacaaggatgatatggcctcccgcccaaagctgtctggtattcagaagcaggttttggcgctgtacaggggattccttcggacagcacgccttaaggcccctgaagaacgccgcaggatcgagtctgttatcttggcagagttccgtgacaacgcaaggagtgttgaccgtaggaactttgtacacatagagtacttgttgaggagagggaagaagcagcttgagcagctcaagaatcctgatattactggactcgctacccttgtagtaaagaaatgaggggttgtgacttgtatattgtcaaggatcacttggatgtggtaaatgctatactggacactgatgatagctgcataaggattgtgcgaaaaaacgggaagacatccctacatactgctgcaaggattggataccatcgtattgtcaaggcactcatagagagggatccaggaattgttccgatcaaggataggaagggacaaactgcacttcacatggctgtgaaaggcaagaacacagatgtagtggaagagttactgatggctgatgtttccattctcaatgtgcgggacaagaagggaaatactgctttgcacatagctacatggaaatgggagaattttgggattatgaaacaccgcagacgtggcttcgacgaaacggaggcgtaggcgagggattcgacattatgaaaaaccagagaagatactacactctaaaatggacatgaatcctctattaccagggaaggatgatgtttattacactgaaacagacgctgtctcacatccgttacccgcactagacgcacccagtctttctacagagagaatcgcgccgttcttgaatctgccattcgctgaatctgccattcgctgctgttgtttctggacagtgaagcagtattccggacagtgaacaaaaatctgggaacacatttcattttcactgtcattggctaccagagtccgggaacaaaatctgggaacaaaatctgggaacacaaaaatctgggaacaaaatctgcctttggctaccagagtttattgctcccatatcattcgctgtccatttcactgtccattcgctgaacacaaaaagctgggaacaaactcattttcccagtgaacaggtagcacaatttagttcacaaaatctgggagcacaatttagttcacaaaatctgggagcaataaacaggttgaacaggtagaacaaaatctgggagcaataaactgccatcccagaacaaaattcgcagctcacatttcagttcacaagctagttcacaatttagttcccaggtaccacaatttagttcacaagctagttcacaagctcacatttcaatggagcaatacacaggtagcagtttgacaagctattacacaagctcacatttctgggagcaatacacaggtagcagtttcacaagctatcacacaagctcacatttctgggagcaaaaaacaggtggcgtagtagcagtcgtgtgttcatcttcatttgcagcaacgacaagttcacggcttggtgcttcatcttcatttccagctacaacaacgacaagccacctgctttggcgcggactagggttgtggtcgcagcgccgccgccacctgctttggcgcggggccgcgagcagcaagggagaagacgcggagtttggagagaaggaggtgcagcgccgccgccacctgctttggcgcgggaccacgggcagcagatctccgggcagcaggggaggagactagcaggggagggaaatggagattgaagaaaatgagatggaaggaagaggcttgacgggagagagaagaaccttgaagagagaagaacggctctggacggcagaagaaaacggcgcgtgggctgatagcgacggaagatcattattcgttctcctgaacgactaataacgatgggatctggaataacaggagcctgatggttgcatcagtagagttgaccacttctcagtattgcgagatgcatcttacatggtcaagaagataattcctattctgaactacttgctcgtgttcgtgtacaagtctccttatcatgtcctcctttcaagccagtctattctttgcttgattcatcacgggtgcacattattgtaattagaatcttcagagtactcgaaggatagttaaagctgtttggctagtccttcagattactaaaaatatagttaagaacatttgtattttgctatttcgatttccaacagtacaactattggggatgattgcttttctttataaaagcaatcaagtaatttcttagctaagttctagctataagttctgcatgacatgctattgcccatgataattctgacaggattgcttcaactctttcaggttgatcagttttgcctagtcccagtaccatacaaagatgttcaggtgaacctgaaaattcttctcaatttgacttgcaagctttctgatgcgagcactaaatagtgatttttttgcaattttgtatgagccttgtttgag

SEQ ID NO: 214966 - DNA, 2823 bp, Zea Mays
caacttccagatcgttctcatcccatcgtttcctcctctgctcaagcacggcagccagtccagccaccatttgggtgctcatctccctctgctcggcacccagccccagctcgcccgagctccctgcgccgacctcatcctccccatggtgcgtcaccttctactcctctccttcccacggcacagcagcgcccctgcagctccccttctccagatccatggcgcccaacaccttgagcgcccctgccgctgctcctccaccgggatctcctcctccactaggcgtccaggcttgtcccaccatggctgcccctcctccatctcctccctccccaccaggttacccagattccatggccgccgccgccccagccatctccctggtggccgacctcgcccctgccccagccacagctcccccttcggccctgctgctgcaagcactcagcccctcccatggcacacggagaaatcccatgatttgggggaagacgaagtccaagcacaacccccgccaatcgctcgatgaaaaatctaaaccaaaaccctcagcgttttcatgggttccggagggattttatgttggtaaggatgatatggcctcccgcccaaagctgtctggtattcagaagcaggttttggcgctgtacaggggattccttcggacagcacgccttaaggcccctgaagaacgccgcaggatcgagtctgttatcttggcagagttccgtgacaacgcaaggagtgttgaccgtaggaactttgtacacatagagtacttgttgaggagagggaagaagcagcttgagcagctcaagaatcctgatattactggactcgctacccttgtagtaaagaaatgagcaagagaagaaggaagacaagtcagacaaaacagaagacgagaagaggttcctaccataacacttaagcaaggaatcctgtacacttctctcctggggttgtgacttgtatattgtcaaggatcacttggatgtggtaaatgctatactggacactgatgatagctgcataaggattgtgcgaaaaaacgggaagacatccctacatactgctgcaaggattggataccatcgtattgtcaaggcactcatagagagggatccaggaattgttccgatcaaggataggaagggacaaactgcacttcacatggctgtgaaaggcaagaacacagatgtagtggaagagttactgatggctgatgtttccattctcaatgtgcgggacaagaagggaaatactgctttgcacatagctacatggaaatgggagaattttgggattatgaaacaccgcagacgtggcttcgacgaaacggaggcgtaggcgagggattcgacattatgaaaaaccagagaagatactacactctaaaatggacatgaatcctctattaccagggaaggatgatgtttattacactgaaacagacgctgtctcacatccgttacccgcactagacgcacccagtctttctacagagagaatcgcgccgttcttgaatctgccattcgctgaatctgccattcgctgctgttgtttctggacagtgaagcagtattccggacagtgaacaaaaatctgggaacacatttcattttcactgtcattggctaccagagtccgggaacaaaatctgggaacaaaatctgggaacacaaaaatctgggaacaaaatctgcctttggctaccagagtttattgctcccatatcattcgctgtccatttcactgtccattcgctgaacacaaaaagctgggaacaaactcattttcccagtgaacaggtagcacaatttagttcacaaaatctgggagcacaatttagttcacaaaatctgggagcaataaacaggttgaacaggtagaacaaaatctgggagcaataaactgccatcccagaacaaaattcgcagctcacatttcagttcacaagctagttcacaatttagttcccaggtaccacaatttagttcacaagctagttcacaagctcacatttcaatggagcaatacacaggtagcagtttgacaagctattacacaagctcacatttctgggagcaatacacaggtagcagtttcacaagctatcacacaagctcacatttctgggagcaaaaaacaggtggcgtagtagcagtcgtgtgttcatcttcatttgcagcaacgacaagttcacggcttggtgcttcatcttcatttccagctacaacaacgacaagccacctgctttggcgcggactagggttgtggtcgcagcgccgccgccacctgctttggcgcggggccgcgagcagcaagggagaagacgcggagtttggagagaaggaggtgcagcgccgccgccacctgctttggcgcgggaccacgggcagcagatctccgggcagcaggggaggagactagcaggggagggaaatggagattgaagaaaatgagatggaaggaagaggcttgacgggagagagaagaaccttgaagagagaagaacggctctggacggcagaagaaaacggcgcgtgggctgatagcgacggaagatcattattcgttctcctgaacgactaataacgatgggatctggaataacaggagcctgatggttgcatcagtagagttgaccacttctcagtattgcgagatgcatcttacatggttgatcagttttgcctagtcccagtaccatacaaagatgttcaggtgaacctgaaaattcttctcaatttgacttgcaagctttctgatgcgagcactaaatagtgatttttttgcaattttgtatgagccttgtttgag

SEQ ID NO: 214967 - DNA, 4348 bp, Zea Mays
caacttccagatcgttctcatcccatcgtttcctcctctgctcaagcacggcagccagtccagccaccatttgggtgctcatctccctctgctcggcacccagccccagctcgcccgagctccctgcgccgacctcatcctccccatggtgcgtcaccttctactcctctccttcccacggcacagcagcgcccctgcagctccccttctccagatccatggcgcccaacaccttgagcgcccctgccgctgctcctccaccgggatctcctcctccactaggcgtccaggcttgtcccaccatggctgcccctcctccatctcctccctccccaccaggttacccagattccatggccgccgccgccccagccatctccctggtggccgacctcgcccctgccccagccacagctcccccttcggccctgctgctgcaagcactcagcccctcccatggcacacgccccatctgcaacaccgtcgacccccgacgaggtcctgttctcgccctgtcgttttagtactcggcgtcgattaagtagatgctaaccgtgtgtatattcgtgtgttcttgtgaggagaaatcccatgatttgggggaagacgaagtccaagcacaacccccgccaatcgctcgatgaaaaatctaaaccaaaaccctcagcgttttcatgggttccggagggattttatgttggtgttgtgcggtgtgatctccaattccctattgctgatgtcttactccatcatgaccttagggaaggatgttttcctctaaattactcgtaataattatgcttggtgtatgtgttgttttagctacttgatgaaatgttttagttgtgtgcgataatatggttgccgttcgagtggaaagtagatgtgttgtatgacctgagttggagttgaagcaagtatgtgtgtctcgtattacgaaactaattagagatatgcatgatgtttgtagatggattatgtgtagagtgttttagtacaagtatttttttaggtatagttgaaccaattattgtatatgaattgtgcgatatcaaggttgttctaatgttcttttaacatcttgctaataaggtgttagagtattctaaatgccaaacataggataattttacaagccaaatagaagttaaattgaaggtattgatgtttagggctgtaggtatagttttagttatgcagctagtccaataaagtagatcatgttttctgtagaagcgttatatataaaacttgtagataatctctttatcttacttgtgtaaaaatttcatgaccataggtgtagtagtttaggagttatgatttttccaagtccagtctcagaatctgtccgaattctatacaggtttcgaaaattggattgtttggctaagctaaactgagaatcagcccttagtaattatagaagaattgtagtacttttcttaagctttccaacaaattttggagcaccctttttggtggtctagagatcaagttacagctgtttgaactatagagtctgaatctgtccaaatctggacagcgaagtctgtttgtagtaactgactttgatatgtattgaattaacctgagatgtttataaatgaattgtagacaattctattaactttctaaaaagtctaggatcaccggatttggatttcggaaactccagttctggacttttgaagtagttagtcgaattctgtccaaatctggacaaaatttatgtttagcgctgtttgacctttctaaaggtcgaatcttgttgtgatggtaatacaaaagttatagaggactttataagctttccaaaaagtcctagtttactatttttggatacatattttatgaattgtgagctaaacagatagttgttgacttgctgttctgctgtccaaacacatgtctactgtctgaaaatagctcattttgtagttacatttgcatcaggctttgatgattgctgtacaaggatgatatggcctcccgcccaaagctgtctggtattcagaagcaggttttggcgctgtacaggggattccttcggacagcacgccttaaggcccctgaagaacgccgcaggatcgagtctgttatcttggcagagttccgtgacaacgcaaggagtgttgaccgtaggaactttgtacacatagagtacttgttgaggagagggaagaagcagcttgagcagctcaagaatcctgatattactggactcgctacccttgtagtaaagaaatgagcaagagaagaaggaagacaagtcagacaaaacagaagacgagaagaggttcctaccataacacttaagcaaggaatcctgtacacttctctcctggggttgtgacttgtatattgtcaaggatcacttggatgtggtaaatgctatactggacactgatgatagctgcataaggattgtgcgaaaaaacgggaagacatccctacatactgctgcaaggattggataccatcgtattgtcaaggcactcatagagagggatccaggaattgttccgatcaaggataggaagggacaaactgcacttcacatggctgtgaaaggcaagaacacagatgtagtggaagagttactgatggctgatgtttccattctcaatgtgcgggacaagaagggaaatactgctttgcacatagctacatggaaatgggagaattttgggattatgaaacaccgcagacgtggcttcgacgaaacggaggcgtaggcgagggattcgacattatgaaaaaccagagaagatactacactctaaaatggacatgaatcctctattaccagggaaggatgatgtttattacactgaaacagacgctgtctcacatccgttacccgcactagacgcacccagtctttctacagagagaatcgcgccgttcttgaatctgccattcgctgaatctgccattcgctgctgttgtttctggacagtgaagcagtattccggacagtgaacaaaaatctgggaacacatttcattttcactgtcattggctaccagagtccgggaacaaaatctgggaacaaaatctgggaacacaaaaatctgggaacaaaatctgcctttggctaccagagtttattgctcccatatcattcgctgtccatttcactgtccattcgctgaacacaaaaagctgggaacaaactcattttcccagtgaacaggtagcacaatttagttcacaaaatctgggagcacaatttagttcacaaaatctgggagcaataaacaggttgaacaggtagaacaaaatctgggagcaataaactgccatcccagaacaaaattcgcagctcacatttcagttcacaagctagttcacaatttagttcccaggtaccacaatttagttcacaagctagttcacaagctcacatttcaatggagcaatacacaggtagcagtttgacaagctattacacaagctcacatttctgggagcaatacacaggtagcagtttcacaagctatcacacaagctcacatttctgggagcaaaaaacaggtggcgtagtagcagtcgtgtgttcatcttcatttgcagcaacgacaagttcacggcttggtgcttcatcttcatttccagctacaagtattggtgcttcatcttcatttgcagcttcgactattggtgcttctacttcatttgcagcttcgactattggtgcttctacttcatttgcagcaacgacaagccacctgctttggcgcggactagggttgtggtcgcagcgccgccgccacctgctttggcgcggggccgcgagcagcaagggagaagacgcggagtttggagagaaggaggtgcagcgccgccgccacctgctttggcgcgggaccacgggcagcagatctccgggcagcaggggaggagactagcaggggagggaaatggagattgaagaaaatgagatggaaggaagaggcttgacgggagagagaagaaccttgaagagagaagaacggctctggacggcagaagaaaacggcgcgtgggctgatagcgacggaagatcattattcgttctcctgaacgactaataacgatgggatctggaataacaggagcctgatggttgcatcagtagagttgaccacttctcagtattgcgagatgcatcttacatggtcaagaagataattcctattctgaactacttgctcgtgttcgtgttgatcagttttgcctagtcccagtaccatacaaagatgttcaggtgaacctgaaaattcttctcaatttgacttgcaagctttctgatgcgagcactaaatagtgatttttttgcaattttgtatgagccttgtttgag

SEQ ID NO: 214968 - DNA, 3017 bp, Zea Mays
caacttccagatcgttctcatcccatcgtttcctcctctgctcaagcacggcagccagtccagccaccatttgggtgctcatctccctctgctcggcacccagccccagctcgcccgagctccctgcgccgacctcatcctccccatggtgcgtcaccttctactcctctccttcccacggcacagcagcgcccctgcagctccccttctccagatccatggcgcccaacaccttgagcgcccctgccgctgctcctccaccgggatctcctcctccactaggcgtccaggcttgtcccaccatggctgcccctcctccatctcctccctccccaccaggttacccagattccatggccgccgccgccccagccatctccctggtggccgacctcgcccctgccccagccacagctcccccttcggccctgctgctgcaagcactcagcccctcccatggcacacgccccatctgcaacaccgtcgacccccgacgaggtcctgttctcgccctgtcgttttagtactcggcgtcgattaagtagatgctaaccgtgtgtatattcgtgtgttcttgtgaggagaaatcccatgatttgggggaagacgaagtccaagcacaacccccgccaatcgctcgatgaaaaatctaaaccaaaaccctcagcgttttcatgggttccggagggattttatgttggtgttgtgcggtgtgatctccaattccctattgctgatgtcttactccatcatgaccttagggctttgatgattgctgtacaaggatgatatggcctcccgcccaaagctgtctggtattcagaagcaggttttggcgctgtacaggggattccttcggacagcacgccttaaggcccctgaagaacgccgcaggatcgagtctgttatcttggcagagttccgtgacaacgcaaggagtgttgaccgtaggaactttgtacacatagagtacttgttgaggagagggaagaagcagcttgagcagctcaagaatcctgatattactggactcgctacccttgtagtaaagaaatgagcaagagaagaaggaagacaagtcagacaaaacagaagacgagaagaggttcctaccataacacttaagcaaggaatcctgtacacttctctcctggggttgtgacttgtatattgtcaaggatcacttggatgtggtaaatgctatactggacactgatgatagctgcataaggattgtgcgaaaaaacgggaagacatccctacatactgctgcaaggattggataccatcgtattgtcaaggcactcatagagagggatccaggaattgttccgatcaaggataggaagggacaaactgcacttcacatggctgtgaaaggcaagaacacagatgtagtggaagagttactgatggctgatgtttccattctcaatgtgcgggacaagaagggaaatactgctttgcacatagctacatggaaatgggagaattttgggattatgaaacaccgcagacgtggcttcgacgaaacggaggcgtaggcgagggattcgacattatgaaaaaccagagaagatactacactctaaaatggacatgaatcctctattaccagggaaggatgatgtttattacactgaaacagacgctgtctcacatccgttacccgcactagacgcacccagtctttctacagagagaatcgcgccgttcttgaatctgccattcgctgaatctgccattcgctgctgttgtttctggacagtgaagcagtattccggacagtgaacaaaaatctgggaacacatttcattttcactgtcattggctaccagagtccgggaacaaaatctgggaacaaaatctgggaacacaaaaatctgggaacaaaatctgcctttggctaccagagtttattgctcccatatcattcgctgtccatttcactgtccattcgctgaacacaaaaagctgggaacaaactcattttcccagtgaacaggtagcacaatttagttcacaaaatctgggagcacaatttagttcacaaaatctgggagcaataaacaggttgaacaggtagaacaaaatctgggagcaataaactgccatcccagaacaaaattcgcagctcacatttcagttcacaagctagttcacaatttagttcccaggtaccacaatttagttcacaagctagttcacaagctcacatttcaatggagcaatacacaggtagcagtttgacaagctattacacaagctcacatttctgggagcaatacacaggtagcagtttcacaagctatcacacaagctcacatttctgggagcaaaaaacaggtggcgtagtagcagtcgtgtgttcatcttcatttgcagcaacgacaagttcacggcttggtgcttcatcttcatttccagctacaacaacgacaagccacctgctttggcgcggactagggttgtggtcgcagcgccgccgccacctgctttggcgcggggccgcgagcagcaagggagaagacgcggagtttggagagaaggaggtgcagcgccgccgccacctgctttggcgcgggaccacgggcagcagatctccgggcagcaggggaggagactagcaggggagggaaatggagattgaagaaaatgagatggaaggaagaggcttgacgggagagagaagaaccttgaagagagaagaacggctctggacggcagaagaaaacggcgcgtgggctgatagcgacggaagatcattattcgttctcctgaacgactaataacgatgggatctggaataacaggagcctgatggttgcatcagtagagttgaccacttctcagtattgcgagatgcatcttacatggttgatcagttttgcctagtcccagtaccatacaaagatgttcaggtgaacctgaaaattcttctcaatttgacttgcaagctttctgatgcgagcactaaatagtgatttttttgcaattttgtatgagccttgtttgag

SEQ ID NO: 214969 - DNA, 3414 bp, Zea Mays
caacttccagatcgttctcatcccatcgtttcctcctctgctcaagcacggcagccagtccagccaccatttgggtgctcatctccctctgctcggcacccagccccagctcgcccgagctccctgcgccgacctcatcctccccatggtgcgtcaccttctactcctctccttcccacggcacagcagcgcccctgcagctccccttctccagatccatggcgcccaacaccttgagcgcccctgccgctgctcctccaccgggatctcctcctccactaggcgtccaggcttgtcccaccatggctgcccctcctccatctcctccctccccaccaggttacccagattccatggccgccgccgccccagccatctccctggtggccgacctcgcccctgccccagccacagctcccccttcggccctgctgctgcaagcactcagcccctcccatggcacacggtactcgtccagcccctttctactggtggctgacccatctctatggtgctcgacgaaatgaccatgaggagttttgtgttgtgtgcagccccatctgcaacaccgtcgacccccgacgaggtcctgttctcgccctgtcgttttagtactcggcgtcgattaagtagatgctaaccgtgtgtatattcgtgtgttcttgtgaggagaaatcccatgatttgggggaagacgaagtccaagcacaacccccgccaatcgctcgatgaaaaatctaaaccaaaaccctcagcgttttcatgggttccggagggattttatgttggtaaggctttgatgattgctgtacaaggatgatatggcctcccgcccaaagctgtctggtattcagaagcaggttttggcgctgtacaggggattccttcggacagcacgccttaaggcccctgaagaacgccgcaggatcgagtctgttatcttggcagagttccgtgacaacgcaaggagtgttgaccgtaggaactttgtacacatagagtacttgttgaggagagggaagaagcagcttgagcagctcaagaatcctgatattactggactcgctacccttgtagtaaagaaatgagcaagagaagaaggaagacaagtcagacaaaacagaagacgagaagaggttcctaccataacacttaagcaaggaatcctgtacacttctctcctggggttgtgacttgtatattgtcaaggatcacttggatgtggtaaatgctatactggacactgatgatagctgcataaggattgtgcgaaaaaacgggaagacatccctacatactgctgcaaggattggataccatcgtattgtcaaggcactcatagagagggatccaggaattgttccgatcaaggataggaagggacaaactgcacttcacatggctgtgaaaggcaagaacacagatgtagtggaagagttactgatggctgatgtttccattctcaatgtgcgggacaagaagggaaatactgctttgcacatagctacatggaaatgggagaattttgggattatgaaacaccgcagacgtggcttcgacgaaacggaggcgtaggcgagggattcgacattatgaaaaaccagagaagatactacactctaaaatggacatgaatcctctattaccagggaaggatgatgtttattacactgaaacagacgctgtctcacatccgttacccgcactagacgcacccagtctttctacagagagaatcgcgccgttcttgaatctgccattcgctgaatctgccattcgctgctgttgtttctggacagtgaagcagtattccggacagtgaacaaaaatctgggaacacatttcattttcactgtcattggctaccagagtccgggaacaaaatctgggaacaaaatctgggaacacaaaaatctgggaacaaaatctgcctttggctaccagagtttattgctcccatatcattcgctgtccatttcactgtccattcgctgaacacaaaaagctgggaacaaactcattttcccagtgaacaggtagcacaatttagttcacaaaatctgggagcacaatttagttcacaaaatctgggagcaataaacaggttgaacaggtagaacaaaatctgggagcaataaactgccatcccagaacaaaattcgcagctcacatttcagttcacaagctagttcacaatttagttcccaggtaccacaatttagttcacaagctagttcacaagctcacatttcaatggagcaatacacaggtagcagtttgacaagctattacacaagctcacatttctgggagcaatacacaggtagcagtttcacaagctatcacacaagctcacatttctgggagcaaaaaacaggtggcgtagtagcagtcgtgtgttcatcttcatttgcagcaacgacaagttcacggcttggtgcttcatcttcatttccagctacaacaacgacaagccacctgctttggcgcggactagggttgtggtcgcagcgccgccgccacctgctttggcgcggggccgcgagcagcaagggagaagacgcggagtttggagagaaggaggtgcagcgccgccgccacctgctttggcgcgggaccacgggcagcagatctccgggcagcaggggaggagactagcaggggagggaaatggagattgaagaaaatgagatggaaggaagaggcttgacgggagagagaagaaccttgaagagagaagaacggctctggacggcagaagaaaacggcgcgtgggctgatagcgacggaagatcattattcgttctcctgaacgactaataacgatgggatctggaataacaggagcctgatggttgcatcagtagagttgaccacttctcagtattgcgagatgcatcttacatggtcaagaagataattcctattctgaactacttgctcgtgttcgtgtacaagtctccttatcatgtcctcctttcaagccagtctattctttgcttgattcatcacgggtgcacattattgtaattagaatcttcagagtactcgaaggatagttaaagctgtttggctagtccttcagattactaaaaatatagttaagaacatttgtattttgctatttcgatttccaacagtacaactattggggatgattgcttttctttataaaagcaatcaagtaatttcttagctaagttctagctataagttctgcatgacatgctattgcccatgataattctgacaggattgcttcaactctttcaggttgatcagttttgcctagtcccagtaccatacaaagatgttcaggtgaacctgaaaattcttctcaatttgacttgcaagctttctgatgcgagcactaaatagtgatttttttgcaattttgtatgagccttgtttgag

SEQ ID NO: 214970 - DNA, 3033 bp, Zea Mays
caacttccagatcgttctcatcccatcgtttcctcctctgctcaagcacggcagccagtccagccaccatttgggtgctcatctccctctgctcggcacccagccccagctcgcccgagctccctgcgccgacctcatcctccccatggtgcgtcaccttctactcctctccttcccacggcacagcagcgcccctgcagctccccttctccagatccatggcgcccaacaccttgagcgcccctgccgctgctcctccaccgggatctcctcctccactaggcgtccaggcttgtcccaccatggctgcccctcctccatctcctccctccccaccaggttacccagattccatggccgccgccgccccagccatctccctggtggccgacctcgcccctgccccagccacagctcccccttcggccctgctgctgcaagcactcagcccctcccatggcacacggagaaatcccatgatttgggggaagacgaagtccaagcacaacccccgccaatcgctcgatgaaaaatctaaaccaaaaccctcagcgttttcatgggttccggagggattttatgttggtgttgtgcggtgtgatctccaattccctattgctgatgtcttactccatcatgaccttagggctttgatgattgctgtacaaggatgatatggcctcccgcccaaagctgtctggtattcagaagcaggttttggcgctgtacaggggattccttcggacagcacgccttaaggcccctgaagaacgccgcaggatcgagtctgttatcttggcagagttccgtgacaacgcaaggagtgttgaccgtaggaactttgtacacatagagtacttgttgaggagagggaagaagcagcttgagcagctcaagaatcctgatattactggactcgctacccttgtagtaaagaaatgagcaagagaagaaggaagacaagtcagacaaaacagaagacgagaagaggttcctaccataacacttaagcaaggaatcctgtacacttctctcctggggttgtgacttgtatattgtcaaggatcacttggatgtggtaaatgctatactggacactgatgatagctgcataaggattgtgcgaaaaaacgggaagacatccctacatactgctgcaaggattggataccatcgtattgtcaaggcactcatagagagggatccaggaattgttccgatcaaggataggaagggacaaactgcacttcacatggctgtgaaaggcaagaacacagatgtagtggaagagttactgatggctgatgtttccattctcaatgtgcgggacaagaagggaaatactgctttgcacatagctacatggaaatgggagaattttgggattatgaaacaccgcagacgtggcttcgacgaaacggaggcgtaggcgagggattcgacattatgaaaaaccagagaagatactacactctaaaatggacatgaatcctctattaccagggaaggatgatgtttattacactgaaacagacgctgtctcacatccgttacccgcactagacgcacccagtctttctacagagagaatcgcgccgttcttgaatctgccattcgctgaatctgccattcgctgctgttgtttctggacagtgaagcagtattccggacagtgaacaaaaatctgggaacacatttcattttcactgtcattggctaccagagtccgggaacaaaatctgggaacaaaatctgggaacacaaaaatctgggaacaaaatctgcctttggctaccagagtttattgctcccatatcattcgctgtccatttcactgtccattcgctgaacacaaaaagctgggaacaaactcattttcccagtgaacaggtagcacaatttagttcacaaaatctgggagcacaatttagttcacaaaatctgggagcaataaacaggttgaacaggtagaacaaaatctgggagcaataaactgccatcccagaacaaaattcgcagctcacatttcagttcacaagctagttcacaatttagttcccaggtaccacaatttagttcacaagctagttcacaagctcacatttcaatggagcaatacacaggtagcagtttgacaagctattacacaagctcacatttctgggagcaatacacaggtagcagtttcacaagctatcacacaagctcacatttctgggagcaaaaaacaggtggcgtagtagcagtcgtgtgttcatcttcatttgcagcaacgacaagttcacggcttggtgcttcatcttcatttccagctacaagtattggtgcttcatcttcatttgcagcttcgactattggtgcttctacttcatttgcagcttcgactattggtgcttctacttcatttgcagcaacgacaagccacctgctttggcgcggactagggttgtggtcgcagcgccgccgccacctgctttggcgcggggccgcgagcagcaagggagaagacgcggagtttggagagaaggaggtgcagcgccgccgccacctgctttggcgcgggaccacgggcagcagatctccgggcagcaggggaggagactagcaggggagggaaatggagattgaagaaaatgagatggaaggaagaggcttgacgggagagagaagaaccttgaagagagaagaacggctctggacggcagaagaaaacggcgcgtgggctgatagcgacggaagatcattattcgttctcctgaacgactaataacgatgggatctggaataacaggagcctgatggttgcatcagtagagttgaccacttctcagtattgcgagatgcatcttacatggtcaagaagataattcctattctgaactacttgctcgtgttgatcagttttgcctagtcccagtaccatacaaagatgttcaggtgaacctgaaaattcttctcaatttgacttgcaagctttctgatgcgagcactaaatagtgatttttttgcaattttgtatgagccttgtttgag

SEQ ID NO: 214971 - DNA, 4266 bp, Zea Mays
caacttccagatcgttctcatcccatcgtttcctcctctgctcaagcacggcagccagtccagccaccatttgggtgctcatctccctctgctcggcacccagccccagctcgcccgagctccctgcgccgacctcatcctccccatggtgcgtcaccttctactcctctccttcccacggcacagcagcgcccctgcagctccccttctccagatccatggcgcccaacaccttgagcgcccctgccgctgctcctccaccgggatctcctcctccactaggcgtccaggcttgtcccaccatggctgcccctcctccatctcctccctccccaccaggttacccagattccatggccgccgccgccccagccatctccctggtggccgacctcgcccctgccccagccacagctcccccttcggccctgctgctgcaagcactcagcccctcccatggcacacgccccatctgcaacaccgtcgacccccgacgaggtcctgttctcgccctgtcgttttagtactcggcgtcgattaagtagatgctaaccgtgtgtatattcgtgtgttcttgtgaggagaaatcccatgatttgggggaagacgaagtccaagcacaacccccgccaatcgctcgatgaaaaatctaaaccaaaaccctcagcgttttcatgggttccggagggattttatgttggtaaggtgttgtgcggtgtgatctccaattccctattgctgatgtcttactccatcatgaccttagggaaggatgttttcctctaaattactcgtaataattatgcttggtgtatgtgttgttttagctacttgatgaaatgttttagttgtgtgcgataatatggttgccgttcgagtggaaagtagatgtgttgtatgacctgagttggagttgaagcaagtatgtgtgtctcgtattacgaaactaattagagatatgcatgatgtttgtagatggattatgtgtagagtgttttagtacaagtatttttttaggtatagttgaaccaattattgtatatgaattgtgcgatatcaaggttgttctaatgttcttttaacatcttgctaataaggtgttagagtattctaaatgccaaacataggataattttacaagccaaatagaagttaaattgaaggtattgatgtttagggctgtaggtatagttttagttatgcagctagtccaataaagtagatcatgttttctgtagaagcgttatatataaaacttgtagataatctctttatcttacttgtgtaaaaatttcatgaccataggtgtagtagtttaggagttatgatttttccaagtccagtctcagaatctgtccgaattctatacaggtttcgaaaattggattgtttggctaagctaaactgagaatcagcccttagtaattatagaagaattgtagtacttttcttaagctttccaacaaattttggagcaccctttttggtggtctagagatcaagttacagctgtttgaactatagagtctgaatctgtccaaatctggacagcgaagtctgtttgtagtaactgactttgatatgtattgaattaacctgagatgtttataaatgaattgtagacaattctattaactttctaaaaagtctaggatcaccggatttggatttcggaaactccagttctggacttttgaagtagttagtcgaattctgtccaaatctggacaaaatttatgtttagcgctgtttgacctttctaaaggtcgaatcttgttgtgatggtaatacaaaagttatagaggactttataagctttccaaaaagtcctagtttactatttttggatacatattttatgaattgtgagctaaacagatagttgttgacttgctgttctgctgtccaaacacatgtctactgtctgaaaatagctcattttgtagttacatttgcatcaggctttgatgattgctgtacaaggatgatatggcctcccgcccaaagctgtctggtattcagaagcaggttttggcgctgtacaggggattccttcggacagcacgccttaaggcccctgaagaacgccgcaggatcgagtctgttatcttggcagagttccgtgacaacgcaaggagtgttgaccgtaggaactttgtacacatagagtacttgttgaggagagggaagaagcagcttgagcagctcaagaatcctgatattactggactcgctacccttgtagtaaagaaatgagcaagagaagaaggaagacaagtcagacaaaacagaagacgagaagaggttcctaccataacacttaagcaaggaatcctgtacacttctctcctggggttgtgacttgtatattgtcaaggatcacttggatgtggtaaatgctatactggacactgatgatagctgcataaggattgtgcgaaaaaacgggaagacatccctacatactgctgcaaggattggataccatcgtattgtcaaggcactcatagagagggatccaggaattgttccgatcaaggataggaagggacaaactgcacttcacatggctgtgaaaggcaagaacacagatgtagtggaagagttactgatggctgatgtttccattctcaatgtgcgggacaagaagggaaatactgctttgcacatagctacatggaaatgggagaattttgggattatgaaacaccgcagacgtggcttcgacgaaacggaggcgtaggcgagggattcgacattatgaaaaaccagagaagatactacactctaaaatggacatgaatcctctattaccagggaaggatgatgtttattacactgaaacagacgctgtctcacatccgttacccgcactagacgcacccagtctttctacagagagaatcgcgccgttcttgaatctgccattcgctgaatctgccattcgctgctgttgtttctggacagtgaagcagtattccggacagtgaacaaaaatctgggaacacatttcattttcactgtcattggctaccagagtccgggaacaaaatctgggaacaaaatctgggaacacaaaaatctgggaacaaaatctgcctttggctaccagagtttattgctcccatatcattcgctgtccatttcactgtccattcgctgaacacaaaaagctgggaacaaactcattttcccagtgaacaggtagcacaatttagttcacaaaatctgggagcacaatttagttcacaaaatctgggagcaataaacaggttgaacaggtagaacaaaatctgggagcaataaactgccatcccagaacaaaattcgcagctcacatttcagttcacaagctagttcacaatttagttcccaggtaccacaatttagttcacaagctagttcacaagctcacatttcaatggagcaatacacaggtagcagtttgacaagctattacacaagctcacatttctgggagcaatacacaggtagcagtttcacaagctatcacacaagctcacatttctgggagcaaaaaacaggtggcgtagtagcagtcgtgtgttcatcttcatttgcagcaacgacaagttcacggcttggtgcttcatcttcatttccagctacaagtattgcaacgacaagccacctgctttggcgcggactagggttgtggtcgcagcgccgccgccacctgctttggcgcggggccgcgagcagcaagggagaagacgcggagtttggagagaaggaggtgcagcgccgccgccacctgctttggcgcgggaccacgggcagcagatctccgggcagcaggggaggagactagcaggggagggaaatggagattgaagaaaatgagatggaaggaagaggcttgacgggagagagaagaaccttgaagagagaagaacggctctggacggcagaagaaaacggcgcgtgggctgatagcgacggaagatcattattcgttctcctgaacgactaataacgatgggatctggaataacaggagcctgatggttgcatcagtagagttgaccacttctcagtattgcgagatgcatcttacatggtcaagaagataattcctattctgaactacttgctcgtgttcgtgttgatcagttttgcctagtcccagtaccatacaaagatgttcaggtgaacctgaaaattcttctcaatttgacttgcaagctttctgatgcgagcactaaatagtgatttttttgcaattttgtatgagccttgtttgag

SEQ ID NO: 214972 - DNA, 4139 bp, Zea Mays
caacttccagatcgttctcatcccatcgtttcctcctctgctcaagcacggcagccagtccagccaccatttgggtgctcatctccctctgctcggcacccagccccagctcgcccgagctccctgcgccgacctcatcctccccatggtgcgtcaccttctactcctctccttcccacggcacagcagcgcccctgcagctccccttctccagatccatggcgcccaacaccttgagcgcccctgccgctgctcctccaccgggatctcctcctccactaggcgtccaggcttgtcccaccatggctgcccctcctccatctcctccctccccaccaggttacccagattccatggccgccgccgccccagccatctccctggtggccgacctcgcccctgccccagccacagctcccccttcggccctgctgctgcaagcactcagcccctcccatggcacacggagaaatcccatgatttgggggaagacgaagtccaagcacaacccccgccaatcgctcgatgaaaaatctaaaccaaaaccctcagcgttttcatgggttccggagggattttatgttggtaaggtgttgtgcggtgtgatctccaattccctattgctgatgtcttactccatcatgaccttagggaaggatgttttcctctaaattactcgtaataattatgcttggtgtatgtgttgttttagctacttgatgaaatgttttagttgtgtgcgataatatggttgccgttcgagtggaaagtagatgtgttgtatgacctgagttggagttgaagcaagtatgtgtgtctcgtattacgaaactaattagagatatgcatgatgtttgtagatggattatgtgtagagtgttttagtacaagtatttttttaggtatagttgaaccaattattgtatatgaattgtgcgatatcaaggttgttctaatgttcttttaacatcttgctaataaggtgttagagtattctaaatgccaaacataggataattttacaagccaaatagaagttaaattgaaggtattgatgtttagggctgtaggtatagttttagttatgcagctagtccaataaagtagatcatgttttctgtagaagcgttatatataaaacttgtagataatctctttatcttacttgtgtaaaaatttcatgaccataggtgtagtagtttaggagttatgatttttccaagtccagtctcagaatctgtccgaattctatacaggtttcgaaaattggattgtttggctaagctaaactgagaatcagcccttagtaattatagaagaattgtagtacttttcttaagctttccaacaaattttggagcaccctttttggtggtctagagatcaagttacagctgtttgaactatagagtctgaatctgtccaaatctggacagcgaagtctgtttgtagtaactgactttgatatgtattgaattaacctgagatgtttataaatgaattgtagacaattctattaactttctaaaaagtctaggatcaccggatttggatttcggaaactccagttctggacttttgaagtagttagtcgaattctgtccaaatctggacaaaatttatgtttagcgctgtttgacctttctaaaggtcgaatcttgttgtgatggtaatacaaaagttatagaggactttataagctttccaaaaagtcctagtttactatttttggatacatattttatgaattgtgagctaaacagatagttgttgacttgctgttctgctgtccaaacacatgtctactgtctgaaaatagctcattttgtagttacatttgcatcaggctttgatgattgctgtacaaggatgatatggcctcccgcccaaagctgtctggtattcagaagcaggttttggcgctgtacaggggattccttcggacagcacgccttaaggcccctgaagaacgccgcaggatcgagtctgttatcttggcagagttccgtgacaacgcaaggagtgttgaccgtaggaactttgtacacatagagtacttgttgaggagagggaagaagcagcttgagcagctcaagaatcctgatattactggactcgctacccttgtagtaaagaaatgagcaagagaagaaggaagacaagtcagacaaaacagaagacgagaagaggttcctaccataacacttaagcaaggaatcctgtacacttctctcctggggttgtgacttgtatattgtcaaggatcacttggatgtggtaaatgctatactggacactgatgatagctgcataaggattgtgcgaaaaaacgggaagacatccctacatactgctgcaaggattggataccatcgtattgtcaaggcactcatagagagggatccaggaattgttccgatcaaggataggaagggacaaactgcacttcacatggctgtgaaaggcaagaacacagatgtagtggaagagttactgatggctgatgtttccattctcaatgtgcgggacaagaagggaaatactgctttgcacatagctacatggaaatgggagaattttgggattatgaaacaccgcagacgtggcttcgacgaaacggaggcgtaggcgagggattcgacattatgaaaaaccagagaagatactacactctaaaatggacatgaatcctctattaccagggaaggatgatgtttattacactgaaacagacgctgtctcacatccgttacccgcactagacgcacccagtctttctacagagagaatcgcgccgttcttgaatctgccattcgctgaatctgccattcgctgctgttgtttctggacagtgaagcagtattccggacagtgaacaaaaatctgggaacacatttcattttcactgtcattggctaccagagtccgggaacaaaatctgggaacaaaatctgggaacacaaaaatctgggaacaaaatctgcctttggctaccagagtttattgctcccatatcattcgctgtccatttcactgtccattcgctgaacacaaaaagctgggaacaaactcattttcccagtgaacaggtagcacaatttagttcacaaaatctgggagcacaatttagttcacaaaatctgggagcaataaacaggttgaacaggtagaacaaaatctgggagcaataaactgccatcccagaacaaaattcgcagctcacatttcagttcacaagctagttcacaatttagttcccaggtaccacaatttagttcacaagctagttcacaagctcacatttcaatggagcaatacacaggtagcagtttgacaagctattacacaagctcacatttctgggagcaatacacaggtagcagtttcacaagctatcacacaagctcacatttctgggagcaaaaaacaggtggcgtagtagcagtcgtgtgttcatcttcatttgcagcaacgacaagttcacggcttggtgcttcatcttcatttccagctacaacaacgacaagccacctgctttggcgcggactagggttgtggtcgcagcgccgccgccacctgctttggcgcggggccgcgagcagcaagggagaagacgcggagtttggagagaaggaggtgcagcgccgccgccacctgctttggcgcgggaccacgggcagcagatctccgggcagcaggggaggagactagcaggggagggaaatggagattgaagaaaatgagatggaaggaagaggcttgacgggagagagaagaaccttgaagagagaagaacggctctggacggcagaagaaaacggcgcgtgggctgatagcgacggaagatcattattcgttctcctgaacgactaataacgatgggatctggaataacaggagcctgatggttgcatcagtagagttgaccacttctcagtattgcgagatgcatcttacatggtcaagaagataattcctattctgaactacttgctcgtgttgatcagttttgcctagtcccagtaccatacaaagatgttcaggtgaacctgaaaattcttctcaatttgacttgcaagctttctgatgcgagcactaaatagtgatttttttgcaattttgtatgagccttgtttgag

SEQ ID NO: 214973 - DNA, 3012 bp, Zea Mays
caacttccagatcgttctcatcccatcgtttcctcctctgctcaagcacggcagccagtccagccaccatttgggtgctcatctccctctgctcggcacccagccccagctcgcccgagctccctgcgccgacctcatcctccccatggtgcgtcaccttctactcctctccttcccacggcacagcagcgcccctgcagctccccttctccagatccatggcgcccaacaccttgagcgcccctgccgctgctcctccaccgggatctcctcctccactaggcgtccaggcttgtcccaccatggctgcccctcctccatctcctccctccccaccaggttacccagattccatggccgccgccgccccagccatctccctggtggccgacctcgcccctgccccagccacagctcccccttcggccctgctgctgcaagcactcagcccctcccatggcacacgccccatctgcaacaccgtcgacccccgacgaggtcctgttctcgccctgtcgttttagtactcggcgtcgattaagtagatgctaaccgtgtgtatattcgtgtgttcttgtgaggagaaatcccatgatttgggggaagacgaagtccaagcacaacccccgccaatcgctcgatgaaaaatctaaaccaaaaccctcagcgttttcatgggttccggagggattttatgttggtaaggtgttgtgcggtgtgatctccaattccctattgctgatgtcttactccatcatgaccttagggctttgatgattgctgtacaaggatgatatggcctcccgcccaaagctgtctggtattcagaagcaggttttggcgctgtacaggggattccttcggacagcacgccttaaggcccctgaagaacgccgcaggatcgagtctgttatcttggcagagttccgtgacaacgcaaggagtgttgaccgtaggaactttgtacacatagagtacttgttgaggagagggaagaagcagcttgagcagctcaagaatcctgatattactggactcgctacccttgtagtaaagaaatgagcaagagaagaaggaagacaagtcagacaaaacagaagacgagaagaggggttgtgacttgtatattgtcaaggatcacttggatgtggtaaatgctatactggacactgatgatagctgcataaggattgtgcgaaaaaacgggaagacatccctacatactgctgcaaggattggataccatcgtattgtcaaggcactcatagagagggatccaggaattgttccgatcaaggataggaagggacaaactgcacttcacatggctgtgaaaggcaagaacacagatgtagtggaagagttactgatggctgatgtttccattctcaatgtgcgggacaagaagggaaatactgctttgcacatagctacatggaaatgggagaattttgggattatgaaacaccgcagacgtggcttcgacgaaacggaggcgtaggcgagggattcgacattatgaaaaaccagagaagatactacactctaaaatggacatgaatcctctattaccagggaaggatgatgtttattacactgaaacagacgctgtctcacatccgttacccgcactagacgcacccagtctttctacagagagaatcgcgccgttcttgaatctgccattcgctgaatctgccattcgctgctgttgtttctggacagtgaagcagtattccggacagtgaacaaaaatctgggaacacatttcattttcactgtcattggctaccagagtccgggaacaaaatctgggaacaaaatctgggaacacaaaaatctgggaacaaaatctgcctttggctaccagagtttattgctcccatatcattcgctgtccatttcactgtccattcgctgaacacaaaaagctgggaacaaactcattttcccagtgaacaggtagcacaatttagttcacaaaatctgggagcacaatttagttcacaaaatctgggagcaataaacaggttgaacaggtagaacaaaatctgggagcaataaactgccatcccagaacaaaattcgcagctcacatttcagttcacaagctagttcacaatttagttcccaggtaccacaatttagttcacaagctagttcacaagctcacatttcaatggagcaatacacaggtagcagtttgacaagctattacacaagctcacatttctgggagcaatacacaggtagcagtttcacaagctatcacacaagctcacatttctgggagcaaaaaacaggtggcgtagtagcagtcgtgtgttcatcttcatttgcagcaacgacaagttcacggcttggtgcttcatcttcatttccagctacaacaacgacaagccacctgctttggcgcggactagggttgtggtcgcagcgccgccgccacctgctttggcgcggggccgcgagcagcaagggagaagacgcggagtttggagagaaggaggtgcagcgccgccgccacctgctttggcgcgggaccacgggcagcagatctccgggcagcaggggaggagactagcaggggagggaaatggagattgaagaaaatgagatggaaggaagaggcttgacgggagagagaagaaccttgaagagagaagaacggctctggacggcagaagaaaacggcgcgtgggctgatagcgacggaagatcattattcgttctcctgaacgactaataacgatgggatctggaataacaggagcctgatggttgcatcagtagagttgaccacttctcagtattgcgagatgcatcttacatggtcaagaagataattcctattctgaactacttgctcgtgttgatcagttttgcctagtcccagtaccatacaaagatgttcaggtgaacctgaaaattcttctcaatttgacttgcaagctttctgatgcgagcactaaatagtgatttttttgcaattttgtatgagccttgtttgag

SEQ ID NO: 214974 - DNA, 3081 bp, Zea Mays
caacttccagatcgttctcatcccatcgtttcctcctctgctcaagcacggcagccagtccagccaccatttgggtgctcatctccctctgctcggcacccagccccagctcgcccgagctccctgcgccgacctcatcctccccatggtgcgtcaccttctactcctctccttcccacggcacagcagcgcccctgcagctccccttctccagatccatggcgcccaacaccttgagcgcccctgccgctgctcctccaccgggatctcctcctccactaggcgtccaggcttgtcccaccatggctgcccctcctccatctcctccctccccaccaggttacccagattccatggccgccgccgccccagccatctccctggtggccgacctcgcccctgccccagccacagctcccccttcggccctgctgctgcaagcactcagcccctcccatggcacacggtactcgtccagcccctttctactggtggctgacccatctctatggtgctcgacgaaatgaccatgaggagttttgtgttgtgtgcagccccatctgcaacaccgtcgacccccgacgaggtcctgttctcgccctgtcgttttagtactcggcgtcgattaagtagatgctaaccgtgtgtatattcgtgtgttcttgtgaggagaaatcccatgatttgggggaagacgaagtccaagcacaacccccgccaatcgctcgatgaaaaatctaaaccaaaaccctcagcgttttcatgggttccggagggattttatgttggctttgatgattgctgtacaaggatgatatggcctcccgcccaaagctgtctggtattcagaagcaggttttggcgctgtacaggggattccttcggacagcacgccttaaggcccctgaagaacgccgcaggatcgagtctgttatcttggcagagttccgtgacaacgcaaggagtgttgaccgtaggaactttgtacacatagagtacttgttgaggagagggaagaagcagcttgagcagctcaagaatcctgatattactggactcgctacccttgtagtaaagaaatgagcaagagaagaaggaagacaagtcagacaaaacagaagacgagaagaggttcctaccataacacttaagcaaggaatcctgtacacttctctcctggggttgtgacttgtatattgtcaaggatcacttggatgtggtaaatgctatactggacactgatgatagctgcataaggattgtgcgaaaaaacgggaagacatccctacatactgctgcaaggattggataccatcgtattgtcaaggcactcatagagagggatccaggaattgttccgatcaaggataggaagggacaaactgcacttcacatggctgtgaaaggcaagaacacagatgtagtggaagagttactgatggctgatgtttccattctcaatgtgcgggacaagaagggaaatactgctttgcacatagctacatggaaatgggagaattttgggattatgaaacaccgcagacgtggcttcgacgaaacggaggcgtaggcgagggattcgacattatgaaaaaccagagaagatactacactctaaaatggacatgaatcctctattaccagggaaggatgatgtttattacactgaaacagacgctgtctcacatccgttacccgcactagacgcacccagtctttctacagagagaatcgcgccgttcttgaatctgccattcgctgaatctgccattcgctgctgttgtttctggacagtgaagcagtattccggacagtgaacaaaaatctgggaacacatttcattttcactgtcattggctaccagagtccgggaacaaaatctgggaacaaaatctgggaacacaaaaatctgggaacaaaatctgcctttggctaccagagtttattgctcccatatcattcgctgtccatttcactgtccattcgctgaacacaaaaagctgggaacaaactcattttcccagtgaacaggtagcacaatttagttcacaaaatctgggagcacaatttagttcacaaaatctgggagcaataaacaggttgaacaggtagaacaaaatctgggagcaataaactgccatcccagaacaaaattcgcagctcacatttcagttcacaagctagttcacaatttagttcccaggtaccacaatttagttcacaagctagttcacaagctcacatttcaatggagcaatacacaggtagcagtttgacaagctattacacaagctcacatttctgggagcaatacacaggtagcagtttcacaagctatcacacaagctcacatttctgggagcaaaaaacaggtggcgtagtagcagtcgtgtgttcatcttcatttgcagcaacgacaagttcacggcttggtgcttcatcttcatttccagctacaacaacgacaagccacctgctttggcgcggactagggttgtggtcgcagcgccgccgccacctgctttggcgcggggccgcgagcagcaagggagaagacgcggagtttggagagaaggaggtgcagcgccgccgccacctgctttggcgcgggaccacgggcagcagatctccgggcagcaggggaggagactagcaggggagggaaatggagattgaagaaaatgagatggaaggaagaggcttgacgggagagagaagaaccttgaagagagaagaacggctctggacggcagaagaaaacggcgcgtgggctgatagcgacggaagatcattattcgttctcctgaacgactaataacgatgggatctggaataacaggagcctgatggttgcatcagtagagttgaccacttctcagtattgcgagatgcatcttacatggtcaagaagataattcctattctgaactacttgctcgtgttgatcagttttgcctagtcccagtaccatacaaagatgttcaggtgaacctgaaaattcttctcaatttgacttgcaagctttctgatgcgagcactaaatagtgatttttttgcaattttgtatgagccttgtttgag

SEQ ID NO: 214975 - DNA, 2998 bp, Zea Mays
caacttccagatcgttctcatcccatcgtttcctcctctgctcaagcacggcagccagtccagccaccatttgggtgctcatctccctctgctcggcacccagccccagctcgcccgagctccctgcgccgacctcatcctccccatggtgcgtcaccttctactcctctccttcccacggcacagcagcgcccctgcagctccccttctccagatccatggcgcccaacaccttgagcgcccctgccgctgctcctccaccgggatctcctcctccactaggcgtccaggcttgtcccaccatggctgcccctcctccatctcctccctccccaccaggttacccagattccatggccgccgccgccccagccatctccctggtggccgacctcgcccctgccccagccacagctcccccttcggccctgctgctgcaagcactcagcccctcccatggcacacgccccatctgcaacaccgtcgacccccgacgaggtcctgttctcgccctgtcgttttagtactcggcgtcgattaagtagatgctaaccgtgtgtatattcgtgtgttcttgtgaggagaaatcccatgatttgggggaagacgaagtccaagcacaacccccgccaatcgctcgatgaaaaatctaaaccaaaaccctcagcgttttcatgggttccggagggattttatgttggtaaggctttgatgattgctgtacaaggatgatatggcctcccgcccaaagctgtctggtattcagaagcaggttttggcgctgtacaggggattccttcggacagcacgccttaaggcccctgaagaacgccgcaggatcgagtctgttatcttggcagagttccgtgacaacgcaaggagtgttgaccgtaggaactttgtacacatagagtacttgttgaggagagggaagaagcagcttgagcagctcaagaatcctgatattactggactcgctacccttgtagtaaagaaatgagcaagagaagaaggaagacaagtcagacaaaacagaagacgagaagaggttcctaccataacacttaagcaaggaatcctgtacacttctctcctggggttgtgacttgtatattgtcaaggatcacttggatgtggtaaatgctatactggacactgatgatagctgcataaggattgtgcgaaaaaacgggaagacatccctacatactgctgcaaggattggataccatcgtattgtcaaggcactcatagagagggatccaggaattgttccgatcaaggataggaagggacaaactgcacttcacatggctgtgaaaggcaagaacacagatgtagtggaagagttactgatggctgatgtttccattctcaatgtgcgggacaagaagggaaatactgctttgcacatagctacatggaaatgggagaattttgggattatgaaacaccgcagacgtggcttcgacgaaacggaggcgtaggcgagggattcgacattatgaaaaaccagagaagatactacactctaaaatggacatgaatcctctattaccagggaaggatgatgtttattacactgaaacagacgctgtctcacatccgttacccgcactagacgcacccagtctttctacagagagaatcgcgccgttcttgaatctgccattcgctgaatctgccattcgctgctgttgtttctggacagtgaagcagtattccggacagtgaacaaaaatctgggaacacatttcattttcactgtcattggctaccagagtccgggaacaaaatctgggaacaaaatctgggaacacaaaaatctgggaacaaaatctgcctttggctaccagagtttattgctcccatatcattcgctgtccatttcactgtccattcgctgaacacaaaaagctgggaacaaactcattttcccagtgaacaggtagcacaatttagttcacaaaatctgggagcacaatttagttcacaaaatctgggagcaataaacaggttgaacaggtagaacaaaatctgggagcaataaactgccatcccagaacaaaattcgcagctcacatttcagttcacaagctagttcacaatttagttcccaggtaccacaatttagttcacaagctagttcacaagctcacatttcaatggagcaatacacaggtagcagtttgacaagctattacacaagctcacatttctgggagcaatacacaggtagcagtttcacaagctatcacacaagctcacatttctgggagcaaaaaacaggtggcgtagtagcagtcgtgtgttcatcttcatttgcagcaacgacaagttcacggcttggtgcttcatcttcatttccagctacaacaacgacaagccacctgctttggcgcggactagggttgtggtcgcagcgccgccgccacctgctttggcgcggggccgcgagcagcaagggagaagacgcggagtttggagagaaggaggtgcagcgccgccgccacctgctttggcgcgggaccacgggcagcagatctccgggcagcaggggaggagactagcaggggagggaaatggagattgaagaaaatgagatggaaggaagaggcttgacgggagagagaagaaccttgaagagagaagaacggctctggacggcagaagaaaacggcgcgtgggctgatagcgacggaagatcattattcgttctcctgaacgactaataacgatgggatctggaataacaggagcctgatggttgcatcagtagagttgaccacttctcagtattgcgagatgcatcttacatggtcaagaagataattcctattctgaactacttgctcgtgttgatcagttttgcctagtcccagtaccatacaaagatgttcaggtgaacctgaaaattcttctcaatttgacttgcaagctttctgatgcgagcactaaatagtgatttttttgcaattttgtatgagccttgtttgag

SEQ ID NO: 214976 - DNA, 4264 bp, Zea Mays
caacttccagatcgttctcatcccatcgtttcctcctctgctcaagcacggcagccagtccagccaccatttgggtgctcatctccctctgctcggcacccagccccagctcgcccgagctccctgcgccgacctcatcctccccatgccccatctgcaacaccgtcgacccccgacgaggtcctgttctcgccctgtcgttttagtactcggcgtcgattaagtagatgctaaccgtgtgtatattcgtgtgttcttgtgaggagaaatcccatgatttgggggaagacgaagtccaagcacaacccccgccaatcgctcgatgaaaaatctaaaccaaaaccctcagcgttttcatgggttccggagggattttatgttggtaaggtgttgtgcggtgtgatctccaattccctattgctgatgtcttactccatcatgaccttagggaaggatgttttcctctaaattactcgtaataattatgcttggtgtatgtgttgttttagctacttgatgaaatgttttagttgtgtgcgataatatggttgccgttcgagtggaaagtagatgtgttgtatgacctgagttggagttgaagcaagtatgtgtgtctcgtattacgaaactaattagagatatgcatgatgtttgtagatggattatgtgtagagtgttttagtacaagtatttttttaggtatagttgaaccaattattgtatatgaattgtgcgatatcaaggttgttctaatgttcttttaacatcttgctaataaggtgttagagtattctaaatgccaaacataggataattttacaagccaaatagaagttaaattgaaggtattgatgtttagggctgtaggtatagttttagttatgcagctagtccaataaagtagatcatgttttctgtagaagcgttatatataaaacttgtagataatctctttatcttacttgtgtaaaaatttcatgaccataggtgtagtagtttaggagttatgatttttccaagtccagtctcagaatctgtccgaattctatacaggtttcgaaaattggattgtttggctaagctaaactgagaatcagcccttagtaattatagaagaattgtagtacttttcttaagctttccaacaaattttggagcaccctttttggtggtctagagatcaagttacagctgtttgaactatagagtctgaatctgtccaaatctggacagcgaagtctgtttgtagtaactgactttgatatgtattgaattaacctgagatgtttataaatgaattgtagacaattctattaactttctaaaaagtctaggatcaccggatttggatttcggaaactccagttctggacttttgaagtagttagtcgaattctgtccaaatctggacaaaatttatgtttagcgctgtttgacctttctaaaggtcgaatcttgttgtgatggtaatacaaaagttatagaggactttataagctttccaaaaagtcctagtttactatttttggatacatattttatgaattgtgagctaaacagatagttgttgacttgctgttctgctgtccaaacacatgtctactgtctgaaaatagctcattttgtagttacatttgcatcaggctttgatgattgctgtacaaggatgatatggcctcccgcccaaagctgtctggtattcagaagcaggttttggcgctgtacaggggattccttcggacagcacgccttaaggcccctgaagaacgccgcaggatcgagtctgttatcttggcagagttccgtgacaacgcaaggagtgttgaccgtaggaactttgtacacatagagtacttgttgaggagagggaagaagcagcttgagcagctcaagaatcctgatattactggactcgctacccttgtagtaaagaaatgagcaagagaagaaggaagacaagtcagacaaaacagaagacgagaagaggttcctaccataacacttaagcaaggaatcctgtacacttctctcctggggttgtgacttgtatattgtcaaggatcacttggatgtggtaaatgctatactggacactgatgatagctgcataaggattgtgcgaaaaaacgggaagacatccctacatactgctgcaaggattggataccatcgtattgtcaaggcactcatagagagggatccaggaattgttccgatcaaggataggaagggacaaactgcacttcacatggctgtgaaaggcaagaacacagatgtagtggaagagttactgatggctgatgtttccattctcaatgtgcgggacaagaagggaaatactgctttgcacatagctacatggaaatgggagaattttgggattatgaaacaccgcagacgtggcttcgacgaaacggaggcgtaggcgagggattcgacattatgaaaaaccagagaagatactacactctaaaatggacatgaatcctctattaccagggaaggatgatgtttattacactgaaacagacgctgtctcacatccgttacccgcactagacgcacccagtctttctacagagagaatcgcgccgttcttgaatctgccattcgctgaatctgccattcgctgctgttgtttctggacagtgaagcagtattccggacagtgaacaaaaatctgggaacacatttcattttcactgtcattggctaccagagtccgggaacaaaatctgggaacaaaatctgggaacacaaaaatctgggaacaaaatctgcctttggctaccagagtttattgctcccatatcattcgctgtccatttcactgtccattcgctgaacacaaaaagctgggaacaaactcattttcccagtgaacaggtagcacaatttagttcacaaaatctgggagcacaatttagttcacaaaatctgggagcaataaacaggttgaacaggtagaacaaaatctgggagcaataaactgccatcccagaacaaaattcgcagctcacatttcagttcacaagctagttcacaatttagttcccaggtaccacaatttagttcacaagctagttcacaagctcacatttcaatggagcaatacacaggtagcagtttgacaagctattacacaagctcacatttctgggagcaatacacaggtagcagtttcacaagctatcacacaagctcacatttctgggagcaaaaaacaggtggcgtagtagcagtcgtgtgttcatcttcatttgcagcaacgacaagttcacggcttggtgcttcatcttcatttccagctacaacaacgacaagccacctgctttggcgcggactagggttgtggtcgcagcgccgccgccacctgctttggcgcggggccgcgagcagcaagggagaagacgcggagtttggagagaaggaggtgcagcgccgccgccacctgctttggcgcgggaccacgggcagcagatctccgggcagcaggggaggagactagcaggggagggaaatggagattgaagaaaatgagatggaaggaagaggcttgacgggagagagaagaaccttgaagagagaagaacggctctggacggcagaagaaaacggcgcgtgggctgatagcgacggaagatcattattcgttctcctgaacgactaataacgatgggatctggaataacaggagcctgatggttgcatcagtagagttgaccacttctcagtattgcgagatgcatcttacatggtcaagaagataattcctattctgaactacttgctcgtgttcgtgtacaagtctccttatcatgtcctcctttcaagccagtctattctttgcttgattcatcacgggtgcacattattgtaattagaatcttcagagtactcgaaggatagttaaagctgtttggctagtccttcagattactaaaaatatagttaagaacatttgtattttgctatttcgatttccaacagtacaactattggggatgattgcttttctttataaaagcaatcaagtaatttcttagctaagttctagctataagttctgcatgacatgctattgcccatgataattctgacaggattgcttcaactctttcaggttgatcagttttgcctagtcccagtaccatacaaagatgttcaggtgaacctgaaaattcttctcaatttgacttgcaagctttctgatgcgagcactaaatagtgatttttttgcaattttgtatgagccttgtttgag

SEQ ID NO: 214977 - DNA, 4211 bp, Zea Mays
caacttccagatcgttctcatcccatcgtttcctcctctgctcaagcacggcagccagtccagccaccatttgggtgctcatctccctctgctcggcacccagccccagctcgcccgagctccctgcgccgacctcatcctccccatggtgcgtcaccttctactcctctccttcccacggcacagcagcgcccctgcagctccccttctccagatccatggcgcccaacaccttgagcgcccctgccgctgctcctccaccgggatctcctcctccactaggcgtccaggcttgtcccaccatggctgcccctcctccatctcctccctccccaccaggttacccagattccatggccgccgccgccccagccatctccctggtggccgacctcgcccctgccccagccacagctcccccttcggccctgctgctgcaagcactcagcccctcccatggcacacgccccatctgcaacaccgtcgacccccgacgaggtcctgttctcgccctgtcgttttagtactcggcgtcgattaagtagatgctaaccgtgtgtatattcgtgtgttcttgtgaggagaaatcccatgatttgggggaagacgaagtccaagcacaacccccgccaatcgctcgatgaaaaatctaaaccaaaaccctcagcgttttcatgggttccggagggattttatgttggtgttgtgcggtgtgatctccaattccctattgctgatgtcttactccatcatgaccttagggaaggatgttttcctctaaattactcgtaataattatgcttggtgtatgtgttgttttagctacttgatgaaatgttttagttgtgtgcgataatatggttgccgttcgagtggaaagtagatgtgttgtatgacctgagttggagttgaagcaagtatgtgtgtctcgtattacgaaactaattagagatatgcatgatgtttgtagatggattatgtgtagagtgttttagtacaagtatttttttaggtatagttgaaccaattattgtatatgaattgtgcgatatcaaggttgttctaatgttcttttaacatcttgctaataaggtgttagagtattctaaatgccaaacataggataattttacaagccaaatagaagttaaattgaaggtattgatgtttagggctgtaggtatagttttagttatgcagctagtccaataaagtagatcatgttttctgtagaagcgttatatataaaacttgtagataatctctttatcttacttgtgtaaaaatttcatgaccataggtgtagtagtttaggagttatgatttttccaagtccagtctcagaatctgtccgaattctatacaggtttcgaaaattggattgtttggctaagctaaactgagaatcagcccttagtaattatagaagaattgtagtacttttcttaagctttccaacaaattttggagcaccctttttggtggtctagagatcaagttacagctgtttgaactatagagtctgaatctgtccaaatctggacagcgaagtctgtttgtagtaactgactttgatatgtattgaattaacctgagatgtttataaatgaattgtagacaattctattaactttctaaaaagtctaggatcaccggatttggatttcggaaactccagttctggacttttgaagtagttagtcgaattctgtccaaatctggacaaaatttatgtttagcgctgtttgacctttctaaaggtcgaatcttgttgtgatggtaatacaaaagttatagaggactttataagctttccaaaaagtcctagtttactatttttggatacatattttatgaattgtgagctaaacagatagttgttgacttgctgttctgctgtccaaacacatgtctactgtctgaaaatagctcattttgtagttacatttgcatcaggctttgatgattgctgtacaaggatgatatggcctcccgcccaaagctgtctggtattcagaagcaggttttggcgctgtacaggggattccttcggacagcacgccttaaggcccctgaagaacgccgcaggatcgagtctgttatcttggcagagttccgtgacaacgcaaggagtgttgaccgtaggaactttgtacacatagagtacttgttgaggagagggaagaagcagcttgagcagctcaagaatcctgatattactggactcgctacccttgtagtaaagaaatgagcaagagaagaaggaagacaagtcagacaaaacagaagacgagaagaggttcctaccataacacttaagcaaggaatcctgtacacttctctcctggggttgtgacttgtatattgtcaaggatcacttggatgtggtaaatgctatactggacactgatgatagctgcataaggattgtgcgaaaaaacgggaagacatccctacatactgctgcaaggattggataccatcgtattgtcaaggcactcatagagagggatccaggaattgttccgatcaaggataggaagggacaaactgcacttcacatggctgtgaaaggcaagaacacagatgtagtggaagagttactgatggctgatgtttccattctcaatgtgcgggacaagaagggaaatactgctttgcacatagctacatggaaatgggagaattttgggattatgaaacaccgcagacgtggcttcgacgaaacggaggcgtaggcgagggattcgacattatgaaaaaccagagaagatactacactctaaaatggacatgaatcctctattaccagggaaggatgatgtttattacactgaaacagacgctgtctcacatccgttacccgcactagacgcacccagtctttctacagagagaatcgcgccgttcttgaatctgccattcgctgaatctgccattcgctgctgttgtttctggacagtgaagcagtattccggacagtgaacaaaaatctgggaacacatttcattttcactgtcattggctaccagagtccgggaacaaaatctgggaacaaaatctgggaacacaaaaatctgggaacaaaatctgcctttggctaccagagtttattgctcccatatcattcgctgtccatttcactgtccattcgctgaacacaaaaagctgggaacaaactcattttcccagtgaacaggtagcacaatttagttcacaaaatctgggagcacaatttagttcacaaaatctgggagcaataaacaggttgaacaggtagaacaaaatctgggagcaataaactgccatcccagaacaaaattcgcagctcacatttcagttcacaagctagttcacaatttagttcccaggtaccacaatttagttcacaagctagttcacaagctcacatttcaatggagcaatacacaggtagcagtttgacaagctattacacaagctcacatttctgggagcaatacacaggtagcagtttcacaagctatcacacaagctcacatttctgggagcaaaaaacaggtggcgtagtagcagtcgtgtgttcatcttcatttgcagcaacgacaagttcacggcttggtgcttcatcttcatttccagctacaacaacgacaagccacctgctttggcgcggactagggttgtggtcgcagcgccgccgccacctgctttggcgcggggccgcgagcagcaagggagaagacgcggagtttggagagaaggaggtgcagcgccgccgccacctgctttggcgcgggaccacgggcagcagatctccgggcagcaggggaggagactagcaggggagggaaatggagattgaagaaaatgagatggaaggaagaggcttgacgggagagagaagaaccttgaagagagaagaacggctctggacggcagaagaaaacggcgcgtgggctgatagcgacggaagatcattattcgttctcctgaacgactaataacgatgggatctggaataacaggagcctgatggttgcatcagtagagttgaccacttctcagtattgcgagatgcatcttacatggttgatcagttttgcctagtcccagtaccatacaaagatgttcaggtgaacctgaaaattcttctcaatttgacttgcaagctttctgatgcgagcactaaatagtgatttttttgcaattttgtatgagccttgtttgag

SEQ ID NO: 214978 - DNA, 2977 bp, Zea Mays
gcaacttccagatcgttctcatcccatcgtttcctcctctgctcaagcacggcagccagtccagccaccatttgggtgctcatctccctctgctcggcacccagccccagctcgcccgagctccctgcgccgacctcatcctccccatggtgcgtcaccttctactcctctccttcccacggcacagcagcgcccctgcagctccccttctccagatccatggcgcccaacaccttgagcgcccctgccgctgctcctccaccgggatctcctcctccactaggcgtccaggcttgtcccaccatggctgcccctcctccatctcctccctccccaccaggttacccagattccatggccgccgccgccccagccatctccctggtggccgacctcgcccctgccccagccacagctcccccttcggccctgctgctgcaagcactcagcccctcccatggcacacgccccatctgcaacaccgtcgacccccgacgaggtcctgttctcgccctgtcgttttagtactcggcgtcgattaagtagatgctaaccgtgtgtatattcgtgtgttcttgtgaggagaaatcccatgatttgggggaagacgaagtccaagcacaacccccgccaatcgctcgatgaaaaatctaaaccaaaaccctcagcgttttcatgggttccggagggattttatgttggtaaggatgatatggcctcccgcccaaagctgtctggtattcagaagcaggttttggcgctgtacaggggattccttcggacagcacgccttaaggcccctgaagaacgccgcaggatcgagtctgttatcttggcagagttccgtgacaacgcaaggagtgttgaccgtaggaactttgtacacatagagtacttgttgaggagagggaagaagcagcttgagcagctcaagaatcctgatattactggactcgctacccttgtagtaaagaaatgagcaagagaagaaggaagacaagtcagacaaaacagaagacgagaagaggttcctaccataacacttaagcaaggaatcctgtacacttctctcctggggttgtgacttgtatattgtcaaggatcacttggatgtggtaaatgctatactggacactgatgatagctgcataaggattgtgcgaaaaaacgggaagacatccctacatactgctgcaaggattggataccatcgtattgtcaaggcactcatagagagggatccaggaattgttccgatcaaggataggaagggacaaactgcacttcacatggctgtgaaaggcaagaacacagatgtagtggaagagttactgatggctgatgtttccattctcaatgtgcgggacaagaagggaaatactgctttgcacatagctacatggaaatgggagaattttgggattatgaaacaccgcagacgtggcttcgacgaaacggaggcgtaggcgagggattcgacattatgaaaaaccagagaagatactacactctaaaatggacatgaatcctctattaccagggaaggatgatgtttattacactgaaacagacgctgtctcacatccgttacccgcactagacgcacccagtctttctacagagagaatcgcgccgttcttgaatctgccattcgctgaatctgccattcgctgctgttgtttctggacagtgaagcagtattccggacagtgaacaaaaatctgggaacacatttcattttcactgtcattggctaccagagtccgggaacaaaatctgggaacaaaatctgggaacacaaaaatctgggaacaaaatctgcctttggctaccagagtttattgctcccatatcattcgctgtccatttcactgtccattcgctgaacacaaaaagctgggaacaaactcattttcccagtgaacaggtagcacaatttagttcacaaaatctgggagcacaatttagttcacaaaatctgggagcaataaacaggttgaacaggtagaacaaaatctgggagcaataaactgccatcccagaacaaaattcgcagctcacatttcagttcacaagctagttcacaatttagttcccaggtaccacaatttagttcacaagctagttcacaagctcacatttcaatggagcaatacacaggtagcagtttgacaagctattacacaagctcacatttctgggagcaatacacaggtagcagtttcacaagctatcacacaagctcacatttctgggagcaaaaaacaggtggcgtagtagcagtcgtgtgttcatcttcatttgcagcaacgacaagttcacggcttggtgcttcatcttcatttccagctacaacaacgacaagccacctgctttggcgcggactagggttgtggtcgcagcgccgccgccacctgctttggcgcggggccgcgagcagcaagggagaagacgcggagtttggagagaaggaggtgcagcgccgccgccacctgctttggcgcgggaccacgggcagcagatctccgggcagcaggggaggagactagcaggggagggaaatggagattgaagaaaatgagatggaaggaagaggcttgacgggagagagaagaaccttgaagagagaagaacggctctggacggcagaagaaaacggcgcgtgggctgatagcgacggaagatcattattcgttctcctgaacgactaataacgatgggatctggaataacaggagcctgatggttgcatcagtagagttgaccacttctcagtattgcgagatgcatcttacatggtcaagaagataattcctattctgaactacttgctcgtgttgatcagttttgcctagtcccagtaccatacaaagatgttcaggtgaacctgaaaattcttctcaatttgacttgcaagctttctgatgcgagcactaaatagtgatttttttgcaattttgtatgagccttgtttgag

SEQ ID NO: 214979 - DNA, 3069 bp, Zea Mays
ctgcaacttccagatcgttctcatcccatcgtttcctcctctgctcaagcacggcagccagtccagccaccatttgggtgctcatctccctctgctcggcacccagccccagctcgcccgagctccctgcgccgacctcatcctccccatggtgcgtcaccttctactcctctccttcccacggcacagcagcgcccctgcagctccccttctccagatccatggcgcccaacaccttgagcgcccctgccgctgctcctccaccgggatctcctcctccactaggcgtccaggcttgtcccaccatggctgcccctcctccatctcctccctccccaccaggttacccagattccatggccgccgccgccccagccatctccctggtggccgacctcgcccctgccccagccacagctcccccttcggccctgctgctgcaagcactcagcccctcccatggcacacgccccatctgcaacaccgtcgacccccgacgaggtcctgttctcgccctgtcgttttagtactcggcgtcgattaagtagatgctaaccgtgtgtatattcgtgtgttcttgtgaggagaaatcccatgatttgggggaagacgaagtccaagcacaacccccgccaatcgctcgatgaaaaatctaaaccaaaaccctcagcgttttcatgggttccggagggattttatgttggtaaggtgttgtgcggtgtgatctccaattccctattgctgatgtcttactccatcatgaccttagggctttgatgattgctgtacaaggatgatatggcctcccgcccaaagctgtctggtattcagaagcaggttttggcgctgtacaggggattccttcggacagcacgccttaaggcccctgaagaacgccgcaggatcgagtctgttatcttggcagagttccgtgacaacgcaaggagtgttgaccgtaggaactttgtacacatagagtacttgttgaggagagggaagaagcagcttgagcagctcaagaatcctgatattactggactcgctacccttgtagtaaagaaatgagcaagagaagaaggaagacaagtcagacaaaacagaagacgagaagaggttcctaccataacacttaagcaaggaatcctgtacacttctctcctggggttgtgacttgtatattgtcaaggatcacttggatgtggtaaatgctatactggacactgatgatagctgcataaggattgtgcgaaaaaacgggaagacatccctacatactgctgcaaggattggataccatcgtattgtcaaggcactcatagagagggatccaggaattgttccgatcaaggataggaagggacaaactgcacttcacatggctgtgaaaggcaagaacacagatgtagtggaagagttactgatggctgatgtttccattctcaatgtgcgggacaagaagggaaatactgctttgcacatagctacatggaaatgggagaattttgggattatgaaacaccgcagacgtggcttcgacgaaacggaggcgtaggcgagggattcgacattatgaaaaaccagagaagatactacactctaaaatggacatgaatcctctattaccagggaaggatgatgtttattacactgaaacagacgctgtctcacatccgttacccgcactagacgcacccagtctttctacagagagaatcgcgccgttcttgaatctgccattcgctgaatctgccattcgctgctgttgtttctggacagtgaagcagtattccggacagtgaacaaaaatctgggaacacatttcattttcactgtcattggctaccagagtccgggaacaaaatctgggaacaaaatctgggaacacaaaaatctgggaacaaaatctgcctttggctaccagagtttattgctcccatatcattcgctgtccatttcactgtccattcgctgaacacaaaaagctgggaacaaactcattttcccagtgaacaggtagcacaatttagttcacaaaatctgggagcacaatttagttcacaaaatctgggagcaataaacaggttgaacaggtagaacaaaatctgggagcaataaactgccatcccagaacaaaattcgcagctcacatttcagttcacaagctagttcacaatttagttcccaggtaccacaatttagttcacaagctagttcacaagctcacatttcaatggagcaatacacaggtagcagtttgacaagctattacacaagctcacatttctgggagcaatacacaggtagcagtttcacaagctatcacacaagctcacatttctgggagcaaaaaacaggtggcgtagtagcagtcgtgtgttcatcttcatttgcagcaacgacaagttcacggcttggtgcttcatcttcatttccagctacaacaacgacaagccacctgctttggcgcggactagggttgtggtcgcagcgccgccgccacctgctttggcgcggggccgcgagcagcaagggagaagacgcggagtttggagagaaggaggtgcagcgccgccgccacctgctttggcgcgggaccacgggcagcagatctccgggcagcaggggaggagactagcaggggagggaaatggagattgaagaaaatgagatggaaggaagaggcttgacgggagagagaagaaccttgaagagagaagaacggctctggacggcagaagaaaacggcgcgtgggctgatagcgacggaagatcattattcgttctcctgaacgactaataacgatgggatctggaataacaggagcctgatggttgcatcagtagagttgaccacttctcagtattgcgagatgcatcttacatggtcaagaagataattcctattctgaactacttgctcgtgttcgtgttgatcagttttgcctagtcccagtaccatacaaagatgttcaggtgaacctgaaaattcttctcaatttgacttgcaagctttctgatgcgagcactaaatagtgatttttttgcaattttgtatgagccttgtttgag

SEQ ID NO: 214980 - DNA, 2939 bp, Zea Mays
ctgcaacttccagatcgttctcatcccatcgtttcctcctctgctcaagcacggcagccagtccagccaccatttgggtgctcatctccctctgctcggcacccagccccagctcgcccgagctccctgcgccgacctcatcctccccatggtgcgtcaccttctactcctctccttcccacggcacagcagcgcccctgcagctccccttctccagatccatggcgcccaacaccttgagcgcccctgccgctgctcctccaccgggatctcctcctccactaggcgtccaggcttgtcccaccatggctgcccctcctccatctcctccctccccaccaggttacccagattccatggccgccgccgccccagccatctccctggtggccgacctcgcccctgccccagccacagctcccccttcggccctgctgctgcaagcactcagcccctcccatggcacacgccccatctgcaacaccgtcgacccccgacgagaaatcccatgatttgggggaagacgaagtccaagcacaacccccgccaatcgctcgatgaaaaatctaaaccaaaaccctcagcgttttcatgggttccggagggattttatgttggtaaggtgttgtgcggtgtgatctccaattccctattgctgatgtcttactccatcatgaccttagggctttgatgattgctgtacaaggatgatatggcctcccgcccaaagctgtctggtattcagaagcaggttttggcgctgtacaggggattccttcggacagcacgccttaaggcccctgaagaacgccgcaggatcgagtctgttatcttggcagagttccgtgacaacgcaaggagtgttgaccgtaggaactttgtacacatagagtacttgttgaggagagggaagaagcagcttgagcagctcaagaatcctgatattactggactcgctacccttgtagtaaagaaatgagcaagagaagaaggaagacaagtcagacaaaacagaagacgagaagaggttcctaccataacacttaagcaaggaatcctgtacacttctctcctggggttgtgacttgtatattgtcaaggatcacttggatgtggtaaatgctatactggacactgatgatagctgcataaggattgtgcgaaaaaacgggaagacatccctacatactgctgcaaggattggataccatcgtattgtcaaggcactcatagagagggatccaggaattgttccgatcaaggataggaagggacaaactgcacttcacatggctgtgaaaggcaagaacacagatgtagtggaagagttactgatggctgatgtttccattctcaatgtgcgggacaagaagggaaatactgctttgcacatagctacatggaaatgggagaattttgggattatgaaacaccgcagacgtggcttcgacgaaacggaggcgtaggcgagggattcgacattatgaaaaaccagagaagatactacactctaaaatggacatgaatcctctattaccagggaaggatgatgtttattacactgaaacagacgctgtctcacatccgttacccgcactagacgcacccagtctttctacagagagaatcgcgccgttcttgaatctgccattcgctgaatctgccattcgctgctgttgtttctggacagtgaagcagtattccggacagtgaacaaaaatctgggaacacatttcattttcactgtcattggctaccagagtccgggaacaaaatctgggaacaaaatctgggaacacaaaaatctgggaacaaaatctgcctttggctaccagagtttattgctcccatatcattcgctgtccatttcactgtccattcgctgaacacaaaaagctgggaacaaactcattttcccagtgaacaggtagcacaatttagttcacaaaatctgggagcacaatttagttcacaaaatctgggagcaataaacaggttgaacaggtagaacaaaatctgggagcaataaactgccatcccagaacaaaattcgcagctcacatttcagttcacaagctagttcacaatttagttcccaggtaccacaatttagttcacaagctagttcacaagctcacatttcaatggagcaatacacaggtagcagtttgacaagctattacacaagctcacatttctgggagcaatacacaggtagcagtttcacaagctatcacacaagctcacatttctgggagcaaaaaacaggtggcgtagtagcagtcgtgtgttcatcttcatttgcagcaacgacaagttcacggcttggtgcttcatcttcatttccagctacaacaacgacaagccacctgctttggcgcggactagggttgtggtcgcagcgccgccgccacctgctttggcgcggggccgcgagcagcaagggagaagacgcggagtttggagagaaggaggtgcagcgccgccgccacctgctttggcgcgggaccacgggcagcagatctccgggcagcaggggaggagactagcaggggagggaaatggagattgaagaaaatgagatggaaggaagaggcttgacgggagagagaagaaccttgaagagagaagaacggctctggacggcagaagaaaacggcgcgtgggctgatagcgacggaagatcattattcgttctcctgaacgactaataacgatgggatctggaataacaggagcctgatggttgcatcagtagagttgaccacttctcagtattgcgagatgcatcttacatggttgatcagttttgcctagtcccagtaccatacaaagatgttcaggtgaacctgaaaattcttctcaatttgacttgcaagctttctgatgcgagcactaaatagtgatttttttgcaattttgtatgagccttgtttgag

SEQ ID NO: 214981 - DNA, 3063 bp, Zea Mays
ctgcaacttccagatcgttctcatcccatcgtttcctcctctgctcaagcacggcagccagtccagccaccatttgggtgctcatctccctctgctcggcacccagccccagctcgcccgagctccctgcgccgacctcatcctccccatggtgcgtcaccttctactcctctccttcccacggcacagcagcgcccctgcagctccccttctccagatccatggcgcccaacaccttgagcgcccctgccgctgctcctccaccgggatctcctcctccactaggcgtccaggcttgtcccaccatggctgcccctcctccatctcctccctccccaccaggttacccagattccatggccgccgccgccccagccatctccctggtggccgacctcgcccctgccccagccacagctcccccttcggccctgctgctgcaagcactcagcccctcccatggcacacgccccatctgcaacaccgtcgacccccgacgaggtcctgttctcgccctgtcgttttagtactcggcgtcgattaagtagatgctaaccgtgtgtatattcgtgtgttcttgtgaggagaaatcccatgatttgggggaagacgaagtccaagcacaacccccgccaatcgctcgatgaaaaatctaaaccaaaaccctcagcgttttcatgggttccggagggattttatgttggtaaggtgttgtgcggtgtgatctccaattccctattgctgatgtcttactccatcatgaccttagggctttgatgattgctgtacaaggatgatatggcctcccgcccaaagctgtctggtattcagaagcaggttttggcgctgtacaggggattccttcggacagcacgccttaaggcccctgaagaacgccgcaggatcgagtctgttatcttggcagagttccgtgacaacgcaaggagtgttgaccgtaggaactttgtacacatagagtacttgttgaggagagggaagaagcagcttgagcagctcaagaatcctgatattactggactcgctacccttgtagtaaagaaatgagcaagagaagaaggaagacaagtcagacaaaacagaagacgagaagaggttcctaccataacacttaagcaaggaatcctgtacacttctctcctggggttgtgacttgtatattgtcaaggatcacttggatgtggtaaatgctatactggacactgatgatagctgcataaggattgtgcgaaaaaacgggaagacatccctacatactgctgcaaggattggataccatcgtattgtcaaggcactcatagagagggatccaggaattgttccgatcaaggataggaagggacaaactgcacttcacatggctgtgaaaggcaagaacacagatgtagtggaagagttactgatggctgatgtttccattctcaatgtgcgggacaagaagggaaatactgctttgcacatagctacatggaaatgggagaattttgggattatgaaacaccgcagacgtggcttcgacgaaacggaggcgtaggcgagggattcgacattatgaaaaaccagagaagatactacactctaaaatggacatgaatcctctattaccagggaaggatgatgtttattacactgaaacagacgctgtctcacatccgttacccgcactagacgcacccagtctttctacagagagaatcgcgccgttcttgaatctgccattcgctgaatctgccattcgctgctgttgtttctggacagtgaagcagtattccggacagtgaacaaaaatctgggaacacatttcattttcactgtcattggctaccagagtccgggaacaaaatctgggaacaaaatctgggaacacaaaaatctgggaacaaaatctgcctttggctaccagagtttattgctcccatatcattcgctgtccatttcactgtccattcgctgaacacaaaaagctgggaacaaactcattttcccagtgaacaggtagcacaatttagttcacaaaatctgggagcacaatttagttcacaaaatctgggagcaataaacaggttgaacaggtagaacaaaatctgggagcaataaactgccatcccagaacaaaattcgcagctcacatttcagttcacaagctagttcacaatttagttcccaggtaccacaatttagttcacaagctagttcacaagctcacatttcaatggagcaatacacaggtagcagtttgacaagctattacacaagctcacatttctgggagcaatacacaggtagcagtttcacaagctatcacacaagctcacatttctgggagcaaaaaacaggtggcgtagtagcagtcgtgtgttcatcttcatttgcagcaacgacaagttcacggcttggtgcttcatcttcatttccagctacaacaacgacaagccacctgctttggcgcggactagggttgtggtcgcagcgccgccgccacctgctttggcgcggggccgcgagcagcaagggagaagacgcggagtttggagagaaggaggtgcagcgccgccgccacctgctttggcgcgggaccacgggcagcagatctccgggcagcaggggaggagactagcaggggagggaaatggagattgaagaaaatgagatggaaggaagaggcttgacgggagagagaagaaccttgaagagagaagaacggctctggacggcagaagaaaacggcgcgtgggctgatagcgacggaagatcattattcgttctcctgaacgactaataacgatgggatctggaataacaggagcctgatggttgcatcagtagagttgaccacttctcagtattgcgagatgcatcttacatggtcaagaagataattcctattctgaactacttgctcgtgttgatcagttttgcctagtcccagtaccatacaaagatgttcaggtgaacctgaaaattcttctcaatttgacttgcaagctttctgatgcgagcactaaatagtgatttttttgcaattttgtatgagccttgtttgag

SEQ ID NO: 214982 - DNA, 4220 bp, Zea Mays
gctgcaacttccagatcgttctcatcccatcgtttcctcctctgctcaagcacggcagccagtccagccaccatttgggtgctcatctccctctgctcggcacccagccccagctcgcccgagctccctgcgccgacctcatcctccccatggtgcgtcaccttctactcctctccttcccacggcacagcagcgcccctgcagctccccttctccagatccatggcgcccaacaccttgagcgcccctgccgctgctcctccaccgggatctcctcctccactaggcgtccaggcttgtcccaccatggctgcccctcctccatctcctccctccccaccaggttacccagattccatggccgccgccgccccagccatctccctggtggccgacctcgcccctgccccagccacagctcccccttcggccctgctgctgcaagcactcagcccctcccatggcacacgccccatctgcaacaccgtcgacccccgacgaggtcctgttctcgccctgtcgttttagtactcggcgtcgattaagtagatgctaaccgtgtgtatattcgtgtgttcttgtgaggagaaatcccatgatttgggggaagacgaagtccaagcacaacccccgccaatcgctcgatgaaaaatctaaaccaaaaccctcagcgttttcatgggttccggagggattttatgttggtaaggtgttgtgcggtgtgatctccaattccctattgctgatgtcttactccatcatgaccttagggaaggatgttttcctctaaattactcgtaataattatgcttggtgtatgtgttgttttagctacttgatgaaatgttttagttgtgtgcgataatatggttgccgttcgagtggaaagtagatgtgttgtatgacctgagttggagttgaagcaagtatgtgtgtctcgtattacgaaactaattagagatatgcatgatgtttgtagatggattatgtgtagagtgttttagtacaagtatttttttaggtatagttgaaccaattattgtatatgaattgtgcgatatcaaggttgttctaatgttcttttaacatcttgctaataaggtgttagagtattctaaatgccaaacataggataattttacaagccaaatagaagttaaattgaaggtattgatgtttagggctgtaggtatagttttagttatgcagctagtccaataaagtagatcatgttttctgtagaagcgttatatataaaacttgtagataatctctttatcttacttgtgtaaaaatttcatgaccataggtgtagtagtttaggagttatgatttttccaagtccagtctcagaatctgtccgaattctatacaggtttcgaaaattggattgtttggctaagctaaactgagaatcagcccttagtaattatagaagaattgtagtacttttcttaagctttccaacaaattttggagcaccctttttggtggtctagagatcaagttacagctgtttgaactatagagtctgaatctgtccaaatctggacagcgaagtctgtttgtagtaactgactttgatatgtattgaattaacctgagatgtttataaatgaattgtagacaattctattaactttctaaaaagtctaggatcaccggatttggatttcggaaactccagttctggacttttgaagtagttagtcgaattctgtccaaatctggacaaaatttatgtttagcgctgtttgacctttctaaaggtcgaatcttgttgtgatggtaatacaaaagttatagaggactttataagctttccaaaaagtcctagtttactatttttggatacatattttatgaattgtgagctaaacagatagttgttgacttgctgttctgctgtccaaacacatgtctactgtctgaaaatagctcattttgtagttacatttgcatcaggctttgatgattgctgtacaaggatgatatggcctcccgcccaaagctgtctggtattcagaagcaggttttggcgctgtacaggggattccttcggacagcacgccttaaggcccctgaagaacgccgcaggatcgagtctgttatcttggcagagttccgtgacaacgcaaggagtgttgaccgtaggaactttgtacacatagagtacttgttgaggagagggaagaagcagcttgagcagctcaagaatcctgatattactggactcgctacccttgtagtaaagaaatgagcaagagaagaaggaagacaagtcagacaaaacagaagacgagaagaggttcctaccataacacttaagcaaggaatcctgtacacttctctcctggggttgtgacttgtatattgtcaaggatcacttggatgtggtaaatgctatactggacactgatgatagctgcataaggattgtgcgaaaaaacgggaagacatccctacatactgctgcaaggattggataccatcgtattgtcaaggcactcatagagagggatccaggaattgttccgatcaaggataggaagggacaaactgcacttcacatggctgtgaaaggcaagaacacagatgtagtggaagagttactgatggctgatgtttccattctcaatgtgcgggacaagaagggaaatactgctttgcacatagctacatggaaatgggagaattttgggattatgaaacaccgcagacgtggcttcgacgaaacggaggcgtaggcgagggattcgacattatgaaaaaccagagaagatactacactctaaaatggacatgaatcctctattaccagggaaggatgatgtttattacactgaaacagacgctgtctcacatccgttacccgcactagacgcacccagtctttctacagagagaatcgcgccgttcttgaatctgccattcgctgaatctgccattcgctgctgttgtttctggacagtgaagcagtattccggacagtgaacaaaaatctgggaacacatttcattttcactgtcattggctaccagagtccgggaacaaaatctgggaacaaaatctgggaacacaaaaatctgggaacaaaatctgcctttggctaccagagtttattgctcccatatcattcgctgtccatttcactgtccattcgctgaacacaaaaagctgggaacaaactcattttcccagtgaacaggtagcacaatttagttcacaaaatctgggagcacaatttagttcacaaaatctgggagcaataaacaggttgaacaggtagaacaaaatctgggagcaataaactgccatcccagaacaaaattcgcagctcacatttcagttcacaagctagttcacaatttagttcccaggtaccacaatttagttcacaagctagttcacaagctcacatttcaatggagcaatacacaggtagcagtttgacaagctattacacaagctcacatttctgggagcaatacacaggtagcagtttcacaagctatcacacaagctcacatttctgggagcaaaaaacaggtggcgtagtagcagtcgtgtgttcatcttcatttgcagcaacgacaagttcacggcttggtgcttcatcttcatttccagctacaacaacgacaagccacctgctttggcgcggactagggttgtggtcgcagcgccgccgccacctgctttggcgcggggccgcgagcagcaagggagaagacgcggagtttggagagaaggaggtgcagcgccgccgccacctgctttggcgcgggaccacgggcagcagatctccgggcagcaggggaggagactagcaggggagggaaatggagattgaagaaaatgagatggaaggaagaggcttgacgggagagagaagaaccttgaagagagaagaacggctctggacggcagaagaaaacggcgcgtgggctgatagcgacggaagatcattattcgttctcctgaacgactaataacgatgggatctggaataacaggagcctgatggttgcatcagtagagttgaccacttctcagtattgcgagatgcatcttacatggttgatcagttttgcctagtcccagtaccatacaaagatgttcaggtgaacctgaaaattcttctcaatttgacttgcaagctttctgatgcgagcactaaatagtgatttttttgcaattttgtatgagccttgtttgag

SEQ ID NO: 214983 - DNA, 2838 bp, Zea Mays
cgaagctgcaacttccagatcgttctcatcccatcgtttcctcctctgctcaagcacggcagccagtccagccaccatttgggtgctcatctccctctgctcggcacccagccccagctcgcccgagctccctgcgccgacctcatcctccccatgccccatctgcaacaccgtcgacccccgacgaggtcctgttctcgccctgtcgttttagtactcggcgtcgattaagtagatgctaaccgtgtgtatattcgtgtgttcttgtgaggagaaatcccatgatttgggggaagacgaagtccaagcacaacccccgccaatcgctcgatgaaaaatctaaaccaaaaccctcagcgttttcatgggttccggagggattttatgttggctttgatgattgctgtacaaggatgatatggcctcccgcccaaagctgtctggtattcagaagcaggttttggcgctgtacaggggattccttcggacagcacgccttaaggcccctgaagaacgccgcaggatcgagtctgttatcttggcagagttccgtgacaacgcaaggagtgttgaccgtaggaactttgtacacatagagtacttgttgaggagagggaagaagcagcttgagcagctcaagaatcctgatattactggactcgctacccttgtagtaaagaaatgagcaagagaagaaggaagacaagtcagacaaaacagaagacgagaagaggttcctaccataacacttaagcaaggaatcctgtacacttctctcctggggttgtgacttgtatattgtcaaggatcacttggatgtggtaaatgctatactggacactgatgatagctgcataaggattgtgcgaaaaaacgggaagacatccctacatactgctgcaaggattggataccatcgtattgtcaaggcactcatagagagggatccaggaattgttccgatcaaggataggaagggacaaactgcacttcacatggctgtgaaaggcaagaacacagatgtagtggaagagttactgatggctgatgtttccattctcaatgtgcgggacaagaagggaaatactgctttgcacatagctacatggaaatgggagaattttgggattatgaaacaccgcagacgtggcttcgacgaaacggaggcgtaggcgagggattcgacattatgaaaaaccagagaagatactacactctaaaatggacatgaatcctctattaccagggaaggatgatgtttattacactgaaacagacgctgtctcacatccgttacccgcactagacgcacccagtctttctacagagagaatcgcgccgttcttgaatctgccattcgctgaatctgccattcgctgctgttgtttctggacagtgaagcagtattccggacagtgaacaaaaatctgggaacacatttcattttcactgtcattggctaccagagtccgggaacaaaatctgggaacaaaatctgggaacacaaaaatctgggaacaaaatctgcctttggctaccagagtttattgctcccatatcattcgctgtccatttcactgtccattcgctgaacacaaaaagctgggaacaaactcattttcccagtgaacaggtagcacaatttagttcacaaaatctgggagcacaatttagttcacaaaatctgggagcaataaacaggttgaacaggtagaacaaaatctgggagcaataaactgccatcccagaacaaaattcgcagctcacatttcagttcacaagctagttcacaatttagttcccaggtaccacaatttagttcacaagctagttcacaagctcacatttcaatggagcaatacacaggtagcagtttgacaagctattacacaagctcacatttctgggagcaatacacaggtagcagtttcacaagctatcacacaagctcacatttctgggagcaaaaaacaggtggcgtagtagcagtcgtgtgttcatcttcatttgcagcaacgacaagttcacggcttggtgcttcatcttcatttccagctacaacaacgacaagccacctgctttggcgcggactagggttgtggtcgcagcgccgccgccacctgctttggcgcggggccgcgagcagcaagggagaagacgcggagtttggagagaaggaggtgcagcgccgccgccacctgctttggcgcgggaccacgggcagcagatctccgggcagcaggggaggagactagcaggggagggaaatggagattgaagaaaatgagatggaaggaagaggcttgacgggagagagaagaaccttgaagagagaagaacggctctggacggcagaagaaaacggcgcgtgggctgatagcgacggaagatcattattcgttctcctgaacgactaataacgatgggatctggaataacaggagcctgatggttgcatcagtagagttgaccacttctcagtattgcgagatgcatcttacatggtcaagaagataattcctattctgaactacttgctcgtgttcgtgtacaagtctccttatcatgtcctcctttcaagccagtctattctttgcttgattcatcacgggtgcacattattgtaattagaatcttcagagtactcgaaggatagttaaagctgtttggctagtccttcagattactaaaaatatagttgatcagttttgcctagtcccagtaccatacaaagatgttcaggtgaacctgaaaattcttctcaatttgacttgcaagctttctgatgcgagcactaaatagtgatttttttgcaattttgtatgagccttgtttgag

SEQ ID NO: 214984 - DNA, 2869 bp, Zea Mays
cgaagctgcaacttccagatcgttctcatcccatcgtttcctcctctgctcaagcacggcagccagtccagccaccatttgggtgctcatctccctctgctcggcacccagccccagctcgcccgagctccctgcgccgacctcatcctccccatggtgcgtcaccttctactcctctccttcccacggcacagcagcgcccctgcagctccccttctccagatccatggcgcccaacaccttgagcgcccctgccgctgctcctccaccgggatctcctcctccactaggcgtccaggcttgtcccaccatggctgcccctcctccatctcctccctccccaccaggttacccagattccatggccgccgccgccccagccatctccctggtggccgacctcgcccctgccccagccacagctcccccttcggccctgctgctgcaagcactcagcccctcccatggcacacggagaaatcccatgatttgggggaagacgaagtccaagcacaacccccgccaatcgctcgatgaaaaatctaaaccaaaaccctcagcgttttcatgggttccggagggattttatgttggtaaggatgatatggcctcccgcccaaagctgtctggtattcagaagcaggttttggcgctgtacaggggattccttcggacagcacgccttaaggcccctgaagaacgccgcaggatcgagtctgttatcttggcagagttccgtgacaacgcaaggagtgttgaccgtaggaactttgtacacatagagtacttgttgaggagagggaagaagcagcttgagcagctcaagaatcctgatattactggactcgctacccttgtagtaaagaaatgagcaagagaagaaggaagacaagtcagacaaaacagaagacgagaagaggttcctaccataacacttaagcaaggaatcctgtacacttctctcctggggttgtgacttgtatattgtcaaggatcacttggatgtggtaaatgctatactggacactgatgatagctgcataaggattgtgcgaaaaaacgggaagacatccctacatactgctgcaaggattggataccatcgtattgtcaaggcactcatagagagggatccaggaattgttccgatcaaggataggaagggacaaactgcacttcacatggctgtgaaaggcaagaacacagatgtagtggaagagttactgatggctgatgtttccattctcaatgtgcgggacaagaagggaaatactgctttgcacatagctacatggaaatgggagaattttgggattatgaaacaccgcagacgtggcttcgacgaaacggaggcgtaggcgagggattcgacattatgaaaaaccagagaagatactacactctaaaatggacatgaatcctctattaccagggaaggatgatgtttattacactgaaacagacgctgtctcacatccgttacccgcactagacgcacccagtctttctacagagagaatcgcgccgttcttgaatctgccattcgctgaatctgccattcgctgctgttgtttctggacagtgaagcagtattccggacagtgaacaaaaatctgggaacacatttcattttcactgtcattggctaccagagtccgggaacaaaatctgggaacaaaatctgggaacacaaaaatctgggaacaaaatctgcctttggctaccagagtttattgctcccatatcattcgctgtccatttcactgtccattcgctgaacacaaaaagctgggaacaaactcattttcccagtgaacaggtagcacaatttagttcacaaaatctgggagcacaatttagttcacaaaatctgggagcaataaacaggttgaacaggtagaacaaaatctgggagcaataaactgccatcccagaacaaaattcgcagctcacatttcagttcacaagctagttcacaatttagttcccaggtaccacaatttagttcacaagctagttcacaagctcacatttcaatggagcaatacacaggtagcagtttgacaagctattacacaagctcacatttctgggagcaatacacaggtagcagtttcacaagctatcacacaagctcacatttctgggagcaaaaaacaggtggcgtagtagcagtcgtgtgttcatcttcatttgcagcaacgacaagttcacggcttggtgcttcatcttcatttccagctacaacaacgacaagccacctgctttggcgcggactagggttgtggtcgcagcgccgccgccacctgctttggcgcggggccgcgagcagcaagggagaagacgcggagtttggagagaaggaggtgcagcgccgccgccacctgctttggcgcgggaccacgggcagcagatctccgggcagcaggggaggagactagcaggggagggaaatggagattgaagaaaatgagatggaaggaagaggcttgacgggagagagaagaaccttgaagagagaagaacggctctggacggcagaagaaaacggcgcgtgggctgatagcgacggaagatcattattcgttctcctgaacgactaataacgatgggatctggaataacaggagcctgatggttgcatcagtagagttgaccacttctcagtattgcgagatgcatcttacatggtcaagaagataattcctattctgaactacttgctcgtgttgatcagttttgcctagtcccagtaccatacaaagatgttcaggtgaacctgaaaattcttctcaatttgacttgcaagctttctgatgcgagcactaaatagtgatttttttgcaattttgtatgagccttgtttgag

SEQ ID NO: 214985 - DNA, 4171 bp, Zea Mays
cgaagctgcaacttccagatcgttctcatcccatcgtttcctcctctgctcaagcacggcagccagtccagccaccatttgggtgctcatctccctctgctcggcacccagccccagctcgcccgagctccctgcgccgacctcatcctccccatggtgcgtcaccttctactcctctccttcccacggcacagcagcgcccctgcagctccccttctccagatccatggcgcccaacaccttgagcgcccctgccgctgctcctccaccgggatctcctcctccactaggcgtccaggcttgtcccaccatggctgcccctcctccatctcctccctccccaccaggttacccagattccatggccgccgccgccccagccatctccctggtggccgacctcgcccctgccccagccacagctcccccttcggccctgctgctgcaagcactcagcccctcccatggcacacgccccatctgcaacaccgtcgacccccgacgagaaatcccatgatttgggggaagacgaagtccaagcacaacccccgccaatcgctcgatgaaaaatctaaaccaaaaccctcagcgttttcatgggttccggagggattttatgttggtgttgtgcggtgtgatctccaattccctattgctgatgtcttactccatcatgaccttagggaaggatgttttcctctaaattactcgtaataattatgcttggtgtatgtgttgttttagctacttgatgaaatgttttagttgtgtgcgataatatggttgccgttcgagtggaaagtagatgtgttgtatgacctgagttggagttgaagcaagtatgtgtgtctcgtattacgaaactaattagagatatgcatgatgtttgtagatggattatgtgtagagtgttttagtacaagtatttttttaggtatagttgaaccaattattgtatatgaattgtgcgatatcaaggttgttctaatgttcttttaacatcttgctaataaggtgttagagtattctaaatgccaaacataggataattttacaagccaaatagaagttaaattgaaggtattgatgtttagggctgtaggtatagttttagttatgcagctagtccaataaagtagatcatgttttctgtagaagcgttatatataaaacttgtagataatctctttatcttacttgtgtaaaaatttcatgaccataggtgtagtagtttaggagttatgatttttccaagtccagtctcagaatctgtccgaattctatacaggtttcgaaaattggattgtttggctaagctaaactgagaatcagcccttagtaattatagaagaattgtagtacttttcttaagctttccaacaaattttggagcaccctttttggtggtctagagatcaagttacagctgtttgaactatagagtctgaatctgtccaaatctggacagcgaagtctgtttgtagtaactgactttgatatgtattgaattaacctgagatgtttataaatgaattgtagacaattctattaactttctaaaaagtctaggatcaccggatttggatttcggaaactccagttctggacttttgaagtagttagtcgaattctgtccaaatctggacaaaatttatgtttagcgctgtttgacctttctaaaggtcgaatcttgttgtgatggtaatacaaaagttatagaggactttataagctttccaaaaagtcctagtttactatttttggatacatattttatgaattgtgagctaaacagatagttgttgacttgctgttctgctgtccaaacacatgtctactgtctgaaaatagctcattttgtagttacatttgcatcaggctttgatgattgctgtacaaggatgatatggcctcccgcccaaagctgtctggtattcagaagcaggttttggcgctgtacaggggattccttcggacagcacgccttaaggcccctgaagaacgccgcaggatcgagtctgttatcttggcagagttccgtgacaacgcaaggagtgttgaccgtaggaactttgtacacatagagtacttgttgaggagagggaagaagcagcttgagcagctcaagaatcctgatattactggactcgctacccttgtagtaaagaaatgagcaagagaagaaggaagacaagtcagacaaaacagaagacgagaagaggttcctaccataacacttaagcaaggaatcctgtacacttctctcctggggttgtgacttgtatattgtcaaggatcacttggatgtggtaaatgctatactggacactgatgatagctgcataaggattgtgcgaaaaaacgggaagacatccctacatactgctgcaaggattggataccatcgtattgtcaaggcactcatagagagggatccaggaattgttccgatcaaggataggaagggacaaactgcacttcacatggctgtgaaaggcaagaacacagatgtagtggaagagttactgatggctgatgtttccattctcaatgtgcgggacaagaagggaaatactgctttgcacatagctacatggaaatgggagaattttgggattatgaaacaccgcagacgtggcttcgacgaaacggaggcgtaggcgagggattcgacattatgaaaaaccagagaagatactacactctaaaatggacatgaatcctctattaccagggaaggatgatgtttattacactgaaacagacgctgtctcacatccgttacccgcactagacgcacccagtctttctacagagagaatcgcgccgttcttgaatctgccattcgctgaatctgccattcgctgctgttgtttctggacagtgaagcagtattccggacagtgaacaaaaatctgggaacacatttcattttcactgtcattggctaccagagtccgggaacaaaatctgggaacaaaatctgggaacacaaaaatctgggaacaaaatctgcctttggctaccagagtttattgctcccatatcattcgctgtccatttcactgtccattcgctgaacacaaaaagctgggaacaaactcattttcccagtgaacaggtagcacaatttagttcacaaaatctgggagcacaatttagttcacaaaatctgggagcaataaacaggttgaacaggtagaacaaaatctgggagcaataaactgccatcccagaacaaaattcgcagctcacatttcagttcacaagctagttcacaatttagttcccaggtaccacaatttagttcacaagctagttcacaagctcacatttcaatggagcaatacacaggtagcagtttgacaagctattacacaagctcacatttctgggagcaatacacaggtagcagtttcacaagctatcacacaagctcacatttctgggagcaaaaaacaggtggcgtagtagcagtcgtgtgttcatcttcatttgcagcaacgacaagttcacggcttggtgcttcatcttcatttccagctacaacaacgacaagccacctgctttggcgcggactagggttgtggtcgcagcgccgccgccacctgctttggcgcggggccgcgagcagcaagggagaagacgcggagtttggagagaaggaggtgcagcgccgccgccacctgctttggcgcgggaccacgggcagcagatctccgggcagcaggggaggagactagcaggggagggaaatggagattgaagaaaatgagatggaaggaagaggcttgacgggagagagaagaaccttgaagagagaagaacggctctggacggcagaagaaaacggcgcgtgggctgatagcgacggaagatcattattcgttctcctgaacgactaataacgatgggatctggaataacaggagcctgatggttgcatcagtagagttgaccacttctcagtattgcgagatgcatcttacatggtcaagaagataattcctattctgaactacttgctcgtgttgatcagttttgcctagtcccagtaccatacaaagatgttcaggtgaacctgaaaattcttctcaatttgacttgcaagctttctgatgcgagcactaaatagtgatttttttgcaattttgtatgagccttgtttgag

SEQ ID NO: 214986 - DNA, 3108 bp, Zea Mays
cgaagctgcaacttccagatcgttctcatcccatcgtttcctcctctgctcaagcacggcagccagtccagccaccatttgggtgctcatctccctctgctcggcacccagccccagctcgcccgagctccctgcgccgacctcatcctccccatggtgcgtcaccttctactcctctccttcccacggcacagcagcgcccctgcagctccccttctccagatccatggcgcccaacaccttgagcgcccctgccgctgctcctccaccgggatctcctcctccactaggcgtccaggcttgtcccaccatggctgcccctcctccatctcctccctccccaccaggttacccagattccatggccgccgccgccccagccatctccctggtggccgacctcgcccctgccccagccacagctcccccttcggccctgctgctgcaagcactcagcccctcccatggcacacgccccatctgcaacaccgtcgacccccgacgaggtcctgttctcgccctgtcgttttagtactcggcgtcgattaagtagatgctaaccgtgtgtatattcgtgtgttcttgtgaggagaaatcccatgatttgggggaagacgaagtccaagcacaacccccgccaatcgctcgatgaaaaatctaaaccaaaaccctcagcgttttcatgggttccggagggattttatgttggtaaggtgttgtgcggtgtgatctccaattccctattgctgatgtcttactccatcatgaccttagggctttgatgattgctgtacaaggatgatatggcctcccgcccaaagctgtctggtattcagaagcaggttttggcgctgtacaggggattccttcggacagcacgccttaaggcccctgaagaacgccgcaggatcgagtctgttatcttggcagagttccgtgacaacgcaaggagtgttgaccgtaggaactttgtacacatagagtacttgttgaggagagggaagaagcagcttgagcagctcaagaatcctgatattactggactcgctacccttgtagtaaagaaatgagcaagagaagaaggaagacaagtcagacaaaacagaagacgagaagaggttcctaccataacacttaagcaaggaatcctgtacacttctctcctggggttgtgacttgtatattgtcaaggatcacttggatgtggtaaatgctatactggacactgatgatagctgcataaggattgtgcgaaaaaacgggaagacatccctacatactgctgcaaggattggataccatcgtattgtcaaggcactcatagagagggatccaggaattgttccgatcaaggataggaagggacaaactgcacttcacatggctgtgaaaggcaagaacacagatgtagtggaagagttactgatggctgatgtttccattctcaatgtgcgggacaagaagggaaatactgctttgcacatagctacatggaaatgggagaattttgggattatgaaacaccgcagacgtggcttcgacgaaacggaggcgtaggcgagggattcgacattatgaaaaaccagagaagatactacactctaaaatggacatgaatcctctattaccagggaaggatgatgtttattacactgaaacagacgctgtctcacatccgttacccgcactagacgcacccagtctttctacagagagaatcgcgccgttcttgaatctgccattcgctgaatctgccattcgctgctgttgtttctggacagtgaagcagtattccggacagtgaacaaaaatctgggaacacatttcattttcactgtcattggctaccagagtccgggaacaaaatctgggaacaaaatctgggaacacaaaaatctgggaacaaaatctgcctttggctaccagagtttattgctcccatatcattcgctgtccatttcactgtccattcgctgaacacaaaaagctgggaacaaactcattttcccagtgaacaggtagcacaatttagttcacaaaatctgggagcacaatttagttcacaaaatctgggagcaataaacaggttgaacaggtagaacaaaatctgggagcaataaactgccatcccagaacaaaattcgcagctcacatttcagttcacaagctagttcacaatttagttcccaggtagcagtttcacaagctatcacacaagctcacatttctgggagcaaaaaacaggtggcgtagtagcagtcgtgtgttcatcttcatttgcagcaacgacaagttcacggcttggtgcttcatcttcatttccagctacaacaacgacaagccacctgctttggcgcggactagggttgtggtcgcagcgccgccgccacctgctttggcgcggggccgcgagcagcaagggagaagacgcggagtttggagagaaggaggtgcagcgccgccgccacctgctttggcgcgggaccacgggcagcagatctccgggcagcaggggaggagactagcaggggagggaaatggagattgaagaaaatgagatggaaggaagaggcttgacgggagagagaagaaccttgaagagagaagaacggctctggacggcagaagaaaacggcgcgtgggctgatagcgacggaagatcattattcgttctcctgaacgactaataacgatgggatctggaataacaggagcctgatggttgcatcagtagagttgaccacttctcagtattgcgagatgcatcttacatggtcaagaagataattcctattctgaactacttgctcgtgttcgtgtacaagtctccttatcatgtcctcctttcaagccagtctattctttgcttgattcatcacgggtgcacattattgtaattagaatcttcagagtactcgaaggatagttaaagctgtttggctagtccttcagattactaaaaatatagttgatcagttttgcctagtcccagtaccatacaaagatgttcaggtgaacctgaaaattcttctcaatttgacttgcaagctttctgatgcgagcactaaatagtgatttttttgcaattttgtatgagccttgtttgag

SEQ ID NO: 214987 - DNA, 4515 bp, Zea Mays
cccgaagctgcaacttccagatcgttctcatcccatcgtttcctcctctgctcaagcacggcagccagtccagccaccatttgggtgctcatctccctctgctcggcacccagccccagctcgcccgagctccctgcgccgacctcatcctccccatggtgcgtcaccttctactcctctccttcccacggcacagcagcgcccctgcagctccccttctccagatccatggcgcccaacaccttgagcgcccctgccgctgctcctccaccgggatctcctcctccactaggcgtccaggcttgtcccaccatggctgcccctcctccatctcctccctccccaccaggttacccagattccatggccgccgccgccccagccatctccctggtggccgacctcgcccctgccccagccacagctcccccttcggccctgctgctgcaagcactcagcccctcccatggcacacggtactcgtccagcccctttctactggtggctgacccatctctatggtgctcgacgaaatgaccatgaggagttttgtgttgtgtgcagccccatctgcaacaccgtcgacccccgacgaggtcctgttctcgccctgtcgttttagtactcggcgtcgattaagtagatgctaaccgtgtgtatattcgtgtgttcttgtgaggagaaatcccatgatttgggggaagacgaagtccaagcacaacccccgccaatcgctcgatgaaaaatctaaaccaaaaccctcagcgttttcatgggttccggagggattttatgttggtgttgtgcggtgtgatctccaattccctattgctgatgtcttactccatcatgaccttagggaaggatgttttcctctaaattactcgtaataattatgcttggtgtatgtgttgttttagctacttgatgaaatgttttagttgtgtgcgataatatggttgccgttcgagtggaaagtagatgtgttgtatgacctgagttggagttgaagcaagtatgtgtgtctcgtattacgaaactaattagagatatgcatgatgtttgtagatggattatgtgtagagtgttttagtacaagtatttttttaggtatagttgaaccaattattgtatatgaattgtgcgatatcaaggttgttctaatgttcttttaacatcttgctaataaggtgttagagtattctaaatgccaaacataggataattttacaagccaaatagaagttaaattgaaggtattgatgtttagggctgtaggtatagttttagttatgcagctagtccaataaagtagatcatgttttctgtagaagcgttatatataaaacttgtagataatctctttatcttacttgtgtaaaaatttcatgaccataggtgtagtagtttaggagttatgatttttccaagtccagtctcagaatctgtccgaattctatacaggtttcgaaaattggattgtttggctaagctaaactgagaatcagcccttagtaattatagaagaattgtagtacttttcttaagctttccaacaaattttggagcaccctttttggtggtctagagatcaagttacagctgtttgaactatagagtctgaatctgtccaaatctggacagcgaagtctgtttgtagtaactgactttgatatgtattgaattaacctgagatgtttataaatgaattgtagacaattctattaactttctaaaaagtctaggatcaccggatttggatttcggaaactccagttctggacttttgaagtagttagtcgaattctgtccaaatctggacaaaatttatgtttagcgctgtttgacctttctaaaggtcgaatcttgttgtgatggtaatacaaaagttatagaggactttataagctttccaaaaagtcctagtttactatttttggatacatattttatgaattgtgagctaaacagatagttgttgacttgctgttctgctgtccaaacacatgtctactgtctgaaaatagctcattttgtagttacatttgcatcaggctttgatgattgctgtacaaggatgatatggcctcccgcccaaagctgtctggtattcagaagcaggttttggcgctgtacaggggattccttcggacagcacgccttaaggcccctgaagaacgccgcaggatcgagtctgttatcttggcagagttccgtgacaacgcaaggagtgttgaccgtaggaactttgtacacatagagtacttgttgaggagagggaagaagcagcttgagcagctcaagaatcctgatattactggactcgctacccttgtagtaaagaaatgagcaagagaagaaggaagacaagtcagacaaaacagaagacgagaagaggttcctaccataacacttaagcaaggaatcctgggttgtgacttgtatattgtcaaggatcacttggatgtggtaaatgctatactggacactgatgatagctgcataaggattgtgcgaaaaaacgggaagacatccctacatactgctgcaaggattggataccatcgtattgtcaaggcactcatagagagggatccaggaattgttccgatcaaggataggaagggacaaactgcacttcacatggctgtgaaaggcaagaacacagatgtagtggaagagttactgatggctgatgtttccattctcaatgtgcgggacaagaagggaaatactgctttgcacatagctacatggaaatgggagaattttgggattatgaaacaccgcagacgtggcttcgacgaaacggaggcgtaggcgagggattcgacattatgaaaaaccagagaagatactacactctaaaatggacatgaatcctctattaccagggaaggatgatgtttattacactgaaacagacgctgtctcacatccgttacccgcactagacgcacccagtctttctacagagagaatcgcgccgttcttgaatctgccattcgctgaatctgccattcgctgctgttgtttctggacagtgaagcagtattccggacagtgaacaaaaatctgggaacacatttcattttcactgtcattggctaccagagtccgggaacaaaatctgggaacaaaatctgggaacacaaaaatctgggaacaaaatctgcctttggctaccagagtttattgctcccatatcattcgctgtccatttcactgtccattcgctgaacacaaaaagctgggaacaaactcattttcccagtgaacaggtagcacaatttagttcacaaaatctgggagcacaatttagttcacaaaatctgggagcaataaacaggttgaacaggtagaacaaaatctgggagcaataaactgccatcccagaacaaaattcgcagctcacatttcagttcacaagctagttcacaatttagttcccaggtaccacaatttagttcacaagctagttcacaagctcacatttcaatggagcaatacacaggtagcagtttgacaagctattacacaagctcacatttctgggagcaatacacaggtagcagtttcacaagctatcacacaagctcacatttctgggagcaaaaaacaggtagcagtttcacaagctcacatttcagatctatggtttttcagtttctttctaggggtaattttcttaactacccatttgacacttctaggtggcgtagtagcagtcgtgtgttcatcttcatttgcagcaacgacaagttcacggcttggtgcttcatcttcatttccagctacaagtattggtgcttcatcttcatttgcagcttcgactattggtgcttctacttcatttgcagcttcgactattggtgcttctacttcatttgcagcaacgacaagccacctgctttggcgcggactagggttgtggtcgcagcgccgccgccacctgctttggcgcggggccgcgagcagcaagggagaagacgcggagtttggagagaaggaggtgcagcgccgccgccacctgctttggcgcgggaccacgggcagcagatctccgggcagcaggggaggagactagcaggggagggaaatggagattgaagaaaatgagatggaaggaagaggcttgacgggagagagaagaaccttgaagagagaagaacggctctggacggcagaagaaaacggcgcgtgggctgatagcgacggaagatcattattcgttctcctgaacgactaataacgatgggatctggaataacaggagcctgatggttgcatcagtagagttgaccacttctcagtattgcgagatgcatcttacatggtcaagaagataattcctattctgaactacttgctcgtgttgatcagttttgcctagtcccagtaccatacaaagatgttcaggtgaacctgaaaattcttctcaatttgacttgcaagctttctgatgcgagcactaaatagtgatttttttgcaattttgtatgagccttgtttgag

SEQ ID NO: 214988 - DNA, 3097 bp, Zea Mays
ttcttgtccaatcaggtattttctttttgctccccgaagctgcaacttccagatcgttctcatcccatcgtttcctcctctgctcaagcacggcagccagtccagccaccatttgggtgctcatctccctctgctcggcacccagccccagctcgcccgagctccctgcgccgacctcatcctccccatggtgcgtcaccttctactcctctccttcccacggcacagcagcgcccctgcagctccccttctccagatccatggcgcccaacaccttgagcgcccctgccgctgctcctccaccgggatctcctcctccactaggcgtccaggcttgtcccaccatggctgcccctcctccatctcctccctccccaccaggttacccagattccatggccgccgccgccccagccatctccctggtggccgacctcgcccctgccccagccacagctcccccttcggccctgctgctgcaagcactcagcccctcccatggcacacgccccatctgcaacaccgtcgacccccgacgaggtcctgttctcgccctgtcgttttagtactcggcgtcgattaagtagatgctaaccgtgtgtatattcgtgtgttcttgtgaggagaaatcccatgatttgggggaagacgaagtccaagcacaacccccgccaatcgctcgatgaaaaatctaaaccaaaaccctcagcgttttcatgggttccggagggattttatgttggtgttgtgcggtgtgatctccaattccctattgctgatgtcttactccatcatgaccttagggctttgatgattgctgtacaaggatgatatggcctcccgcccaaagctgtctggtattcagaagcaggttttggcgctgtacaggggattccttcggacagcacgccttaaggcccctgaagaacgccgcaggatcgagtctgttatcttggcagagttccgtgacaacgcaaggagtgttgaccgtaggaactttgtacacatagagtacttgttgaggagagggaagaagcagcttgagcagctcaagaatcctgatattactggactcgctacccttgtagtaaagaaatgagcaagagaagaaggaagacaagtcagacaaaacagaagacgagaagaggttcctaccataacacttaagcaaggaatcctgtacacttctctcctggggttgtgacttgtatattgtcaaggatcacttggatgtggtaaatgctatactggacactgatgatagctgcataaggattgtgcgaaaaaacgggaagacatccctacatactgctgcaaggattggataccatcgtattgtcaaggcactcatagagagggatccaggaattgttccgatcaaggataggaagggacaaactgcacttcacatggctgtgaaaggcaagaacacagatgtagtggaagagttactgatggctgatgtttccattctcaatgtgcgggacaagaagggaaatactgctttgcacatagctacatggaaatgggagaattttgggattatgaaacaccgcagacgtggcttcgacgaaacggaggcgtaggcgagggattcgacattatgaaaaaccagagaagatactacactctaaaatggacatgaatcctctattaccagggaaggatgatgtttattacactgaaacagacgctgtctcacatccgttacccgcactagacgcacccagtctttctacagagagaatcgcgccgttcttgaatctgccattcgctgaatctgccattcgctgctgttgtttctggacagtgaagcagtattccggacagtgaacaaaaatctgggaacacatttcattttcactgtcattggctaccagagtccgggaacaaaatctgggaacaaaatctgggaacacaaaaatctgggaacaaaatctgcctttggctaccagagtttattgctcccatatcattcgctgtccatttcactgtccattcgctgaacacaaaaagctgggaacaaactcattttcccagtgaacaggtagcacaatttagttcacaaaatctgggagcacaatttagttcacaaaatctgggagcaataaacaggttgaacaggtagaacaaaatctgggagcaataaactgccatcccagaacaaaattcgcagctcacatttcagttcacaagctagttcacaatttagttcccaggtaccacaatttagttcacaagctagttcacaagctcacatttcaatggagcaatacacaggtagcagtttgacaagctattacacaagctcacatttctgggagcaatacacaggtagcagtttcacaagctatcacacaagctcacatttctgggagcaaaaaacaggtggcgtagtagcagtcgtgtgttcatcttcatttgcagcaacgacaagttcacggcttggtgcttcatcttcatttccagctacaacaacgacaagccacctgctttggcgcggactagggttgtggtcgcagcgccgccgccacctgctttggcgcggggccgcgagcagcaagggagaagacgcggagtttggagagaaggaggtgcagcgccgccgccacctgctttggcgcgggaccacgggcagcagatctccgggcagcaggggaggagactagcaggggagggaaatggagattgaagaaaatgagatggaaggaagaggcttgacgggagagagaagaaccttgaagagagaagaacggctctggacggcagaagaaaacggcgcgtgggctgatagcgacggaagatcattattcgttctcctgaacgactaataacgatgggatctggaataacaggagcctgatggttgcatcagtagagttgaccacttctcagtattgcgagatgcatcttacatggtcaagaagataattcctattctgaactacttgctcgtgttgatcagttttgcctagtcccagtaccatacaaagatgttcaggtgaacctgaaaattcttctcaatttgacttgcaagctttctgatgcgagcactaaatagtgatttttttgcaattttgtatgagccttgtttgag

SEQ ID NO: 214989 - DNA, 1291 bp, Zea Mays
caacttccagatcgttctcatcccatcgtttcctcctctgctcaagcacggcagccagtccagccaccatttgggtgctcatctccctctgctcggcacccagccccagctcgcccgagctccctgcgccgacctcatcctccccatggtgcgtcaccttctactcctctccttcccacggcacagcagcgcccctgcagctccccttctccagatccatggcgcccaacaccttgagcgcccctgccgctgctcctccaccgggatctcctcctccactaggcgtccaggcttgtcccaccatggctgcccctcctccatctcctccctccccaccaggttacccagattccatggccgccgccgccccagccatctccctggtggccgacctcgcccctgccccagccacagctcccccttcggccctgctgctgcaagcactcagcccctcccatggcacacggagaaatcccatgatttgggggaagacgaagtccaagcacaacccccgccaatcgctcgatgaaaaatctaaaccaaaaccctcagcgttttcatgggttccggagggattttatgttggtgttgtgcggtgtgatctccaattccctattgctgatgtcttactccatcatgaccttagggaaggatgttttcctctaaattactcgtaataattatgcttggtgtatgtgttgttttagctacttgatgaaatgttttagttgtgtgcgataatatggttgccgttcgagtggaaagtagatgtgttgtatgacctgagttggagttgaagcaagtatgtgtgtctcgtattacgaaactaattagagatatgcatgatgtttgtagatggattatgtgtagagtgttttagtacaagtatttttttaggtatagttgaaccaattattgtatatgaattgtgcgatatcaaggttgttctaatgttcttttaacatcttgctaataaggtgttagagtattctaaatgccaaacataggataattttacaagccaaatagaagttaaattgaaggtattgatgtttagggctgtaggtatagttttagttatgcagctagtccaataaagtagatcatgttttctgtagaagcgttatatataaaacttgtagataatctctttatcttacttgtgtaaaaatttcatgaccataggtgtagtagtttaggagttatgatttttccaagtccagtctcagaatctgtccgaattctatacaggtttcgaaaattggattgtttggctaagctaaactgagaa

SEQ ID NO: 214990 - DNA, 504 bp, Zea Mays
acccgtttgataatctacaggcgtaggtcatgacagctgtttatttcctggaagtaagctgctgaacaacgccactggatccggcaacacgaacacatcttcgacacctacaagtgacgctgagggatctgcgatatggagactaagaactgggagggacaaagggctgttgctcttccttcggttggtacttagcattgcggtggctatcgtggtggattcgaacttttggacatgacaagaggttgctagctgtataataaactaaagccagaaattttgggtggtatgttagaggaggaaggaaggaggtgggcgggggattgggttatgcttagtgattctttattgttagataagcattaataaattgctcatttttcttcatctgatgaaatgtgtctataatttgttgaaatgtcccgatatttcaatctgctgggttcatgtccatacaatagttttttttatcaaattactgtaggattggcctacagttttttt

SEQ ID NO: 214991 - DNA, 1076 bp, Zea Mays
taataaacgaaaattgtctaggacatgagcagcgttgccaacggttcgcgtagagccagtccgcggatccacacgaaactgcacacgacgcaggcactcggcctgccgtgtgtccctttcggccttcataggcgcacttctccctcccgctctcgcgccgccgccctcgtgcgtttgagcgagatccatacatccccatcccattttgcacccggattggcttcttcttctactactgtacagcacttcttttgtgtggctgcaaagttctgtaattctagaggagcaagatggatattattatcatcatctcacttgtcattcttttggcactaggagctctctttgtgatcccaaagtcacaaaataaaggtaaatcaaagagaaacgacttaggagctggaacgacatctaggagctttacgacagaagagatctctaaacattccacaaggaaggactgttggatcattatcaaggacaaggtctatgatgtcactccttatgtagaggaacatccaggcggagatgccattctaaataatgctgggggtgattccacggagggcttttttgggccacagcatggcactagggtcttcgatatcatcgaggatttctgcatcggtcagttgaaggcttcatgatgatgacaggatagtttgtattgaatttattacgggacataaatttgtgagaagctacattttatctatgtttgagcattgcgaccatcgagcatatgaatgccagtataattgttccacaactgttattaggcctgccctgagctgtgatgtaggagatcgttttttttcccctctgatggggcaatgtgagctgttcgaccactggttgttgtgcttgcacatttctgttgttggacaagactgaaacgtttttttcccaattgttttgtttaaatcaggactcgtttctcatgatcacttctgaagggatgttatggttaagatgttgcaagtttgattttaacttggtcgttgaatgcgttttacgatttgttgctctctaaggttaggtggtgtgcaaacatgaaagtgaaacaatttcaagag

SEQ ID NO: 214992 - DNA, 1075 bp, Zea Mays
ggctgcctctgcctgcgggctgtggccacacagtatatgggggagcttggattgaacttcgaagtataccgcaatgatgaactgaccatagaagatgtgagaaggaagaacccaaggggaatacttatttctccaggacctggtgaaccacaagattcgggaatatcattgcagactgttcttgaattaggcccaaccatcccaatttttggagtttgcatgggtctgcaatgcattggagaggcatttggaggaaagattatccgtgctccttctggagtgatgcatgggaaaagctctccagtttattacgatgaggaattaggaaaggcattgttcaatggcttgccaaacccttttactgccgcgaggtaccacagcttggtcattgagcaagaaaccttcccacatgatgctttggaggctactgcatggactgaagatggacttatcatggctgctcgccacaagaagtacaaacacatccagggtgtccaattccacccggagagcatcatcacccctgaaggcaagaaaatcatcctcaactttgtcagattcattgaggaactggagaagcagcgttcgtaggggaggtagacgcgacaggtggtttcatttcatagatcagacggaagcagagacaaggcgcttaaagctgcgccaggttccggggctggcagttgaagcatagctaggaaacagctttccctctcttaattcgttgtgttcgtggtgacataatctgtgtgcggaccgaatttagaataaagtacaggcgtccgtctgatcaaataagcaccggtgttggtgctctatagatgaatatatccggtgattttcggcatgggaggcattggcacatttttgtctgagttctggcggtagcaagaccggagtaataaccatcaggcgtttctatgttggttacgtgccgcacgcaggccgggcgtgcggaggatttatgccctgagaggctgagactatctccctcgtcccttattttaaacagtatcattatacaattccgcgttacctgctggagagttgcatgtttggtttatgtccaactatg

SEQ ID NO: 214993 - DNA, 1080 bp, Zea Mays
ctctaggtgcaaccccagcgaaccgtcttagttccaaatatatgggggagcttggattgaacttcgaagtataccgcaatgatgaactgaccatagaagatgtgagaaggaagaacccaaggggaatacttatttctccaggacctggtgaaccacaagattcgggaatatcattgcagactgttcttgaattaggcccaaccatcccaatttttggagtttgcatgggtctgcaatgcattggagaggcatttggaggaaagattatccgtgctccttctggagtgatgcatgggaaaagctctccagtttattacgatgaggaattaggaaaggcattgttcaatggcttgccaaacccttttactgccgcgaggtaccacagcttggtcattgagcaagaaaccttcccacatgatgctttggaggctactgcatggactgaagatggacttatcatggctgctcgccacaagaagtacaaacacatccagggtgtccaattccacccggagagcatcatcacccctgaaggcaagaaaatcatcctcaactttgtcagattcattgaggaactggagaagcagcgttcgtaggggaggtagacgcgacaggtggtttcatttcatagatcagacggaagcagagacaaggcgcttaaagctgcgccaggttccggggctggcagttgaagcatagctaggaaacagctttccctctcttaattcgttgtgttcgtggtgacataatctgtgtgcggaccgaatttagaataaagtacaggcgtccgtctgatcaaataagcaccggtgttggtgctctatagatgaatatatccggtgattttcggcatgggaggcattggcacatttttgtctgagttctggcggtagcaagaccggagtaataaccatcaggcgtttctatgttggttacgtgccgcacgcaggccgggcgtgcggaggatttatgccctgagaggctgagactatctccctcgtcccttattttaaacagtatcattatacaattccgcgttacctgctggagagttgcatgtttggtttatgtccaactatg

SEQ ID NO: 214994 - DNA, 2047 bp, Zea Mays
tggcattgacatagcttggggaaaaatgtcatttccacacaaaatgttgcctgtcacttttgtttgctctaatcaaggtcaacctggtgttaaatctcataggtactgcaagaacatcattggttgtgacaattggtccatctccaagacatcgtggggaaactaccagtacaataatgtttggacaaaggaaaatgaaaggcaaaggaaacattttgacgatgaagttgagagaataagagctgaagctcaatgccgcattgctgaggctgaaagggaatgcaaaatcacattagagaataaagaggctgagtctacatccaatgatactggagaagtgcataatttactgcagaatgagaaaatgctacgtcaatcggctgaagatgaggccagtgacctcaagaatcaaatatcacactggaaaaagctggaggctacagctacagctgagataataaaactacagaaaatgctagatgctgaagctagccagaaagagaaacttgaagaagaaataggtgttttgagaagccagttattgcagatgagtatggaagccgatgagacaagaagtcttgataaaggagatgggccaggaaaaatatttcctgggtttagattcattgggtgtctcagactcgaggtttcacaacccagagagcaaggacaattggacagaagcaaccgattgccaaactctttgaacaagttgggttacaaaagatattgtcattgcttgaatctgaagaacctgatgtccgcgttcatgcagtgaaagttgtcgcaaatctggcagctgaagaggcaaatcaagaaaagattgtagaagcaggtggcctcacttccctgcttatgctacttaggagctctgaggatgagacaattcgtagagtagcagcaggagcaattgctaaccttgcaatgaatgtgcagaaacaaaccaagatcttatcatggctcaagggggtgtaaccttgttgtctatgacagcatctgatgcagaggatccacaaactcttagaatggtggccggagcaatagctaacctttgtggcaacgacaaactgcaaacacggttgcgggtagaaggtggaattaaagcgttgcttggaatggttaggtgtgggcaccctgatgtccttgctcaagttgcacgtggcattgcaaattttgcgaaatgtgaatctagagcagctactcaaggaaataagatggggaaatcactattaatcgatgatggagcgcttccctggattgtaaaaaatgctaacaacgaagctgccccaattaggcggcacatcgagcttgcactgtgtcatttggcacaacatgaagtaaattcaaaagacattatcaatgaaggtgccctatgggagcttgttcggatctcaagggactgttctcgagaagatataaggaatttggcataccggacattgacatccagccccactcttgaagcagagatgaggagattaggaataaaaatgtgataacagaacagagtgcagctggggctcacactatgaagttccatttctcgtgcacatacagaggtgtccgttgctatgggcgctggtaatcaagcacatcttcccttgatctacctgattttggcaggcatacacgggcaccgcactgactaatcagaagaggcaatggccttcgcaccaactttctcctcgagagttcatttttctttggtttgagggggcagttgaaaatctcgacagcactagcaattcgtttattttgtaaaataatgctagcatagcagatgttacctacccccaatgcagggtttgtaaattttttgctgtaaaaatatcaaggccaaaaggagtgctttcgcagtttgaagcataactgtattccctgatccctagaaggtttaacttttatttatttatttatttattgattgcagatgagccatatttgtaactgattttgtttctttcttaagcgttgacactgccatttcttttacactatctgctctcagatgatctatgtgagacacagcttttggaatgcgaagcga

SEQ ID NO: 214995 - DNA, 2136 bp, Zea Mays
cattgacatagcttggggaaaaatgtcatttccacacaaaatgttgcctgtcacttttgtttgctctaatcaaggtcaacctggtgttaaatctcataggtactgcaagaacatcattggttgtgacaattggtccatctccaagacatcgtggggaaactaccagtacaataatgtttggacaaagggcaatgaaagttgagaacatggtgaaattgaaggaagagtttgattacaagagcttatgtaggaaacttgatattgaattggataaattaattgcagaaaatgaaaggcaaaggaaacattttgacgatgaagttgagagaataagagctgaagctcaatgccgcattgctgaggctgaaagggaatgcaaaatcacattagagaataaagaggctgagtctacatccaatgatactggagaagtgcataatttactgcagaatgagaaaatgctacgtcaatcggctgaagatgaggccagtgacctcaagaatcaaatatcacactggaaaaagctggaggctacagctacagctgagataataaaactacagaaaatgctagatgctgaagctagccagaaagagaaacttgaagaagaaataggtgttttgagaagccagttattgcagatgagtatggaagccgatgagacaagaagtcttgataaaggagatgggccaggaaaaatatttcctgggtttagattcattgggtgtctcagactcgaggtttcacaacccagagagcaaggacaattggacagaagcaaccgattgccaaactctttgaacaagttgggttacaaaagatattgtcattgcttgaatctgaagaacctgatgtccgcgttcatgcagtgaaagttgtcgcaaatctggcagctgaagaggcaaatcaagaaaagattgtagaagcaggtggcctcacttccctgcttatgctacttaggagctctgaggatgagacaattcgtagagtagcagcaggagcaattgctaaccttgcaatgaatgaaacaaaccaagatcttatcatggctcaagggggtgtaaccttgttgtctatgacagcatctgatgcagaggatccacaaactcttagaatggtggccggagcaatagctaacctttgtggcaacgacaaactgcaaacacggttgcgggtagaaggtggaattaaagcgttgcttggaatggttaggtgtgggcaccctgatgtccttgctcaagttgcacgtggcattgcaaattttgcgaaatgtgaatctagagcagctactcaaggaaataagatggggaaatcactattaatcgatgatggagcgcttccctggattgtaaaaaatgctaacaacgaagctgccccaattaggcggcacatcgagcttgcactgtgtcatttggcacaacatgaagtaaattcaaaagacattatcaatgaaggtgccctatgggagcttgttcggatctcaagggactgttctcgagaagatataaggaatttggcataccggacattgacatccagccccactcttgaagcagagatgaggagattaggaataaaaatgtgataacagaacagagtgcagctggggctcacactatgaagttccatttctcgtgcacatacagaggtgtccgttgctatgggcgctggtaatcaagcacatcttcccttgatctacctgattttggcaggcatacacgggcaccgcactgactaatcagaagaggcaatggccttcgcaccaactttctcctcgagagttcatttttctttggtttgagggggcagttgaaaatctcgacagcactagcaattcgtttattttgtaaaataatgctagcatagcagatgttacctacccccaatgcagggtttgtaaattttttgctgtaaaaatatcaaggccaaaaggagtgctttcgcagtttgaagcataactgtattccctgatccctagaaggtttaacttttatttatttatttatttattgattgcagatgagccatatttgtaactgattttgtttctttcttaagcgttgacactgccatttcttttacactatctgctctcagatgatctatgtgagacacagcttttggaatgcgaagcga

SEQ ID NO: 214996 - DNA, 2110 bp, Zea Mays
gtcatttccacacaaaatgttgcctgtcacttttgtttgctctaatcaaggtcaacctggtgttaaatctcataggtactgcaagaacatcattggttgtgacaattggtccatctccaagacatcgtggggaaactaccagtacaataatgtttggacaaaggaaaatgaaaggcaaaggaaacattttgacgatgaagttgagagaataagagctgaagctcaatgccgcattgctgaggctgaaagggaatgcaaaatcacattagagaatgagaaaatgaagtatcatgaagaatacttagactcaataagaatactggaggagaagtggaaagtacatcagcaatcacccaagaaacaaaataaagaggctgagtctacatccaatgatactggagaagtgcataatttactgcagaatgagaaaatgctacgtcaatcggctgaagatgaggccagtgacctcaagaatcaaatatcacactggaaaaagctggaggtgctacagctacagctgagataataaaactacagaaaatgctagatgctgaagctagccagaaagagaaacttgaagaagaaataggtgttttgagaagccagttattgcagatgagtatggaagccgatgagacaagaagtcttgataaaggagatgggccaggaaaaatatttcctgggtttagattcattgggtgtctcagactcgaggtttcacaacccagagagcaaggacaattggacagaagcaaccgattgccaaactctttgaacaagttgggttacaaaagatattgtcattgcttgaatctgaagaacctgatgtccgcgttcatgcagtgaaagttgtcgcaaatctggcagctgaagaggcaaatcaagaaaagattgtagaagcaggtggcctcacttccctgcttatgctacttaggagctctgaggatgagacaattcgtagagtagcagcaggagcaattgctaaccttgcaatgaatgaaacaaaccaagatcttatcatggctcaagggggtgtaaccttgttgtctatgacagcatctgatgcagaggatccacaaactcttagaatggtggccggagcaatagctaacctttgtggcaacgacaaactgcaaacacggttgcgggtagaaggtggaattaaagcgttgcttggaatggttaggtgtgggcaccctgatgtccttgctcaagttgcacgtggcattgcaaattttgcgaaatgtgaatctagagcagctactcaaggaaataagatggggaaatcactattaatcgatgatggagcgcttccctggattgtaaaaaatgctaacaacgaagctgccccaattaggcggcacatcgagcttgcactgtgtcatttggcacaacatgaagtaaattcaaaagacattatcaatgaaggtgccctatgggagcttgttcggatctcaagggactgttctcgagaagatataaggaatttggcataccggacattgacatccagccccactcttgaagcagagatgaggagattaggaataaaaatgtgataacagaacagagtgcagctggggctcacactatgaagttccatttctcgtgcacatacagaggtgtccgttgctatgggcgctggtaatcaagcacatcttcccttgatctacctgattttggcaggcatacacgggcaccgcactgactaatcagaagaggcaatggccttcgcaccaactttctcctcgagagttcatttttctttggtttgagggggcagttgaaaatctcgacagcactagcaattcgtttattttgtaaaataatgctagcatagcagatgttacctacccccaatgcagggtttgtaaattttttgctgtaaaaatatcaaggccaaaaggagtgctttcgcagtttgaagcataactgtattccctgatccctagaaggtttaacttttatttatttatttatttattgattgcagatgagccatatttgtaactgattttgtttctttcttaagcgttgacactgccatttcttttacactatctgctctcagatgatctatgtgagacacagcttttggaatgcgaagcga

SEQ ID NO: 214997 - DNA, 2202 bp, Zea Mays
gtcatttccacacaaaatgttgcctgtcacttttgtttgctctaatcaaggtcaacctggtgttaaatctcataggtactgcaagaacatcattggttgtgacaattggtccatctccaagacatcgtggggaaactaccagtacaataatgtttggacaaagggcaatgaaagttgagaacatggtgaaattgaaggaagagtttgattacaagagcttatgtaggaaacttgatattgaattggataaattaattgcagaaaatgaaaggcaaaggaaacattttgacgatgaagttgagagaataagagctgaagctcaatgccgcattgctgaggctgaaagggaatgcaaaatcacattagagaatgagaaaatgaagtatcatgaagaatacttagactcaataagaatactggaggagaagtggaaagtacatcagcaatcacccaagaaacaaaataaagaggctgagtctacatccaatgatactggagaagtgcataatttactgcagaatgagaaaatgctacgtcaatcggctgaagatgaggccagtgacctcaagaatcaaatatcacactggaaaaagctggaggctacagctacagctgagataataaaactacagaaaatgctagatgctgaagctagccagaaagagaaacttgaagaagaaataggtgttttgagaagccagttattgcagatgagtatggaagccgatgagacaagaagtcttgataaaggagatgggccaggaaaaatatttcctgggtttagattcattgggtgtctcagactcgaggtttcacaacccagagagcaaggacaattggacagaagcaaccgattgccaaactctttgaacaagttgggttacaaaagatattgtcattgcttgaatctgaagaacctgatgtccgcgttcatgcagtgaaagttgtcgcaaatctggcagctgaagaggcaaatcaagaaaagattgtagaagcaggtggcctcacttccctgcttatgctacttaggagctctgaggatgagacaattcgtagagtagcagcaggagcaattgctaaccttgcaatgaatgaaacaaaccaagatcttatcatggctcaagggggtgtaaccttgttgtctatgacagcatctgatgcagaggatccacaaactcttagaatggtggccggagcaatagctaacctttgtggcaacgacaaactgcaaacacggttgcgggtagaaggtggaattaaagcgttgcttggaatggttaggtgtgggcaccctgatgtccttgctcaagttgcacgtggcattgcaaattttgcgaaatgtgaatctagagcagctactcaaggaaataagatggggaaatcactattaatcgatgatggagcgcttccctggattgtaaaaaatgctaacaacgaagctgccccaattaggcggcacatcgagcttgcactgtgtcatttggcacaacatgtaaattcaaaagacattatcaatgaaggtgccctatgggagcttgttcggatctcaagggactgttctcgagaagatataaggaatttggcataccggacattgacatccagccccactcttgaagcagagatgaggagattaggaataaaaatgtgataacagaacagagtgcagctggggctcacactatgaagttccatttctcgtgcacatacagaggtgtccgttgctatgggcgctggtaatcaagcacatcttcccttgatctacctgattttggcaggcatacacgggcaccgcactgactaatcagaagaggcaatggccttcgcaccaactttctcctcgagagttcatttttctttggtttgagggggcagttgaaaatctcgacagcactagcaattcgtttattttgtaaaataatgctagcatagcagatgttacctacccccaatgcagggtttgtaaattttttgctgtaaaaatatcaaggccaaaaggagtgctttcgcagtttgaagcataactgtattccctgatccctagaaggtttaacttttatttatttatttatttattgattgcagatgagccatatttgtaactgattttgtttctttcttaagcgttgacactgccatttcttttacactatctgctctcagatgatctatgtgagacacagcttttggaatgcgaagcga

SEQ ID NO: 214998 - DNA, 1679 bp, Zea Mays
agcagagtaaatgatcttgatctgcagctaaggagaaaggggaatgccataggtacttatacaattgggtctggaggctcgtcggcaaccggacagggaaatagcaaggcggaagggcattgctcggtcgctggtccgatgagtggcactgtcagggagcgtgacaggggcgacaaatctagacctccacttgtttgaagcccctcttgacgaaaaagaaatatcgctacgatatagctctgctcttggataaggtgctacaaatgtatagctctgctcttgttcaaggtgcaccaaatccacgtatgcatcaaaaaattgaaccaactcggatgaacttgatcccatcatctgcccgaatgtcggtcagtagtttgcttattgcactggatgaatggtgcctgactgaccgatttgatcccaacaacgctaagcatttgaccgccaaggctgagattgagcttggcgatggcctgcctgacatccgtaccactcgccagtgtgtccaagctatgaaagatgcgggattcgaggtcgtttttgcaaaggatcttgctcaagcgttttccttgcccatggatcctacacttgctgttgttgcttatagacgtgggcagtgtgacgatgaacttattaacgtcactaacaagaattcgttattcaagctgcaagctaggtatgtggttgagagaatggatggtgatctgtgggataaagttcttcagcccgagaatgaatatagaaggcaactcattgaccaagtggtttcgactgcattacctgagagcaagagccccgagcaagtgcaaaacctgctcatcttgactgccaaagcccagttacgtgaaggtctggtcagtgaagcaattgagtccttcattcgtgtagatgatgctgcacacttccttgatgttatccgtgcagccaaggaagctaatgtgtacaatgatttagtgaagtaccttctgatggtaaggcaaaaggcacgggaacccaaagtcgatggagaactcatttttgcatatgctaagattgacatgcttagtgatattgaggaattcattcttatgccaaatgttgccaaccttcaaaatgttggtgaccgtctgtatgatgaagaactatatgaagctgcaaaaatcatctatgctttcatctcaaactgggctaaactggctgttaccctggttaagctgaagctgtttcaaggtgctgtggaagctgctcgcaaggctaacagtgccaaaacatggaaggaggtctgctttgcttgtgttgacgccgaggagttccgtcttgcacaaatttgtggtctcaatattattattcaggttgatgacttggaagaagtcagtgagtactaccaaaatagaggatgcttcaatgaactcattgctctcatggagagtggtcttggactagaacgtgcacacatgggcatcttcacagaattgggagttctatatgctagataccgctctgagaagcttatggaacacatcaaacttttctccacacgtctcaatattcctaagcttattcgagcttgtgatgaacagcagcactggaaagaacttacctacctgtacatacagtatgatgaatttgacaatgctgccaccactattatgaaccactctccagatgcatgggatcatatgcagttcaaggatagatga

SEQ ID NO: 214999 - DNA, 1111 bp, Zea Mays
ctctggtttaggataggatctgaatgcccaagtgcctcagaggagagtctgcgtgtgtggtactggtagtctggtaatggtagagcaaggaaagtaacaaaagctcgcggttgtccagaactggaatttattctgcgtctgaacatagttgtatgactgtatgagttgaagctttcagtatgtgcatcgatggatgatgatagattcaaagactggtagcaattctacaaatttaggacgacttatatagaatagaaggctagctattgttagtaaatgtttggttatgtatcaagctatgttgtagttatgttcatgcttgagcttgacatagttggaagctaataatctgttgtctatttctgatatgtgcctctcttttttattgatttcagctatggagctggctctggccctggaaaagctggtcaatgagaagctgcacaacctgcatggtgtggcaacaaggtgcaatgatcctcagctgacagacttcatcgagagtgagttcctcgaggagcaggtggaagccataaacaagatctccaagtatgtcgcccagctgaggagagtgggcaaggggcacggggtgtggcacttcgatcagatgctgcttgaggaagaggcctaaaaagaagaacggacagatgaatgaaggaaacaagtgtgtaatgttgatcaggcggaggaataataatgggtcaactgacaactctgggtcggtggatttgtagttggtttgggttttttagttgtagaacggtgttgccctcctagagagggatgaacacattatgcatgcgatgtgtcagttcggtcggtgctatgctcgttgggatttgattgtcggaaataaaacatgggtgatgaatgtgtaccctccctaatctatgaagttgagaaagccctgcgggtgtaggtggatttgtagaggtttttcttcagttggttaggttcgctgttgcctacctcatttgcccctaatcatcatcgccgtaatttatttataataaaaaagatccagcttttccccctctcatggctgatttgtagaggccgcgctgtagtcggagactcgaggaggagcccgaagcggtcagggagctcgtgt

SEQ ID NO: 215000 - DNA, 1848 bp, Zea Mays
atttccatcccattcatctccgccagaggagggaggcgagccgcgtttttcatttcgaaatcaaaccacgacgatgccgcaggcgatggcggacgccgcgacgctctccgccctcgctctctttgcctcccgcctctcctgtcgcaggttcggggacgaggacctccgggtgctggaggccgcgctgtccgccggcgccgacgtccccgcgctgctcgccacgcgctcggcggcccggcgcctgctgcgatcgagcgcggcggaggcactcgcgttcaccgcggcgggtgcatcgctggatggtggggatgagagacggagcctcgccgtcgccgacttcttctcacgcgccttcgcgcttgtaggcgatgtcgagagctgccttgccatgagatacgaggcactgttgcttcgagacgctaaatactgcaacgaccttcacttgcaagtgtcccgtcaggagtggctaacttttgcaacggattgtcttgataatggcttctacaccattgcctccaaggcttttgcaaatgctcttgtgcacattcatccaagccacacagggcacttggactctgctaattccattgaggagaaggacaagatcattgaaataaaaggactccagaacttggccaagtcattatctgcacagcattgtgttcagataaagtctgctgaatacatggaaaggagagcttcaggtgttcacgagaagtataatttgcaatcaggaaaaccaaagttaacaggaagttcaatgttcaggctagggattaaaacgaggaacataaagaaattgcttcgtagccaggaaaggaacttgggggatttaaagcaatcttagcgttgcatcttccaaccgagaggaatgttgtaaaaagatcagttaggtgacaatttatgcaaatggagacatgaagtggagttatggatgggtctttgattcaacattaagacaaatacgttgaagagtagttgcatcctttggtagcatactcactgtgcaactatggagctggctctggccctggaaaagctggtcaatgagaagctgcacaacctgcatggtgtaagttgcattcttgcagagaaatatatattgcgtgctttgctcaaggcatacatagaaaatctatgggcaaatataagttgaataactgttgagtcactgcatgctgttgtaattaacaggtggcaacaaggtgcaatgatcctcagctgacagacttcatcgagagtgagttcctcgaggagcaggtggaagccataaacaagatctccaagtatgtcgcccagctgaggagagtgggcaaggggcacggggtgtggcacttcgatcagatgctgcttgaggaagaggcctaaaaagaagaacggacagatgaatgaaggaaacaagtgtgtaatgttgatcaggcggaggaataataatgggtcaactgacaactctgggtcggtggatttgtagttggtttgggttttttagttgtagaacggtgttgccctcctagagagggatgaacacattatgcatgcgatgtgtcagttcggtcggtgctatgctcgttgggatttgattgtcggaaataaaacatgggtgatgaatgtgtaccctccctaatctatgaagttgagaaagccctgcgggtgtaggtggatttgtagaggtttttcttcagttggttaggttcgctgttgcctacctcatttgcccctaatcatcatcgccgtaatttatttataataaaaaagatccagcttttccccctctcatggctgatttgtagaggccgcgctgtagtcggagactcgaggaggagcccgaagcggtcagggagctcgtgt

SEQ ID NO: 215001 - DNA, 1843 bp, Zea Mays
atttccatcccattcatctccgccagaggagggaggcgagccgcgtttttcatttcgaaatcaaaccacgacgatgccgcaggcgatggcggacgccgcgacgctctccgccctcgctctctttgcctcccgcctctcctgtcgcaggttcggggacgaggacctccgggtgctggaggccgcgctgtccgccggcgccgacgtccccgcgctgctcgccacgcgctcggcggcccggcgcctgctgcgatcgagcgcggcggaggcactcgcgttcaccgcggcgggtgcatcgctggatggtggggatgagagacggagcctcgccgtcgccgacttcttctcacgcgccttcgcgcttgtaggcgatgtcgagagctgccttgccatgagatacgaggcactgttgcttcgagacgctaaatactgcaacgaccttcacttgcaagtgtcccgtcaggagtggctaacttttgcaacggattgtcttgataatggcttctacaccattgcctccaaggcttttgcaaatgctcttgtgcacattcatccaagccacacagggcacttggactctgctaattccattgaggagaaggacaagatcattgaaataaaaggactccagaacttggccaagtcattatctgcacagcattgtgttcagataaagtctgctgaatacatggaaaggagagcttcaggtgttcacgagaagtataatttgcaatcaggaaaaccaaagttaacaggaagttcaatgttcaggctagggattaaaacgaggaacataaagaaattgcttcgtagccaggaaaggaacttgggggatttaaagcaatcttagcgttgcatcttccaaccgagaggaatgttgtaaaaagttaggtgacaatttatgcaaatggagacatgaagtggagttatggatgggtctttgattcaacattaagacaaatacgttgaagagtagttgcatcctttggtagcatactcactgtgcaactatggagctggctctggccctggaaaagctggtcaatgagaagctgcacaacctgcatggtgtaagttgcattcttgcagagaaatatatattgcgtgctttgctcaaggcatacatagaaaatctatgggcaaatataagttgaataactgttgagtcactgcatgctgttgtaattaacaggtggcaacaaggtgcaatgatcctcagctgacagacttcatcgagagtgagttcctcgaggagcaggtggaagccataaacaagatctccaagtatgtcgcccagctgaggagagtgggcaaggggcacggggtgtggcacttcgatcagatgctgcttgaggaagaggcctaaaaagaagaacggacagatgaatgaaggaaacaagtgtgtaatgttgatcaggcggaggaataataatgggtcaactgacaactctgggtcggtggatttgtagttggtttgggttttttagttgtagaacggtgttgccctcctagagagggatgaacacattatgcatgcgatgtgtcagttcggtcggtgctatgctcgttgggatttgattgtcggaaataaaacatgggtgatgaatgtgtaccctccctaatctatgaagttgagaaagccctgcgggtgtaggtggatttgtagaggtttttcttcagttggttaggttcgctgttgcctacctcatttgcccctaatcatcatcgccgtaatttatttataataaaaaagatccagcttttccccctctcatggctgatttgtagaggccgcgctgtagtcggagactcgaggaggagcccgaagcggtcagggagctcgtgt

SEQ ID NO: 215002 - DNA, 934 bp, Zea Mays
ctcgcctcgctcggcgcattggagaggtagtagctagcgcacgcccttcgtccgtcaagcccagtagcccacacctgcacctctatggcactattagcacctctatctagttcttctctcttcagcctcggatccaggcgagcaccatacccctgcaaataataaggttaccagcttgcaggcagccacaggcacggcttcaactacaacttggctagagaaattttaaaagaagagaagtgatgcgggtatagttacttcaagataaaaagcgtcaaagtaatgtaaatgagctatgggcttttgagcaagcacggagcgagggccactgcctgtggtcttgtttcttcaggtaaagaaaaacagttcttcctgagtgaggggtagccaagatcgacgactggcggcaggtgtacaagcccacaaccacaagtcgtcgtccaggctctcgactcgagggagaagcaactccgatcacttgttcagagttgcatgtcccgtgaactcaggcatgttcattcgcctacctacccagatccctgctattcgaccctcaattgtgagttctggatgagatgagttctttcacgcaattcagggccagaagtccatgcagtggcaaaagcagaacgcgtgttggaagtccaagcgcaagcccatcccgggaagctgcctgtcggatgtcgatgaacgcgtgttggaagtccaagcgcagaacgcgtgttggaagtccaagcgcaagtccatgctgtggcaaaagcagaacgagtcaatggtgatcgatgagacgccgcgttgtgttgttcttgcagtcttgctcatcgtgctcgccgtgtttcacaacttatgcatttacatattgtgccgtctcgtcactcgaaactgaagcaagctagagttctcgatcgtatcgtattccgatccatcttccgat

SEQ ID NO: 215003 - DNA, 2840 bp, Zea Mays
ccctgacttctaccgtctcccgtccgcccgtcgcagagtcacggacgatgcgccgcagcccgccgtcctgccgaggcaccgacggttgccgcctaccccagcacggctgcacttcgatccggtcttgctcgtgcttcgtgctgtcttagcggtcgatcgtcgccatctcccctcggtgcttggccgtccagcgggaacggcgcagccgcgcaggcgcaacgggtgctcgcctttcgacaagggcgccccccgcgccagcccaagcgccagcaccagcgaggccggggcggagcacaggagcccgccgctggcctgctgctcaagccccaggggcggcggatctacagccggcgccgagggaggcgccaagcccttcctccagctgatgtagcaatatttactcacatttgatcctcacaacactgatacttcaagatggaacaaatttcacttggcaacagatacaaggagtgcaggacacaaagaactaccagctgtcaaacaaaaatacttgttggaaaggatgtattaaacgaaatagagcaaaggcgttcatcaccaagtgtgattgcaaaactgatgggaattgaggtgttgccaccttctaaagtggtcaatagtcggcatcaagaatttaaggatgtttttgaagtgtcagaggaaccaccagaggctgtcgcaaaagagaagtcccaaggcttgccgagcttgaaacgaagagcgctaagcttgaaaaagcttatgccatcaaaaacactctacagagatgatacacatgattgttatgtggattgtgtagctggcttgggtcgcttgaactcagtggaaataaataatcctttatttgagaagcaccttcatgacatgaactattctgcaaattatcagtatgtaaaagatacatcaagtgtttgcaggacataccctgtgggtttagccaattcatcactcagcaatttcagccttttatcaagagggaaaaacaaagatttcaacagcattgtagttctggaaccaccatgcttggaaaaagggcatgatccagaaaacattttttccattccatacctttctcctgtcaataaaaactgcagtagaggcatgaaacataagaaatttgagtttcctgtaatggagaatggaagagttcgggaacatatattaggtactgaagctaacaatgtgcttcgaattagaaaagaaagacccttgactagtgactccattgatccactgcaaattggacaggaagcatcagttcatcagtttgggaatactgatgtgagttgttctggatcatctcagaggtattcttgtggtaacgatagctttaggaaaactaacaggtcatcatcaagcagaatatgccggcatgcagaatctgctgttggttcgaaaactcttgcagaaatgtttgctttatctgattctgaaagactgaagctaaattcagactcaaatgctccagttctatgtaatatgattgaccgtgataatggtcatagcaaggatggatgctttatagttttaccaaagcatgcacctgtgctgtctatccgaagctcaatggacatgccttcttgcttggaaggctcctctcagggtaaaaataatctaaacatatccaatatttacaacaatgctcacttgagcagtgctcactgtttccaaaatcttacaggtgacaacttttcaactcctgattgcttaaatgataaagtattgttgacaacagatgaagacgtagttcgacaatcagctgaatctgagccttccaggttcaacttgcaggtttctaggaaacaacgggtgacagtattgcctttccattgtcacgaggatgaatcgatatctgtttcggatcatactgatggtacaaaattttgtaaaggctcaaaagaggttgagcaaccgagcccagtgtccatccttgagcctccaattaatgaagatatttgttttccacgatgtttcaactatgacttgcaagggatggctaacaaacagagaggttgccatcaatatcacaatgaatctgaagttaacatgtcaagtgatgatgaagaccattctttttaccaatctttggaagcatttcaggtcgaggaaaactgggacttctcatatcttctcgacatacttatatgctctggtatcatagttgttgactggcagctcatctgcaagtcatggtacttgcctggttaccctgttggccctcatgtctttgataggcttgaaaggaaatacaataaaatcgcaacatgggcaaagcctgagaggaggcttctttttgacctcgtgaattcaattctttccgaggtccttgcaccatgtgttgatgtgcacccatgggtgcagcctagtagacactgtgtggcattttggggccctgaagggcctgttgagaaggtttggcagacaattgttaggctgcaggaagactgtgtcacaaggcatcctgatgagatggttcttgatacaaattggctggaagtaggcaccgacatcaatatggtggggaagcagatagctaggatgttacatggcgacctcttggaagaagtcatagtggacttccttggttgagttggtagtttcatgtggacataactagtaactaacaacttcggcaacatggggttcgctcaaacttcaagcagattatgctgaatatgtaacggcttttcaagtgcacacatgccgcatttttcttctggttataataggagctatgtattatgtaattacattggagagcaaaatatacaggccaaaaaaacactactgcaggtccatatgattgatggtcgtggtgccagctccaatcttgattccac

SEQ ID NO: 215004 - DNA, 1437 bp, Zea Mays
tcgggaattcttgcatgcccgtgctacgtcgtccatcgtctccccggccggctggagctagctagggcccggtgatcgtatcgtcgattggaagtgaagatcaagcgatcgatagaataaattaaaggcgcgggggcaacaacaagaatggggggcggtggcggtggcggcaactcgcgggagcttgaccagacgccgacatgggcggtggcgtcggtgtgcggcgtgatcgtgctcatctccatcctgctggagaaggggctccaccacgtgggcgagttcttctcccaccgcaagaagaaggccatggtggaggccctggagaaggtgaaggcggagctcatggtgctgggcttcatctcgctcctcctcgtgttcggccagaactacatcatcaaggtctgcatcagcaaccacgccgccaacaccatgctcccctgcaagctcgaggccgccgccgtcgagggcaaggacggccacggcaaggaggccgccgccgtggtcgctggcaagaagaaggtcgccgtcgccgtccctggaaagaagaagaagaaggccgccgccgccgccgaccatcttggcggtgtggtggactggccgccgccctactacgcgcacaacgccaggatgctggcggaggcgagcatggcgaccaagtgccccgaggggaaagtgccgctcatctccatcaacgccctgcaccagctgcacatcttcatcttcttcctcgccgtcttccacgtctcctacagcgcaatcaccatggcgctcggcagggccaagatacgtgcatggaaagagtgggagaaagaagctgcaggacaagactacgagttctcacatgacccgacgcggttcaggttcacccacgagacttccttcgtgaggcagcatatgaatgtgctgaacaagttcccagcatcattctacatcagcaacttcttccggcagttcttcaggtccgtgaggcaggcagactactgcgcgctgcgccacagctttgtcaacgtccatctggcccctggcagcaagtttgatttccagaagtacatcaagcggtctctggaggatgacttcaaggtgatcgtggggatcagtcctcctctgtgggcttctgctctcatcttcctcttcctcaacgtcaatggatggcacaccatgctctggatctccatcatgccggtggtgatcatcctgtcggtggggacgaagctgcagggcatcatctgccgcatggcgatcgacatcacggagcgccacgccgtcatccagggcatcccgatggtgcaagtcagcgactcctacttctgaatggcttccagatcatctacttcctctggattctgtatgagtacggcatggactcgtgcttcaacgactccgaagagttcgtctttgcacgactctgccttggatcgatgcatcatgtctgtgtgc

SEQ ID NO: 215005 - DNA, 1289 bp, Zea Mays
ctcaagttcaacagcttctgttatagccttcagcttgtgcatattttttagggcccagaccatgagcttttcccagctcaggaagcggtgctgcacattcaaactcatattgtagaccttggcccagacatggataacattatcacaacaagactacttgtacctgcaagtgaaattgcttgctttgatggaagggaggggtcattatctgatatacagaggcagactagtgcaaacgtgcagatattaccaagagaagatcttccgtcatgcgctttagagtctgatgaactcatacagattgttggagagattaaagctgctcggaatgctctgatacaagtaacaacaaaattaaggagttttctataccgtgagatgcctgatcctattcaagttggcaatatcaatttacatggagccatttctccagtagcaggctcacctcgaggaccataccaaggaaatgatatcccaatgggtgcttatcaccaagcatcgcaactggcaacttcatggcattcaaaggatagtggaggcagtgcaagtggatcatttgagcaaggcagcaacattaatgatgatataaggcaaagtgctacaaaaagatttgccgttcctctagtgactagaagcacactagaaattgtcataccaaacagtgctgttgcaagcctcaccatgagagctggtagcaagcttgctcaaataagcgagatatctggtgctgcagtaacgctagccgaggatagatctgacatcttgcagaaagttgttcgaatatctggtacccctgagcaggctagcaaagctgagaatttgctgcagggatttatccttagcattccagatgacattccttcaggttaatcgaagatactctgcatgtcatagttgttaattcgtcaattttcttttatattttcgaggcagaatatgtcgagtcatgtgattatttgtttaattgagcagcatgttttcatgtgcggagacatgcatgccattttctttgtatctttgtagctgtgaccctaaatttcggttgtctccgaagacactctgcatgtcatagttgttaattcgtcaattttcttttatattttcgaggtagaatatgttgagtcatgtgattatttgtttaattgagcagcatgttttcatgtgtgtagacatgccattttctttgtatctttgtagctgtgaccctaaatttcggctgtctccgtttaactggccgatggggctgtaagattagcaagtgttttatagactgattggacattaatgtg

SEQ ID NO: 215006 - DNA, 2715 bp, Zea Mays
cacagactcgcccgggaaatagccgttgcgcgcagggagcgtgcgtcgtgcgcccaacggtccaccagggcaactcgccaactcctctacgaagcctggcacagggttcaaacctcccgaccgttggagacccctgcccctatgcggttcctcgccgcttcagggggcagacgcataatttgattgagctagcgagcgagagccgatggcgctggacacaggaacggtggcggcgggggcgatcgacgaggcgtacgagttctctgcgcccaggttcttcgatttcatcaccgaggaaacggaggaggccgtacgcgccgccgagagctggttcgaggccgcccgcagccacgccccgtcgccgttcaaccccaggataaaggaatcgagggcggaagccaaggtcgctgtcctctgcgatttcgcggaagccgaggagccggctccagaggcggtgcccgtggaggtggcagcaggaagcgtctcggtacacggagcagatgctattgatggtgctcaatgtcctgaggcaatatcggaatcgccgccggcttcacatccggctcaagaagagaaggataaatcgccccaatcgttcgagttcctctcggcgacagacctatccgtaaaatcagatggtggtgctgccagcacgcctaagatgcagacgcgtcctccttctccttctaccaaaattgcacctccaatttcgacatgtgacagctcttcagtgaatactggtgcgcgcacgccaaagacgcaggcgaacatgtgcagagcagctactatggctgcttcgacgaatgccaaggggagcgtgatcaagggtggttgtgatttggttgggactggaaaggcagccactgctggcgctgaaattgcacaagcgaaccaagcggtgaagaggcagaagcttgatgatggaagagccagacagatactcaatgttaagactaaggtcctgcctcataaacggagaactgatttagctgtaagcaatgaagtgaggaggtcccgtgaggatatgtgttctctgaaggaagcaacaacatatgtatcaactgcagaattggttaagaagtttgaatcagggaccagaaagctgagcatcactcacagcagatctcgttctcgtgacgatgctgcattacagggaaggcctaagcttgtgttaactagacctaaggaacctgagttccagacttcccaaagaatccgagcagtaaaagtaaagagctctgcagagatagaggaggaaatgttggcaaagatacccaagttcagggcacggccattcaacaaaaaaattgctgaagccccttcgttccctccacttccaaggaaacccccacagatttctgaattcagtgaatttcatcttaaaacaatggagagagcaagtcgatatgcggacacctgttcggaagtatcttgtgcagatactatccggagtcgaaataagccactgaaatcgacacaacgaaagccaccgcaacttcatacagcaaatagagctaggccaccaagtgtgaaaagttctcaggaacttgaactggaggagctggagaaggcccccaagttcagggccaagccactaaacaaaaagattcttgagagtaagggagacattggagtgtttgtccatcctaagtctcaggtcacagctcccaaagaattccgtttttgtaccgatgttcgcttgggtcctccatcagttgctgacttatttgacaagctctctcttcactctgaatgttcttcaaacagtaacaggcaaggtgtgcctagatgcaccataccaaaccctttcagtctacaaacagaggaaagaggtcaattaaaagagaggcagctagaagcacaactcttacaaaagaaggtggaggaggaaaaggccagggttcacaaagctaacccttacccatacaccacagactatccgatggtgccgccgaagcctgaacctaagccctgtacgagaccagaaggctttcaactagagagtttggtgagacacgaattagagcagcaaaggctgatggaagaaaggcagagaatggagagagaagaagctcagaggagaatcgtcaaagctcaacctgtactgaaagaggaccctatcccacttccggagaaagagcggaaacctctcactgaagttcaacaatttgtgttgcatgttgatgagagggctgtgcatagatcagaatttgatagcatgataaaagagaaagaaaagacttacaaaaggttgagagaggagaacgaattcgcgcaaaagattgaggaggagaaggcgctgaagcagctgaggagaaccatggtgccacatgcccggcaggtccccaagtttgacaaaccattccgaccacagaaatcgacgaagcaggtgacaagaccgaagtcgccacagcttcaggtggatgagcgaggggcgaggaggcatgctttaatcagatgaccaccatcctcgcctcaagatctctgcgacgttgtttatgtatctgttcgtcgggctactaagattcttttttcgctgaccaatttgtagagcaggccagcaacccattgccgctgctgtgtgtgtaggttggtgatgttttatgattatctcaatgatgacactttttaatcggatataccttgtgtattctcggacacgtatggaacttagcgctccacactcgcatgtttccccgcacacctcgtcgccaa

SEQ ID NO: 215007 - DNA, 4238 bp, Zea Mays
ctgcctgcctgcagaatgatagcaccatctagagagatcatcttcagtcctgctgcattgcctactgctatgtatatagtttaaatagccaataggtatcttcaggcaggaagatctggaagctctgtcatttcgagatggttgagttcttcggaggatagaacgaaccattcggttgatcctgaaggaattaccacggtctctgcatcagaatttggtgcccatgacggtttcaccgagctgaaggatttcctcagcatcgcagatcaagatttccaggaagataccaaggggagctctgacagcaggtgcctccatgagatgctcgaggagtcgcagtctgattcgcctgtttccttttactcgcatcttgattctagtgaacaaagtgatagcgaggcagctccatatgacaaaggaaggtcagcaaagatcatgcccatagatgcagatttcttagcagctaaactccatgaaagatcaaaccacaacaagaatctgacgtggtgcacatctcctgaaaatgcaatgatatatgctccagaatcctcaatgtaccaggtcgatgaccgtgagacgaaaccaaactgcttgcaatcaaacagatctcatggatcactgaataatctatcaaattcggtcctggagctgaagaatgctgactcatactccacatccaactattccgccaaggatgccatgtttacgcagtgctcaccgaggcatgatctcagatgcttcaatgccttctcggccaaattcatcaagaaaagttccctgtccgatctagtctccagaggaagcatgagcaggaaattcaagacttccacagccagtgatgattggagtgatgtcagctcgcgctgggcgaaggacagccaggtagattttcttgagaggttcgagaaggcagtatcaaaactgctgatttcagatggactagaaagctgcctagatgctggctctgaggtcacaactatatggcaattactgaacaacacttgtgaggcgagacacatgtcgtcagtaaggcaagatatccttgatcggctgcttgacagcatttccacatcaaaaaaggacaaagtggtcagggcatcagtctatgtactactgctcatgatatctgaagatagaaatgtcatgagaggcatcaagaggaaggacttccatttatccaacttagccgttgcattgaagagagatgtacatgaagcagccattctgatatatctgttagatcctacacctttagagatcaaaaacttggatctgttgccctcgcttctacatgttgcttgtagctcaggcacccaaaaatggccttcaatgcttccactgacaccgacatcagcatcaatagctctcatcgagatcttagtgacagcattcgactatgtaacaaacaatgtccacttggcttccctcagctcccctcctattttgtccaagcttgtggatgttgcaaagaaccacaacttggaggaaggctactccagtggacccattccttcaccttctgagacgaaaagagcaccgggccaagtgtgctgcacttgaatacttccatgagattctacagattcccaggtcctcagcaaactctctgcttgaagaaataagacggcaaggtggcattgcaattatgcacacactgatggtcagcctccatcaaactggacctgaacatcgggttttaggagctagccttctcctgcaattggatatgatggagagatcagatggcaggagtgtgttccaagatgaagcgatggaagtcctgttggactctctatcatctcaagaaaacagtagagtacaggcattatcagcatgttttctttcaaacctcggagggacttattcctggtcaggagaatcgtacactgcagcatggctcacaaagaaagctggtctcacatcaacatcacaaagaaatacaatcaggaacatcgactggcttgattcttgcctgcaggatacagaaataagcacatggagcaataaatctgcacgagcgattattaaaataggagtaccgtttatcagcgctttagccaaaggaatgcaaagcaaagtgaagggaacctcacagaattgcctcttatgcactgcatggctcggaagcgagctggctgcccttggtgaaaatgccataagatattctgcttgtgagatcttgttgcatgacatagcaagtcaccttcatccaggaaatgagcttgacgaaagggttctagcatgcatgtgtctctataattacacctctggaaaaggaaagcaaatgttgatgagcttgccagagggttcccgagaatctcttaggaggctttcatcgttcacatggatggctgaggagttacttcaagttacagattattttctttccagcaaaccacgtgtatcatgtgtacatacacaaattctcgaaattggtcaaccaggcaatggtgcagcaactgctatagcattcttcagagggcagctttttgctggttattctaatggcaccatcagggcatgggacataaaaggccagagggcagtaatcatcagggaggtaaaagagcacaagaaggcagtgacatgtttttcactatcagaaactggggagaacctcctgagtggatcagcagacaaatctattcgggtatgggaaatggcacagcgcaagctagagtgcgtggagatgattcagacaagagaggctgtacaaaaacttgatatttgtggtgacaaaattcttgtacttacacagaacagcgttctcaagttctcttgtgcatcaagaagcacccaaacattttacaggagcaagcatgtcaaatctctagctgtataccagggaaaagcttaccttggatgcaaagacgcaagtatacaggaactagacgtgtcagttgaatccaacagtgcgatgataaggatacctagaggaggctggatggttaggaaacaatccattagctccattgttgtatacagagattggatgtactgtgccggtgctcaggtcgaagggtcagccttaaaggattggaagaaacgatgcaaacctaatatgacaatgccaataccaaagggaacaagtgtagaggccatggcagtggttgaagacttcatctacttgaactgcagtagaagtcctagtatcattcagatatggttgagggagaagcagcagaaagtaggaaggctatccgcaggaagcaagataacgagcttgttcactgcaaacgacatggttttctgtggtacagaaactgggttaattaaggcatggataccgttgtgaagtgtagaagcaagaaggagcaggtggaaggcttaatcttgtaaatgtaaaggaaagctagagtgtacaggaaacatgaaaaagaggagcataccattgtacaagccctcaggacacaacacagcagccagcgcggttcgttcataaactccatggatcagcaagtttcttcgaaatggatgagtagtaggttcataatgtaaatactaactagtgtgtgcgtgtttgttttagttttgcgaagggatgagttgtggatgttaataaagggtagagtaaatttcttagatctacatatatacttgcctagaactggaaaattaagaggacactaccactataacaaaaaaaagccatgtcattttggacaatgagaagcctccaaagctttattcttttttttcccaccatttatttaattggaaaacgtgatcatgaaataattgttgaaacagataaatttaagcggcagtggccgtagaatcatgaggccaactacacccagtggcggagcgctcggtatggcgagctatggcgcttgccataccttactccgccatgaggaacaggtgcttcaggctcaggcggtagtgggcagagaacaccagggccgagagtgaggcggcgagggcgaggcaaagctgtcgatgatgaagcgtgtctcctcactctcccatggcgtcatccgctgcgctcctcctcatgcccttctagtcccgtcgatttactgccttgcgctcaaggtttgcacctgcttcctgtccaactcactccacctcccatccgtccacgccgctgtctcactcttcagctctgccacagacgcaccgcaagtctccatcgatggtcctgcactcacgctgctctgcagcctacacccatagcactcatgcctcgcgcgcagctctgcagccccacctaacgacgtgagcgctcctgcctc

SEQ ID NO: 215008 - DNA, 2184 bp, Zea Mays
  misc_feature (1)..(2): n is a, c, g, or t
nnagaaccaaacatttctgaaaatggaagttctgtggaggctcaggacaaagacgttattctggaaggccttagtactgttagttctcatgatcagtggactccattatctgtcagtggtcttcgtccgaagcctcgttatgagcatggagcaactgtgctgcaaaataagatgtatatatttggtggaaaccataatggacgttaccttagtgaccttcaggctttggatctgaagagtttgacctggtccaaggttgatgccaaattgcaagcagaacctgctgattccactaaaacaacacaaattgctccatgtgctggtcattctttgatttcatggggcaacaaatttttatctattgctgggcatacaaaagatccatctgaaggcgttacagtgaaggaatttgatccacatacttgtacttggtcgattgtcaggacttatgggaaaccaccggtttctcgtggaggtcaaacagtgactcttgttggaacgacgctagttttgtttggtggtgaagatgcagaacggtgtctcttgaatgacttgcacatccttgatcttgaaaccatgacatgggatgatgtggatgcaatatggaatggtcaagacccaaacaacaaggcccgactccaagtccaagagctggccatgcaggtggaactgtcggcgagaactggtacatagttgggggtggcaataataaaagtggtgtttctgaaacacttgtgcttaacatgtcaactctgacgtggtcggttgttagcactgtggaaggacgagtcccccttgctagtgagggcatgactttagtgcatagcaattatggtggttatgattatctcatctcttttggaggatacaatggacgatacaacaatgaggtttacactcttaaacttagcctcaaatcagattcacagtcaactttaaaagaagaaactctctcagatactacatctagggtcatagaacctgaggctgaaatttatcaagatgggaagatacgggagatttctgtggacaacgctgattcagacctgaataacagaaatgatgaagcaagtgaacagcttttagcagatcttaaagctcagaaagaggaactagaagcaacacttagcagggaacagctgcaaactgtgcaacttaaagaagacattgcccgagcagagactagaaatgcagagctgacaaaggaacttcaagctgtccgtggccaacttgcttctgagcagtcaagatgtttcaaacttgaggttgatgttgcggaacttcgacaaaagcttcagagtatggatgcattggaaaaggaggtcgagctgcttcggcgacagagagccgcttcggagcaagcagcaatggacgctaagcagaggcaaagttcgggtggcatgtggggttggctcgctggaagcccgacaccagcagtttagttccgtgattcatatattttacttgtaacattatatatcattgactgacaccctctacaatttttttatttggttacttacgcattcgtgttcattttggaccacacaaagaataaggtgttctagcgatcgttatactcacaattactcaaaatgtattctttaggtttagcaagggggtgttcatgttagtcgatgtgctggttatccttttgacgctgtgctggttgtccatagattgttcgcttcacaaggggatgttcatgttagtcgatgactttttcgtgaaactgcagtttgatatatgaagtgcaagtatcgtgaacatactgacgtcgtcagcttcgaaattagacattgtgtgattgacattgttcgatgatttcatcttattagggccctacgggcaaatgaaaatgcaaagagtacacaactataacggcaacatatttcttctatgggatcttcttcaggaactcatccagaaccccaaacagatcagcatccagtccgtaatctgcagcttggacaattccaatgcccggttggccttaatactggcggacaacacataataatttattaaatgggagaagcaacctgaaatatgggggcatcggcatctttattaacagccacaataacctttgagtctctcgttcctgccaagtgctgtatcgctccagatactccaaaagccatataaagctccggcgccacaattttccctgtctgaccaacc

SEQ ID NO: 215009 - DNA, 1737 bp, Zea Mays
gaaaaaaacgtgagggcacaagcacatgaggcacccctccttctccaaggtcagaccatgctgctgcttgccatgctgaccgctatcttttaatttttggtggggggtctcatgcaacatgtttcaatgacctacatgtccttgatttgcagacgatggaatggtcaagacccaaacaacaaggcccgactccaagtccaagagctggccatgcaggtggaactgtcggcgagaactggtacatagttgggggtggcaataataaaagtggtgtttctgaaacacttgtgcttaacatgtcaactctgacgtggtcggttgttagcactgtggaaggacgagtcccccttgctagtgagggcatgactttagtgcatagcaattatggtggttatgattatctcatctcttttggaggatacaatggacgatacaacaatgaggtttacactcttaaacttagcctcaaatcagattcacagtcaactttaaaagaagaaactctctcagatactacatctagggtcatagaacctgaggctgaaatttatcaagatgggaagatacgggagatttctgtggacaacgctgattcagacctgaataacagaaatgatgaagcaagtgaacagcttttagcagatcttaaagctcagaaagaggaactagaagcaacacttagcagggaacagctgcaaactgtgcaacttaaagaagacattgcccgagcagagactagaaatgcagagctgacaaaggaacttcaagctgtccgtggccaacttgcttctgagcagtcaagatgtttcaaacttgaggttgatgttgcggaacttcgacaaaagcttcagagtatggatgcattggaaaaggaggtcgagctgcttcggcgacagagagccgcttcggagcaagcagcaatggacgctaagcagaggcaaagttcgggtggcatgtggggttggctcgctggaagcccgacaccagcagtttagttccgtgattcatatattttacttgtaacattatatatcattgactgacaccctctacaatttttttatttggttacttacgcattcgtgttcattttggaccacacaaagaataaggtgttctagcgatcgttatactcacaattactcaaaatgtattctttaggtttagcaagggggtgttcatgttagtcgatgtgctggttatccttttgacgctgtgctggttgtccatagattgttcgcttcacaaggggatgttcatgttagtcgatgactttttcgtgaaactgcagtttgatatatgaagtgcaagtatcgtgaacatactgacgtcgtcagcttcgaaattagacattgtgtgattgacattgttcgatgatttcatcttattagggccctacgggcaaatgaaaatgcaaagagtacacaactataacggcaacatatttcttctatgggatcttcttcaggaactcatccagaaccccaaacagatcagcatccagtccgtaatctgcagcttggacaattccaatgcccggttggccttaatactggcggacaacacataataatttattaaatgggagaagcaacctgaaatatgggggcatcggcatctttattaacagccacaataacctttgagtctctcgttcctgccaagtgctgtatcgctccagatactccaaaagccatataaagctccggcgccacaattttccctgtctgaccaacc

SEQ ID NO: 215010 - DNA, 4153 bp, Zea Mays
cgcacgctgcctgtactactactcgtctgtctagtccctccgcagtccgcccacgccccccgtctccctccttcccattccccgcaaaccaagcgacgacgcggcccacgccatgagctgatgaacattgggccagtcgctgctccagtcctctgctcttccttccgcccacgccagcgccaacgccagcgcctcggggccgtgcgggggctagggtttggattcgtgggtggagtccgaggctagatccagcaggaggaggggaggggaggggaagggttgtgggtccagccggcggggatggccgccaccgccggggcgtcggacgacggcggtagcgtgggcggcggcgggggcggcgagcggatgaagctgctgtgcagcctgggcgggcgcatcctcccgcgcccgggggacggcacgctgcggtatgcaggcggggacacccggatcgtgtccgtgccgcgcggggtatcgctgccggacctcctcgggcggctcgccgacgcgtacggcggcgccactggcccgcacttcgccgtcaagtaccagctccctgacgaagggctcgacgcgctcatctccgtgtcctcgccggaggatctcgacaacatggtcgaggagtacgacaagctcagcggcgccagcccgaagctgagggtgttcatcttccccatcctggatgcggcgggcggcagcggcgccgcaggcggggaggacttggagaccgggaactttgactcgggccttcggtatctggaggccgtgaacggcattgtgcgcaaggacagcatcgcgagcctctcctccacgcagtgctctgacggggggctcccccctccggcgccatcaggtggcggcggccctggatctccagctgcgctctcccccacatccactagctcaaatgatgctgcgagatcgaacatcactggagccggggcggcgcctccgccccttgttgacgtcttcagtaatgctgctcctgctcctgtacatgtgaagccacaggagattggtgctgaagggagggctccccaggcgaatccacatccacatccagaggcagctacaaacacccatccggaggcagcgaggtacaggcaaccactatcgcagctgccaccactgcctcctgtgttcatgaacgatcacagagatgccattcagggtctgaatcagcagctgccaggtaacggagcaagattcgacgactgccacatgtgcttgaaggcattgcctcacgcccactctgatccagtggtcaatgagtatggcaatgaggtgcatggaggggctgctccagagcctgggcctgtgtttatgagcctgcggcctgaagatgtggcaaggatgatgataccggagaggggtgttcagccacccatgggggcttacggatatacgcatatgcatccagtgcctcaggagaggatgtatgtgcccaagatggaaggggttacaaactcagtattcattgatccaactggcttgcatcagcatgtgtatgtgcagcagcagcagcagcagcagcaaatgccgccacaacagttgccatctacctatgggtttagccatattcctgtgatttctagcgagaaggacagagtagtttctccaagttctgcccacaatgatgttgcaaactctcatcatcaatttatgcagcagtcgcagcagcagttaccttctggccatgggatgcctcagtatccagtgaagcctactagtcccagtaacccgcttgctggtgaaggtagtgtaagtggcaattcaaggcataatgaggatggacaggtgtatcgtgacaatatgcctccggttgcacctgtggctgtgccaacatacatggcaaatgtggacaggatgatggattcactccgtatgagccccagcgaagtttctggctctactgaacaaaggaaacatgcaatgtctcctgacagtggcttaccccagaatgcagtgccagattactctcaggggcatccagagaatagtatcagtacctggccagatacacgagcaaatgatgttcatccaagcaacaccaatactttttttgatgttagtgaaccaaaggtattgcttcaaactgaatctgcgccaccaccttctgttgccagctcttatctgcataatgtccagcatgttaatatgagtcatatgccacatatggtgagcattgggggaccctattctagctatgttgttgctacagtcggacctggtggattgcctcaatcaacttatggtattgatatgatctatccaaatgccactgttaatccagtgactgagagaagagatgtcccgcctgaagtttatcacaaggaagctccacatgaagtcgtagctcctccaaacacagttcagttgccgacagcagcattggcaaaccatgctacaaatgtggatcaagcagctgcacatgcactgccaccaagacctaagagggtagcaagcagagagaacatcagcccaaaggatccgcacccacacaactctttgttgaactgcaaagggccagatctgaatattccagctgaggatgtttctctccagaaacagtcagatcacaaaggtgatgacatctctaacccagatttactgagtatggatgatgggttagctacatctaaagctcagtcatctgagcctcaacctcctctggtaaatgaaggagttggggcaattaccaataaagtagaaggtgaagtccaccccaacgaggtttccaagagcaggccagcagattggatttcaggatttccagcttcagatggacgtctgcagattataaagaacaatgaccttgaagagctccaagagcttggttctggaacttttggaactgtctatcatgcggtatgacttctggaatgaagcatctaaacttgctgatctgcaccacccaaatgttgtcgcgttttatggtgttgttcttgatggacctgggggatccattgccacagttacagaatatatggtcaatggttcacttaggacagctttgctaaagaatgccaaaaccctcgatcgacgcaagagattaattattgccatggatacagcctttggaatggaatacttgcatagcaaaaacattgtgcactttgacttgaaaagtgacaatttgcttgttaatttaagggaccctcagcgtccaatatgcaaggttggtgatcttgggctttcaaaagtgaagtgtcagaccctcatctctggaggtgtccgaggaacacttccatggatggccccagaacttctgaatggtagcagcagcttggtctcagaaaaggttgatgtattctcttttgggattgttctctgggaactgctaacaggagaagagccatatgcagatttacattatggtgttataataggtggcattgtgagcaacactctacggccgccagtgcccgactcctgcgaccccgagtggaggtcactgatggagcaatgctggtcaacagaaccatctgagcggccaaacttcacagaggttgtgaataggctgcgctccatggcggcatcccagaaggtacaacaacactaagggaccatcggcacgcagaagttgtaccagggcagcagtcagtcaaacttgcaggttacatccatgggccgccaattcacgccatccgccatatatgcctaggatctgttcataacccttcatttgttcgtatattgtaatcaaaagttacccgccgtgtgtctacaacgtgtcgtcgcaatggacgcagcaggtgcctgcctattcattcattcataccgttttggtcgtcgagaggtgcgttcaataagttactagtccagtgtccgttataggggagtccggtagtgtccgttataggggagtccggtattattattattattgtttcatcttcttcttcgccctttctctgggtaataattgggttacttggaaactgttgatcagtgggtcagttagaatgtgaactggttgttgctgggtaagtatgtggtttgttggtatattgagtctggggacagagagtgaggtcctgatctgcttgtaacagtacctgctttggttttgtgattgctatatactgaaacccaaatccctctgttgctattctaaattctgagttgtttggtgcatgtcgtggtgggagca

SEQ ID NO: 215011 - DNA, 4238 bp, Zea Mays
ttttgagtaatccgacgcgagcacgcacgctgcctgtactactactcgtctgtctagtccctccgcagtccgcccacgccccccgtctccctccttcccattccccgcaaaccaagcgacgacgcggcccacgccatgagctgatgaacattgggccagtcgctgctccagtcctctgctcttccttccgcccacgccagcgccaacgccagcgcctcggggccgtgcgggggctagggtttggattcgtgggtggagtccgaggctagatccagcaggaggaggggaggggaggggaagggttgtgggtccagccggcggggatggccgccaccgccggggcgtcggacgacggcggtagcgtgggcggcggcgggggcggcgagcggatgaagctgctgtgcagcctgggcgggcgcatcctcccgcgcccgggggacggcacgctgcggtatgcaggcggggacacccggatcgtgtccgtgccgcgcggggtatcgctgccggacctcctcgggcggctcgccgacgcgtacggcggcgccactggcccgcacttcgccgtcaagtaccagctccctgacgaagggctcgacgcgctcatctccgtgtcctcgccggaggatctcgacaacatggtcgaggagtacgacaagctcagcggcgccagcccgaagctgagggtgttcatcttccccatcctggatgcggcgggcggcagcggcgccgcaggcggggaggacttggagaccgggaactttgactcgggccttcggtatctggaggccgtgaacggcattgtgcgcaaggacagcatcgcgagcctctcctccacgcagtgctctgacggggggctcccccctccggcgccatcaggtggcggcggccctggatctccagctgcgctctcccccacatccactagctcaaatgatgctgcgagatcgaacatcactggagccggggcggcgcctccgccccttgttgacgtcttcagtaatgctgctcctgctcctgtacatgtgaagccacaggagattggtgctgaagggagggctccccaggcgaatccacatccacatccagaggcagctacaaacacccatccggaggcagcgaggtacaggcaaccactatcgcagctgccaccactgcctcctgtgttcatgaacgatcacagagatgccattcagggtctgaatcagcagctgccaggtaacggagcaagattcgacgactgccacatgtgcttgaaggcattgcctcacgcccactctgatccagtggtcaatgagtatggcaatgaggtgcatggaggggctgctccagagcctgggcctgtgtttatgagcctgcggcctgaagatgtggcaaggatgatgataccggagaggggtgttcagccacccatgggggcttacggatatacgcatatgcatccagtgcctcaggagaggatgtatgtgcccaagatggaaggggttacaaactcagtattcattgatccaactggcttgcatcagcatgtgtatgtgcagcagcagcagcagcagcagcaaatgccgccacaacagttgccatctacctatgggtttagccatattcctgtgatttctagcgagaaggacagagtagtttctccaagttctgcccacaatgatgttgcaaactctcatcatcaatttatgcagcagtcgcagcagcagttaccttctggccatgggatgcctcagtatccagtgaagcctactagtcccagtaacccgcttgctggtgaaggtagtgtaagtggcaattcaaggcataatgaggatggacaggtgtatcgtgacaatatgcctccggttgcacctgtggctgtgccaacatacatggcaaatgtggacaggatgatggattcactccgtatgagccccagcgaagtttctggctctactgaacaaaggaaacatgcaatgtctcctgacagtggcttaccccagaatgcagtgccagattactctcaggggcatccagagaatagtatcagtacctggccagatacacgagcaaatgatgttcatccaagcaacaccaatactttttttgatgttagtgaaccaaaggtattgcttcaaactgaatctgcgccaccaccttctgttgccagctcttatctgcataatgtccagcatgttaatatgagtcatatgccacatatggtgagcattgggggaccctattctagctatgttgttgctacagtcggacctggtggattgcctcaatcaacttatggtattgatatgatctatccaaatgccactgttaatccagtgactgagagaagagatgtcccgcctgaagtttatcacaaggaagctccacatgaagtcgtagctcctccaaacacagttcagttgccgacagcagcattggcaaaccatgctacaaatgtggatcaagcagctgcacatgcactgccaccaagacctaagagggtagcaagcagagagaacatcagcccaaaggatccgcacccacacaactctttgttgaactgcaaagggccagatctgaatattccagctgaggatgtttctctccagaaacagtcagatcacaaagatttactgagtatggatgatgggttagctacatctaaagctcagtcatctgagcctcaacctcctctggtaaatgaaggagttggggcaattaccaataaagtagaaggtgaagtccaccccaacgaggtttccaagagcaggccagcagattggatttcaggatttccagcttcagatggacgtctgcagattataaagaacaatgaccttgaagagctccaagagcttggttctggaacttttggaactgtctatcatggtaaatggagaggcactgatgttgcaataaaaagaatcaatgatagatgttttgctgggaaaccatctgagcaagaaaagatgcggtatgacttctggaatgaagcatctaaacttgctgatctgcaccacccaaatgttgtcgcgttttatggtgttgttcttgatggacctgggggatccattgccacagttacagaatatatggtcaatggttcacttaggacagctttgctaaagaatgccaaaaccctcgatcgacgcaagagattaattattgccatggatacagcctttggaatggaatacttgcatagcaaaaacattgtgcactttgacttgaaaagtgacaatttgcttgttaatttaagggaccctcagcgtccaatatgcaaggttggtgatcttgggctttcaaaagtgaagtgtcagaccctcatctctggaggtgtccgaggaacacttccatggatggccccagaacttctgaatggtagcagcagcttggtctcagaaaaggttgatgtattctcttttgggattgttctctgggaactgctaacaggagaagagccatatgcagatttacattatggtgttataataggtggcattgtgagcaacactctacggccgccagtgcccgactcctgcgaccccgagtggaggtcactgatggagcaatgctggtcaacagaaccatctgagcggccaaacttcacagaggttgtgaataggctgcgctccatggcggcatcccagaaggtacaacaacactaagggaccatcggcacgcagaagttgtaccagggcagcagtcagtcaaacttgcaggttacatccatgggccgccaattcacgccatccgccatatatgcctaggatctgttcataacccttcatttgttcgtatattgtaatcaaaagttacccgccgtgtgtctacaacgtgtcgtcgcaatggacgcagcaggtgcctgcctattcattcattcataccgttttggtcgtcgagaggtgcgttcaataagttactagtccagtgtccgttataggggagtccggtagtgtccgttataggggagtccggtattattattattattgtttcatcttcttcttcgccctttctctgggtaataattgggttacttggaaactgttgatcagtgggtcagttagaatgtgaactggttgttgctgggtaagtatgtggtttgttggtatattgagtctggggacagagagtgaggtcctgatctgcttgtaacagtacctgctttggttttgtgattgctatatactgaaacccaaatccctctgttgctattctaaattctgagttgtttggtgcatgtcgtggtgggagca

SEQ ID NO: 215012 - DNA, 761 bp, Zea Mays
ggagcagcccacaggccacaacgattctcgtcggtcgtttctgtgccctatccgtcgtcggctatcgcaacagcagcgcctcttccctgtcgccctgactcctccctagcagcagaaaaccggcggcaagtcttcggtggcggcgaggccaaggctttgcctgagagaatgcaagacccaagggatgatgatttcttggcgccaaagttgcataagaagaaggttgtctaccggccgcagccatcaggccatctgaagggtgaacctgaactgttgcggagagagtttccgcaatcatcaggcatggtccaaaagccacccaaaagaagcttgaagggtgagcctcgcacgcccccttccgacagggggaccccggattccctgccggaatctggtcctaccgacgaataccgtgcgttaaggaggaagtacctgatgctggaggaagagaactttgcactggacaaagaactgagcatggaagatgaagaaatgaaggccctagaggatgaaaagcttgcactgcttgatcagcttgttgtcttggaaggccttgtcgagccatcccagttgcagtctcaacctaggccgtaagggttgacaacttcttagtccgtttgtgtaaagtaagaagaatttagttgcgaaggtagttctgtgcagatgaagccttgttgcggcttacctgatgttgagctcatgatgtgaaacaggaacgatacacttgtcttcatacttcttggatggtactacgaggaaat

SEQ ID NO: 215013 - DNA, 6321 bp, Zea Mays
aaaccacgcgccgcggcggcggcagcgccagtgagataatagacacaggagtgctggaagcatttcaccctgcctccgcgaatcaacaccccaccggccaccctctcgactcgcttcaggggccaagccagtgtcgcttttgaatccgcctccgttcggttttccccaaaacgccttccttccactactgcttggcatccttggattcgtaggcagtcagatcacgcggcgcgcctcccctggtgactgacctagggctcgccgcgagcgcgcggcgatggcgtcgtccacgtccaggcgccggaggggtgggggcctcgagcgggtggcggacaactgggagcgcctcgtgcgggccgcgctcaagcgggaccgggaccacctccgcgtggggggagccccggctgccgtgggagggcagaggcttgccgacgccgtgccggcctcgctgggtcggaccaccaacatagagcagatcctgcaggccgccgacgacatcgaggtcgaggaccccaacgtcgcgcggatcctttgtgaacaagcgtacacgatggcccagaatctggatcccagcagtgaaggtagaggggttcttcagttcaagacaggtttggcatctgtaattaagcaaaaacttgctaagaaggatggggctccgatagaccgacagaatgacgttcaagtcctgtggaacttttatcttgaatacaagagtcgttgtcgggttgatgatatgcaacgtgagcaggagagactgagagagtcaggaacctttagtacagagatgggaaatagggcaatgaaaatgaagaaagtttttgctacattgagggctttgcttgatgttctggaaaatcttgttggtcagtcaccaactgatagacttcatagacaaattctggaggagataaagagaataaaaagatctgatgcagccttgagaggtgaacttatgccatacaacattgtaccccttgatacatcatcgtcagtggcaaatatttttgggtttttccctgaggtcattgctgcaacagcagcaattcagaactgtgaggacctgccacgattcccttttgatacaccccagctaagacaaaaagacattttcgaccttttgcaatatgtttttggcttccaggaagataatattcggaaccagcgtgaaaatgttgtacttatgttagccaatgctcagtcccggttaagcctgcaaattgggtcagaacccaaaattgatgagatggctgttactgatgttttttgcaaagtcctggacaactacataaaatggtgtaggtacttgggcaggcgtgttgcatggaccagccttgaagcagtaaataagaaccggaaaatcatattggttgccctctactttctgatttggggtgaagcagcgaatattcgttttctcccagaatgcatatgctatattttccacaatatggcaaaggaactcgatgggattcttgattcatctgttgctgagactgcaaagagttgcactactgagggttccacttcatttcttgagaaaataattacaccaatttatgataccatggcagcggaggctgaaaataataaagatggaaaagctgcacattctgcttggaggaattatgatgacttcaatgaatatttctggtcacgctcatgctttgagcttggttggccacctgcagagggttccaaatttttgcgcaagcctgctaagaggaaacgtacaggaaagaccaattttgttgaacatcgcacttttctgcatttgtaccgcagtttccaccgcttgtggatttttctgctattaatgttccagctcttagctattattgcctttcaccatgggaagatggacattgacaccattagaatactacttagcgctgggccagccttttttgtactaaacttcattgaatgctgcttggatgtcatactcatgtttggtgcatataagacggcaagaggttttgctatctcaagattagttattcgatttctttggttaactgcagtttcaacatttgtaacctatctctatgtgaaagtcctggaagagagagacacaaggaattcagattcgacttatttccgaatttatggtcttgttcttggtggttatgctgctgttcgaatcatgtttgcactgatggctaagatcccagcttgtcataggctctcaagtttttctgatcggtctcagtttttccaatttttcaagtggatataccaggagcgatattatgttgggcggggactttatgagagtattagtgattatgccagatacgtgatattttgggtcgtcatactggcatgcaaatttacttttgcatattttctccagattaggcctttagttgaaccaaccaatattattgtgcaactccatgatttgaagtattcctggcatgatcttgtatcaagggggaataaaaatgctttgaccattctgagcctatgggcaccagtcttagctatatacctgatggacatccacatttggtacactcttttatcagcacttgttggtggcgttatgggtgccagagatcgccttggagagattcggtcaattgaaatgcttcataaacgttttgagagctttccagaagcgtttgctaaaaacctttccgcttcaaggatacctagcagacgcattgatcgtgtaaatgaatcagaaattacaactaagacgtatgcctcaatattttccccattttggaatgaaattatcaagagcttgcgtgaagaggactatatcagcaacagggaaatggatctgcttatgatgccaagtaactgtggaaatttaatgcttgtacagtggccactgtttctattgactagcaagatcatgttggcaaatgactatgcttctgactgtaaagactcgcagtatgagctatgggatagaatatcaaaagatgaatacatggcttatgccgtcaaagaatgttactacagcactgaaaaaattcttcactctttagttgatgctgaagggcagcactgggttgtaaggcttttccgagatcttaatgacagtatagcacagggttcacttttagtgactataaatctgaagaagttgcagttagtccagtctagattgacgggcttgaccggtcttctgatacgcgatgagactgctggccgtgcagctggtgttactaaagctcttcttgagctttatgaggttgttacccatgaatttctttcacagaatctgagggaacagtttgacacgtggcaactgttgttaagagccagaaatgatggacgcctattctctaagattttgtggccaaaggatccagaaatgaaagagcaacttaagcgattacacttacttcttactgtcaaggacagtgccaccaacataccaaaaaatcttgaagctcggagaagattacaatttttcactaattctctattcatggacattccacaagcaaagcctgtatctgagatgatcccttttagtgtctttaccccatactacagtgaaacagttctttatagcatgtctgagctttgtgttgagaatgaagatggcatttctatacttttctaccttcagaaaatataccctgatgagtgggctaacttcttagaacgaattggctgtggtgaatcatcagaagatgattttaaagaaagtccaagtgacaccatggaactccggttttgggtatcttatcgtggccaaactttggccaggacagtgcgtggaatgatgtactatagaagagctttgatgttacaaagttacctggagaggagatgccttgggggtattgaagatggaaattctgcagcagaatatattgacactcaaggctatgagttatctcctgatgcacgggcccaagcagatataaaatttacttatgttgtttcttgccaaatatatggactacagaagcaaacaaaaaaacaagaggctgcagatattgctctcctactgcaaagaaatgaggctcttcgggttgctttcatacacgaagaggaaatcatatcaagggatggtaaggctacaacaagagagtattattccaagcttgtgaaggctgatgttcatggcaaagaccaagaaatatactgcattaaattgcctgggaaccccaagcttggtgaaggcaaacctgagaaccaaaaccatgccataatcttcactcgaggagatgcagttcagacgatcgatatgaatcaggataactacttggaggaagcaatgaaaatgagaaatttacttgaagaatttcataatgctcatggaaaacatggcatacggaagcccacaatcctaggtgtgagggagcatgtattcacggggagtgtctcttcgctggcgtcatttatgtcgaaacaggagactagttttgttactttggggcaacgtgttcttgcttacctcaaagttcgaatgcactatggacatcctgatgtttttgatcggatatttcacataacccgaggtggcattagcaaggcgtctcgagtgattaatataagcgaagatatatatgccgggttcaattcgactttgcgccaagggaacatcacacaccatgaatatatccaggtggggaaagggcgtgatgttggcttgaaccaaattgcactatttgaggggaaagttgctggaggcaatggtgagcaagttctcagccgagatgtgtaccgtctgggccagttatttgatttcttcaggatgctaaccttctttttcaccactgttggttattatgtctgcacgatgatgactgttctaactgtgtatatcttcttgtatggaagggtttatctggcactctctggccttgactactcaatatctcgccaagctaggtttttggggaacactgcactagatgcagctttgaatgctcaatttttggtccagattggtatttttacagcagtgccgatgataatgggtttcattctggagctggggctgatgaaggctgtttttagttttattacaatgcagctccagttctgttcggtgtttttcaccttttcgcttggaacaaggacacattactttggtagaacaatccttcatggcggtgcaaagtatcgtgctactggaagaggttttgttgttcggcacataaagtttgctgaaaattataggctctattctcgaagtcactttgtcaaagcgcttgaggttgctctcctcctgatcgtttacattgcatatggatacacaaaaggcggttcatcttcatttattctgattactatcagtagttggttcctcgttatgtcctggcttttcgcgccttacattttcaacccttctggtttcgagtggcaaaagactgttgaggactttgatgactggacaaactggttactttataaaggtggagttggtgtaaagggcgacaacagttgggaatcttggtgggatgaggagcaggcgcatatccagacattcagaggacgtattcttgagacaatcctcagccttagatttctcatgtttcagtatggcattgtgtacaagcttaaaattacagatcataatacttctcttgcagtttacggcttctcatggattgtactctttgttatggttcttcttttcaagctttttactgcaactcctaggaagtcgacagccttgccgacttttgttaggtttctgcagggcgtccttgctattgggataattgcaggaattgcccttcttatcgtgctcacatcattcactgttgctgatttatttgcaagtgcacttgcttttatagcaaccggctgctggccgtaacatggaagagggtagtgaaagtccttgggctatgggattcagtccgtgagattgcaaggatgtacgatgcaggaatgggagccatcatctttgtgcccatcgtcgtcttctcatggttccccttcgtgtcaacattccagtcacgtttcctcttcaatcaagcgtttagtcgaggtctggagatctccctcatccttgcagggaacaaggcgaatcagcagatttgaaaggccctgccgcatccatcgtatttttctgttgtatattctgggaattactgagagctgcttagttagtttgaacaatttaatgagctcgatttgaatgacaaccttctacataattgcccctgtaatttgtacactaattatgcggagaggcagctacggcagtagagatgagctgatgtatgtcgatttgatcttaaccaaacctctctttaaggctacgacggttcagtaggcctgcactagtatgttgcacccatccacagatataaaaagaaaaatattcttaatataaaataa

SEQ ID NO: 215014 - DNA, 6291 bp, Zea Mays
caggagtgctggaagcatttcaccctgcctccgcgaatcaacaccccaccggccaccctctcgactcgcttcaggggccaagccagtgtcgcttttgaatccgcctccgttcggttttccccaaaacgccttccttccactactgcttggcatccttggattcgtaggcagtcagatcacgcggcgcgcctcccctggtgactgacctagggctcgccgcgagcgcgcggcgatggcgtcgtccacgtccaggcgccggaggggtgggggcctcgagcgggtggcggacaactgggagcgcctcgtgcgggccgcgctcaagcgggaccgggaccacctccgcgtggggggagccccggctgccgtgggagggcagaggcttgccgacgccgtgccggcctcgctgggtcggaccaccaacatagagcagatcctgcaggccgccgacgacatcgaggtcgaggaccccaacgtcgcgcggatcctttgtgaacaagcgtacacgatggcccagaatctggatcccagcagtgaaggtagaggggttcttcagttcaagacaggtttggcatctgtaattaagcaaaaacttgctaagaaggatggggctccgatagaccgacagaatgacgttcaagtcctgtggaacttttatcttgaatacaagagtcgttgtcgggttgatgatatgcaacgtgagcaggagagactgagagagtcaggaacctttagtacagagatgggaaatagggcaatgaaaatgaagaaagtttttgctacattgagggctttgcttgatgttctggaaaatcttgttggtcagtcaccaactgatagacttcatagacaaattctggaggagataaagagaataaaaagatctgatgcagccttgagaggtgaacttatgccatacaacattgtaccccttgatacatcatcgtcagtggcaaatatttttgggtttttccctgaggtcattgctgcaacagcagcaattcagaactgtgaggacctgccacgattcccttttgatacaccccagctaagacaaaaagacattttcgaccttttgcaatatgtttttggcttccaggaagataatattcggaaccagcgtgaaaatgttgtacttatgttagccaatgctcagtcccggttaagcctgcaaattgggtcagaacccaaaattgatgagatggctgttactgatgttttttgcaaagtcctggacaactacataaaatggtgtaggtacttgggcaggcgtgttgcatggaccagccttgaagcagtaaataagaaccggaaaatcatattggttgccctctactttctgatttggggtgaagcagcgaatattcgttttctcccagaatgcatatgctatattttccacaatatggcaaaggaactcgatgggattcttgattcatctgttgctgagactgcaaagagttgcactactgagggttccacttcatttcttgagaaaataattacaccaatttatgataccatggcagcggaggctgaaaataataaagatggaaaagctgcacattctgcttggaggaattatgatgacttcaatgaatatttctggtcacgctcatgctttgagcttggttggccacctgcagagggttccaaatttttgcgcaagcctgctaagaggaaacgtacaggaaagaccaattttgttgaacatcgcacttttctgcatttgtaccgcagtttccaccgcttgtggatttttctgctattaatgttccagctcttagctattattgcctttcaccatgggaagatggacattgacaccattagaatactacttagcgctgggccagccttttttgtactaaacttcattgaatgctgcttggatgtcatactcatgtttggtgcatataagacggcaagaggttttgctatctcaagattagttattcgatttctttggttaactgcagtttcaacatttgtaacctatctctatgtgaaagtcctggaagagagagacacaaggaattcagattcgacttatttccgaatttatggtcttgttcttggtggttatgctgctgttcgaatcatgtttgcactgatggctaagatcccagcttgtcataggctctcaagtttttctgatcggtctcagtttttccaatttttcaagtggatataccaggagcgatattatgttgggcggggactttatgagagtattagtgattatgccagatacgtgatattttgggtcgtcatactggcatgcaaatttacttttgcatattttctccagattaggcctttagttgaaccaaccaatattattgtgcaactccatgatttgaagtattcctggcatgatcttgtatcaagggggaataaaaatgctttgaccattctgagcctatgggcaccagtcttagctatatacctgatggacatccacatttggtacactcttttatcagcacttgttggtggcgttatgggtgccagagatcgccttggagagattcggtcaattgaaatgcttcataaacgttttgagagctttccagaagcgtttgctaaaaacctttccgcttcaagaggatacctagcagacgcattgatcgtgtaaatgaatcagaaattacaactaagacgtatgcctcaatattttccccattttggaatgaaattatcaagagcttgcgtgaagaggactatatcagcaacagggaaatggatctgcttatgatgccaagtaactgtggaaatttaatgcttgtacagtggccactgtttctattgactagcaagatcatgttggcaaatgactatgcttctgactgtaaagactcgcagtatgagctatgggatagaatatcaaaagatgaatacatggcttatgccgtcaaagaatgttactacagcactgaaaaaattcttcactctttagttgatgctgaagggcagcactgggttgtaaggcttttccgagatcttaatgacagtatagcacagggttcacttttagtgactataaatctgaagaagttgcagttagtccagtctagattgacgggcttgaccggtcttctgatacgcgatgagactgctggccgtgcagctggtgttactaaagctcttcttgagctttatgaggttgttacccatgaatttctttcacagaatctgagggaacagtttgacacgtggcaactgttgttaagagccagaaatgatggacgcctattctctaagattttgtggccaaaggatccagaaatgaaagagcaacttaagcgattacacttacttcttactgtcaaggacagtgccaccaacataccaaaaaatcttgaagctcggagaagattacaatttttcactaattctctattcatggacattccacaagcaaagcctgtatctgagatgatcccttttagtgtctttaccccatactacagtgaaacagttctttatagcatgtctgagctttgtgttgagaatgaagatggcatttctatacttttctaccttcagaaaatataccctgatgagtgggctaacttcttagaacgaattggctgtggtgaatcatcagaagatgattttaaagaaagtccaagtgacaccatggaactccggttttgggtatcttatcgtggccaaactttggccaggacagtgcgtggaatgatgtactatagaagagctttgatgttacaaagttacctggagaggagatgccttgggggtattgaagatggaaattctgcagcagaatatattgacactcaaggctatgagttatctcctgatgcacgggcccaagcagatataaaatttacttatgttgtttcttgccaaatatatggactacagaagcaaacaaaaaaacaagaggctgcagatattgctctcctactgcaaagaaatgaggctcttcgggttgctttcatacacgaagaggaaatcatatcaagggatggtaaggctacaacaagagagtattattccaagcttgtgaaggctgatgttcatggcaaagaccaagaaatatactgcattaaattgcctgggaaccccaagcttggtgaaggcaaacctgagaaccaaaaccatgccataatcttcactcgaggagatgcagttcagacgatcgatatgaatcaggataactacttggaggaagcaatgaaaatgagaaatttacttgaagaatttcataatgctcatggaaaacatggcatacggaagcccacaatcctaggtgtgagggagcatgtattcacggggagtgtctcttcgctggcgtcatttatgtcgaaacaggagactagttttgttactttggggcaacgtgttcttgcttacctcaaagttcgaatgcactatggacatcctgatgtttttgatcggatatttcacataacccgaggtggcattagcaaggcgtctcgagtgattaatataagcgaagatatatatgccgggttcaattcgactttgcgccaagggaacatcacacaccatgaatatatccaggtggggaaagggcgtgatgttggcttgaaccaaattgcactatttgaggggaaagttgctggaggcaatggtgagcaagttctcagccgagatgtgtaccgtctgggccagttatttgatttcttcaggatgctaaccttctttttcaccactgttggttattatgtctgcacgatgatgactgttctaactgtgtatatcttcttgtatggaagggtttatctggcactctctggccttgactactcaatatctcgccaagctaggtttttggggaacactgcactagatgcagctttgaatgctcaatttttggtccagattggtatttttacagcagtgccgatgataatgggtttcattctggagctggggctgatgaaggctgtttttagttttattacaatgcagctccagttctgttcggtgtttttcaccttttcgcttggaacaaggacacattactttggtagaacaatccttcatggcggtgcaaagtatcgtgctactggaagaggttttgttgttcggcacataaagtttgctgaaaattataggctctattctcgaagtcactttgtcaaagcgcttgaggttgctctcctcctgatcgtttacattgcatatggatacacaaaaggcggttcatcttcatttattctgattactatcagtagttggttcctcgttatgtcctggcttttcgcgccttacattttcaacccttctggtttcgagtggcaaaagactgttgaggactttgatgactggacaaactggttactttataaaggtggagttggtgtaaagggcgacaacagttgggaatcttggtgggatgaggagcaggcgcatatccagacattcagaggacgtattcttgagacaatcctcagccttagatttctcatgtttcagtatggcattgtgtacaagcttaaaattacagatcataatacttctcttgcagtttacggcttctcatggattgtactctttgttatggttcttcttttcaagctttttactgcaactcctaggaagtcgacagccttgccgacttttgttaggtttctgcagggcgtccttgctattgggataattgcaggaattgcccttcttatcgtgctcacatcattcactgttgctgatttatttgcaagtgcacttgcttttatagcaaccggctggtgtgtcttgtgtctggccgtaacatggaagagggtagtgaaagtccttgggctatgggattcagtccgtgagattgcaaggatgtacgatgcaggaatgggagccatcatctttgtgcccatcgtcgtcttctcatggttccccttcgtgtcaacattccagtcacgtttcctcttcaatcaagcgtttagtcgaggtctggagatctccctcatccttgcagggaacaaggcgaatcagcagatttgaaaggccctgccgcatccatcgtatttttctgttgtatattctgggaattactgagagctgcttagttagtttgaacaatttaatgagctcgatttgaatgacaaccttctacataattgcccctgtaatttgtacactaattatgcggagaggcagctacggcagtagagatgagctgatgtatgtcgatttgatcttaaccaaacctctctttaaggctacgacggttcagtaggcctgcactagtatgttgcacccatccacagatataaaaagaaaaatattcttaatataaaataa

SEQ ID NO: 215015 - DNA, 3716 bp, Zea Mays
gtcaatctgaatttttatgactcatgattaattgcatataagaggatacctagcagacgcattgatcgtgtaaatgaatcagaaattacaactaagacgtatgcctcaatattttccccattttggaatgaaattatcaagagcttgcgtgaagaggactatatcagcaacagggaaatggatctgcttatgatgccaagtaactgtggaaatttaatgcttgtacagtggccactgtttctattgactagcaagatcatgttggcaaatgactatgcttctgactgtaaagactcgcagtatgagctatgggatagaatatcaaaagatgaatacatggcttatgccgtcaaagaatgttactacagcactgaaaaaattcttcactctttagttgatgctgaagggcagcactgggttgtaaggcttttccgagatcttaatgacagtatagcacagggttcacttttagtgactataaatctgaagaagttgcagttagtccagtctagattgacgggcttgaccggtcttctgatacgcgatgagactgctggccgtgcagctggtgttactaaagctcttcttgagctttatgaggttgttacccatgaatttctttcacagaatctgagggaacagtttgacacgtggcaactgttgttaagagccagaaatgatggacgcctattctctaagattttgtggccaaaggatccagaaatgaaagagcaacttaagcgattacacttacttcttactgtcaaggacagtgccaccaacataccaaaaaatcttgaagctcggagaagattacaatttttcactaattctctattcatggacattccacaagcaaagcctgtatctgagatgatcccttttagtgtctttaccccatactacagtgaaacagttctttatagcatgtctgagctttgtgttgagaatgaagatggcatttctatacttttctaccttcagaaaatataccctgatgagtgggctaacttcttagaacgaattggctgtggtgaatcatcagaagatgattttaaagaaagtccaagtgacaccatggaactccggttttgggtatcttatcgtggccaaactttggccaggacagtgcgtggaatgatgtactatagaagagctttgatgttacaaagttacctggagaggagatgccttgggggtattgaagatggaaattctgcagcagaatatattgacactcaaggctatgagttatctcctgatgcacgggcccaagcagatataaaatttacttatgttgtttcttgccaaatatatggactacagaagcaaacaaaaaaacaagaggctgcagatattgctctcctactgcaaagaaatgaggctcttcgggttgctttcatacacgaagaggaaatcatatcaagggatggtaaggctacaacaagagagtattattccaagcttgtgaaggctgatgttcatggcaaagaccaagaaatatactgcattaaattgcctgggaaccccaagcttggtgaaggcaaacctgagaaccaaaaccatgccataatcttcactcgaggagatgcagttcagacgatcgatatgaatcaggataactacttggaggaagcaatgaaaatgagaaatttacttgaagaatttcataatgctcatggaaaacatggcatacggaagcccacaatcctaggtgtgagggagcatgtattcacggggagtgtctcttcgctggcgtcatttatgtcgaaacaggagactagttttgttactttggggcaacgtgttcttgcttacctcaaagttcgaatgcactatggacatcctgatgtttttgatcggatatttcacataacccgaggtggcattagcaaggcgtctcgagtgattaatataagcgaagatatatatgccgggttcaattcgactttgcgccaagggaacatcacacaccatgaatatatccaggtggggaaagggcgtgatgttggcttgaaccaaattgcactatttgaggggaaagttgctggaggcaatggtgagcaagttctcagccgagatgtgtaccgtctgggccagttatttgatttcttcaggatgctaaccttctttttcaccactgttggttattatgtctgcacgatgatgactgttctaactgtgtatatcttcttgtatggaagggtttatctggcactctctggccttgactactcaatatctcgccaagctaggtttttggggaacactgcactagatgcagctttgaatgctcaatttttggtccagattggtatttttacagcagtgccgatgataatgggtttcattctggagctggggctgatgaaggctgtttttagttttattacaatgcagctccagttctgttcggtgtttttcaccttttcgcttggaacaaggacacattactttggtagaacaatccttcatggcggtgcaaagtatcgtgctactggaagaggttttgttgttcggcacataaagtttgctgaaaattataggctctattctcgaagtcactttgtcaaagcgcttgaggttgctctcctcctgatcgtttacattgcatatggatacacaaaaggcggttcatcttcatttattctgattactatcagtagttggttcctcgttatgtcctggcttttcgcgccttacattttcaacccttctggtttcgagtggcaaaagactgttgaggactttgatgactggacaaactggttactttataaaggtggagttggtgtaaagggcgacaacagttgggaatcttggtgggatgaggagcaggcgcatatccagacattcagaggacgtattcttgagacaatcctcagccttagatttctcatgtttcagtatggcattgtgtacaagcttaaaattacagatcataatacttctcttgcagtttacggcttctcatggattgtactctttgttatggttcttcttttcaagctttttactgcaactcctaggaagtcgacagccttgccgacttttgttaggtttctgcagggcgtccttgctattgggataattgcaggaattgcccttcttatcgtgctcacatcattcactgttgctgatttatttgcaagtgcacttgcttttatagcaaccggctgctggccgtaacatggaagagggtagtgaaagtccttgggctatgggattcagtccgtgagattgcaaggatgtacgatgcaggaatgggagccatcatctttgtgcccatcgtcgtcttctcatggttccccttcgtgtcaacattccagtcacgtttcctcttcaatcaagcgtttagtcgaggtctggagatctccctcatccttgcagggaacaaggcgaatcagcagatttgaaaggccctgccgcatccatcgtatttttctgttgtatattctgggaattactgagagctgcttagttagtttgaacaatttaatgagctcgatttgaatgacaaccttctacataattgcccctgtaatttgtacactaattatgcggagaggcagctacggcagtagagatgagctgatgtatgtcgatttgatcttaaccaaacctctctttaaggctacgacggttcagtaggcctgcactagtatgttgcacccatccacagatataaaaagaaaaatattcttaatataaaataa

SEQ ID NO: 215016 - DNA, 4270 bp, Zea Mays
aaacgaggcacgccctgacgcccacgcgaaagaaagttgacgcccacgccccacgcgcccaggaacaccaccggtgacgcgtgatcagactcgagaaccaatcccccccgactccctagccgccgcgctaaaatctacacaaagcctcgcaaatctggcctgatctcgcgcccccgatctcgcgctcgttcgcagcccaccgggaggtcctccagcctcccgccagatctcagcgtcgttcgttcgcttttagatttggtggggtaagggaggggaggcgggatgagcgcgcggataaaggagatggtgcgtgtggccacggcgcggctgggcggtgagcaggtgggggctggcggggtttcctcctcgggtatcgcgcgtcgggagtccacggcgcggctcggcggcgggggtacaagcctccggaggcagccgcagccgatggcgccctccgtgcgcaccgtctgctgcaacgaccgcgaggccaacgcccctgtcgggtacaagggaaattctgtgtcgactacaaagtacagcatcctgactttcctacctaaaggattatttgagcagttcaggcgggttgcaaatctttactttctcatgatctctatcttgtctactacacctatcagtccagttcatcctgtcactaatgtcgttcctctaagtcttgtgcttctggtgtctctcatcaaggaagcttttgaggattggaagcgtttccagaatgatatgtcaattaacaatgcacatgtcgatgtattgcaaggtcaatgttgggaaagtactccatggaaacgactgcaggttggagatattgtgaggacagcaaatcttgatggggaaacaaatctgaaaataaggaaggctttggagaaaacttgggactatgtaattcctgaaaaggcttctgagttcaaaggtgaagtgcagtgtgaacagccaaacaattccctttatacttttactggcaatcttatcatggacaagcaaactatacccctctcaccgaaccagttactcctaaggggatgcagtcttcgtaatacagaatacattgttggcgttgtcatattcactgggcacgagacaaaagttatgatgaattccatgaatgttccctcaaaaagaagtacattggaaaaaaagctagacaagcttatccttgctctttttgcaaccctctttacaatgtgtgttattggcgccattggaagtggcatatttattaatgaaaaatacttttatcttggattgcgtgggcatgtggaggatcagttcaatcctaaaaacagatttgtggtgaccattttaaccatgtttactctgataactctatactcaacgatcatccccatttccctttacgtgtccattgagtgcacacaattcattaataacgatcttcatatgtaccatgctgagagtaacacccctgctttggcacggacttctaatcttaatgaggagcttggacaggttgaatatatattttctgacaaaactggcacacttacaagaaatctgatggaattctttaaatgctcaattggtggagaaatgtatggaactggcatcacagagattgagaaaggaggagcagaacgggctggaattagaatcgatgatgatgagggcaaaagatctgctaacgcggtccatgaaaaaggattcaattttgatgacgctagaatcatgcgcggtgcatggagaaacgaacctaatcctgaggcttgcaaggaattctttagatgccttgcaatctgtcatacagttcttccagagggtgaggagactccggaaaagataagttaccaggctgcctcacctgatgaggctgcacttgtgtctgctgctaaaaattttggtttcttcttttataggcgtacacccacaactgttatggttcgtgagtcacatgttgaaaggatggggagtatacaagatgttccatatgaaattctgaatgttctagaattcaacagtacaagaaagcgacaatcggtggtttgccggttcacaaatggaagactagttctctattgcaagggtgctgataatgttgtatatgaacgattggctgatggaaatcatgatatgaaaaagatcagtagagagcatctagagcaatttggttctgctggcttacgtacactttgtcttgcctatcgggatcttagtagggagcaatacgaaagctggaacgagaagtttgtacaagcaaagtcatctttacgagatcgtgataagaagcttgatgaggtggctgaattgattgaaaaagaccttatattagttgggtgcacagctatagaggacaaactgcaagaaggggtgccaacctgcattgaaactctctctgcagcgggcataaaaatttgggtgttaactggagataagatggaaacagcgattaacattgcatatgcatgtagcttggtaaacaatgacaccaaacagttcatcattagttcagagacaggcgctattagggaggctgaagaccggggtgaccctgtggaaattgcacgtgttattaaagattcagtaaaacagaatctgaaaagatttcacgaggaagcccggcattctttaattagcacccctgaaaggaagttggctctcattattgatggtagatgcctaatgtacgcactggacccaactcttcgtgttgatcttcttggattgagtctaagttgccactctgttatatgctgccgagtttctccgctgcagaaggcacaggttacaagcttagttaggaagggtgctgagaaaataactctcagcattggtgacggtgctaatgatgtgagtatgattcaagctgctcatgttgggattggcatcagtggccaagaaggaatgcaagctgttatggctagtgactttgccattgcacagtttcgttttcttactgatttgcttcttgtacatggacgatggtcttacttgagactgtgcaaggttatcacatacttcttctacaagaatctgacatttacactaactcagttctggttcacttttcaaactggtttttctggccagcggttttatgatgactggtttcagtctctatataacgttatttttactgcgctacctgtaattatagttggattgtttgataaggatgttagcgcgtcactgtcaaaaaaatacccacagctttacaaggaaggcatcaggaattcattcttcaagtggagagtgattgcagtgtggggtttctttgccttctatcagtcaatagtgttcttctacttcactgcagctgcaagtcggcatggtcagggttcatctggcaagattcttggcctatgggatgttagcaccatggcatttacttgtgtcgtggtgactgtgaatctccgccttctcatggcatgcaactctataacgaggtggcattacataagtgtggcgggcagtatagtggcctggtttatgtttattttcatatactctgcaataatgacgtcatttgacagacaggaaaatgtgtattttgtgatttatgttctgatgagcacctttttcttctatctgacaatcgtacttgttccgatcatcgccctgtttggggatttcctatatctatcgatccaaaggtggctcttcccctacgactaccaaataatacaggagcaacacaaggatgagccacacgagtacagcagggtgccactaccagagaccagccacctaagcccagaggaagcgagaagctacatgatctcgatgctcccacgggagtcatcaaagcacactggctttgccttcgactccccaggatacgagtcgttcttcgcctcgcagcaaggcatcggcgtgccacacaagccgtgggatgtagcccggagagcgagcatgaaaccgcaacgagcaggaaaatcctagtcgggcgaacacctctccgctgtgtaaagtcttgtatatctggtttcttgaccacaggagtttttgtataggtagcagtactgtagcccttttttcgtgtttgtcacccatatgttgttttgggatgaaaagtaggcaacggtccgtttggctgttaaacaatcatgtagggatacttggtagataaaaccaaaggggtattggacatgcagttaggaattttagtttctggcgttcattgcgtgatgtagtcgagttgattggtcggcccgccatgcaacttaaatcatgttactattattggaggcctgtgcattgatcatatcccattttatttcaatataagaacacatcctactcc

SEQ ID NO: 215017 - DNA, 4410 bp, Zea Mays
aaacgaggcacgccctgacgcccacgcgaaagaaagttgacgcccacgccccacgcgcccaggaacaccaccggtgacgcgtgatcagactcgagaaccaatcccccccgactccctagccgccgcgctaaaatctacacaaagcctcgcaaatctggcctgatctcgcgcccccgatctcgcgctcgttcgcagcccaccgggaggtcctccagcctcccgccagatctcagcgtcgttcgttcgcttttagatttggtggggtaagggaggggaggcgggatgagcgcgcggataaaggagatggtgcgtgtggccacggcgcggctgggcggtgagcaggtgggggctggcggggtttcctcctcgggtatcgcgcgtcgggagtccacggcgcggctcggcggcgggggtacaagcctccggaggcagccgcagccgatggcgccctccgtgcgcaccgtctgctgcaacgaccgcgaggccaacgcccctgtcgggtacaagggaaattctgtgtcgactacaaagtacagcatcctgactttcctacctaaaggattatttgagcaggcgggttgcaaatctttactttctcatgatctctatcttgtctactacacctatcagtccagttcatcctgtcactaatgtcgttcctctaagtcttgtgcttctggtgtctctcatcaaggaagcttttgaggattggaagcgtttccagaatgatatgtcaattaacaatgcacatgtcgatgtattgcaaggtcaatgttgggaaagtactccatggaaacgactgcaggttggagatattgtgaggatcaagcaagatggttatttccctgctgacttgctcttcctatcaagtacaaaccctgatggtatctgctacatagagacagcaaatcttgatggggaaacaaatctgaaaataaggaaggctttggagaaaacttgggactatgtaattcctgaaaaggcttctgagttcaaaggtgaagtgcagtgtgaacagccaaacaattccctttatacttttactggcaatcttatcatggacaagcaaactatacccctctcaccgaaccagttactcctaaggggatgcagtcttcgtaatacagaatacattgttggcgttgtcatattcactgggcacgagacaaaagttatgatgaattccatgaatgttccctcaaaaagaagtacattggaaaaaaagctagacaagcttatccttgctctttttgcaaccctctttacaatgtgtgttattggcgccattggaagtggcatatttattaatgaaaaatacttttatcttggattgcgtgggcatgtggaggatcagttcaatcctaaaaacagatttgtggtgaccattttaaccatgtttactctgataactctatactcaacgatcatccccatttccctttacgtgtccattgagtgcacacaattcattaataacgatcttcatatgtaccatgctgagagtaacacccctgctttggcacggacttctaatcttaatgaggagcttggacaggttgaatatatattttctgacaaaactggcacacttacaagaaatctgatggaattctttaaatgctcaattggtggagaaatgtatggaactggcatcacagagattgagaaaggaggagcagaacgggctggaattagaatcgatgatgatgagggcaaaagatctgctaacgcggtccatgaaaaaggattcaattttgatgacgctagaatcatgcgcggtgcatggagaaacgaacctaatcctgaggcttgcaaggaattctttagatgccttgcaatctgtcatacagttcttccagagggtgaggagactccggaaaagataagttaccaggctgcctcacctgatgaggctgcacttgtgtctgctgctaaaaattttggtttcttcttttataggcgtacacccacaactgttatggttcgtgagtcacatgttgaaaggatggggagtatacaagatgttccatatgaaattctgaatgttctagaattcaacagtacaagaaagcgacaatcggtggtttgccggttcacaaatggaagactagttctctattgcaagggtgctgataatgttgtatatgaacgattggctgatggaaatcatgatatgaaaaagatcagtagagagcatctagagcaatttggttctgctggcttacgtacactttgtcttgcctatcgggatcttagtagggagcaatacgaaagctggaacgagaagtttgtacaagcaaagtcatctttacgagatcgtgataagaagcttgatgaggtggctgaattgattgaaaaagaccttatattagttgggtgcacagctatagaggacaaactgcaagaaggggtgccaacctgcattgaaactctctctgcagcgggcataaaaatttgggtgttaactggagataagatggaaacagcgattaacattgcatatgcatgtagcttggtaaacaatgacaccaaacagttcatcattagttcagagacaggcgctattagggaggctgaagaccggggtgaccctgtggaaattgcacgtgttattaaagattcagtaaaacagaatctgaaaagatttcacgaggaagcccggcattctttaattagcacccctgaaaggaagttggctctcattattgatggtagatgcctaatgtacgcactggacccaactcttcgtgttgatcttcttggattgagtctaagttgccactctgttatatgctgccgagtttctccgctgcagaaggcacaggttacaagcttagttaggaagggtgctgagaaaataactctcagcattggtgacggtgctaatgatgtgagtatgattcaagctgctcatgttgggattggcatcagtggccaagaaggaatgcaagctgttatggctagtgactttgccattgcacagtttcgttttcttactgatttgcttcttgtacatggacgatggtcttacttgagactgtgcaaggttatcacatacttcttctacaagaatctgacatttacactaactcagttctggttcacttttcaaactggtttttctggccagcggttttatgatgactggtttcagtctctatataacgttatttttactgcgctacctgtaattatagttggattgtttgataaggtaggattattcttacttgtttatggagttgtctcctgcaattgcactaagctctgagtcgtttcaggatgttagcgcgtcactgtcaaaaaaatacccacagctttacaaggaaggcatcaggaattcattcttcaagtggagagtgattgcagtgtggggtttctttgccttctatcagtcaatagtgttcttctacttcactgcagctgcaagtcggcatggtcagggttcatctggcaagattcttggcctatgggatgttagcaccatggcatttacttgtgtcgtggtgactgtgaatctccgccttctcatggcatgcaactctataacgaggtggcattacataagtgtggcgggcagtatagtggcctggtttatgtttattttcatatactctgcaataatgacgtcatttgacagacaggaaaatgtgtattttgtgatttatgttctgatgagcacctttttcttctatctgacaatcgtacttgttccgatcatcgccctgtttggggatttcctatatctatcgatccaaaggtggctcttcccctacgactaccaaataatacaggagcaacacaaggatgagccacacgagtacagcagggtgccactaccagagaccagccacctaagcccagaggaagcgagaagctacatgatctcgatgctcccacgggagtcatcaaagcacactggctttgccttcgactccccaggatacgagtcgttcttcgcctcgcagcaaggcatcggcgtgccacacaagccgtgggatgtagcccggagagcgagcatgaaaccgcaacgagcaggaaaatcctagtcgggcgaacacctctccgctgtgtaaagtcttgtatatctggtttcttgaccacaggagtttttgtataggtagcagtactgtagcccttttttcgtgtttgtcacccatatgttgttttgggatgaaaagtaggcaacggtccgtttggctgttaaacaatcatgtagggatacttggtagataaaaccaaaggggtattggacatgcagttaggaattttagtttctggcgttcattgcgtgatgtagtcgagttgattggtcggcccgccatgcaacttaaatcatgttactattattggaggcctgtgcattgatcatatcccattttatttcaatataagaacacatcctactcc

SEQ ID NO: 215018 - DNA, 4371 bp, Zea Mays
aaacgaggcacgccctgacgcccacgcgaaagaaagttgacgcccacgccccacgcgcccaggaacaccaccggtgacgcgtgatcagactcgagaaccaatcccccccgactccctagccgccgcgctaaaatctacacaaagcctcgcaaatctggcctgatctcgcgcccccgatctcgcgctcgttcgcagcccaccgggaggtcctccagcctcccgccagatctcagcgtcgttcgttcgcttttagatttggtggggtaagggaggggaggcgggatgagcgcgcggataaaggagatggtgcgtgtggccacggcgcggctgggcggtgagcaggtgggggctggcggggtttcctcctcgggtatcgcgcgtcgggagtccacggcgcggctcggcggcgggggtacaagcctccggaggcagccgcagccgatggcgccctccgtgcgcaccgtctgctgcaacgaccgcgaggccaacgcccctgtcgggtacaagggaaattctgtgtcgactacaaagtacagcatcctgactttcctacctaaaggattatttgagcagttcaggcgggttgcaaatctttactttctcatgatctctatcttgtctactacacctatcagtccagttcatcctgtcactaatgtcgttcctctaagtcttgtgcttctggtgtctctcatcaaggaagcttttgaggattggaagcgtttccagaatgatatgtcaattaacaatgcacatgtcgatgtattgcaaggtcaatgttgggaaagtactccatggaaacgactgcaggttggagatattgtgaggagcagatcaagcaagatggttatttccctgctgacttgctcttcctatcaagtacaaaccctgatggtatctgctacatagagacagcaaatcttgatggggaaacaaatctgaaaataaggaaggctttggagaaaacttgggactatgtaattcctgaaaaggcttctgagttcaaaggtgaagtgcagtgtgaacagccaaacaattccctttatacttttactggcaatcttatcatggacaagcaaactatacccctctcaccgaaccagttactcctaaggggatgcagtcttcgtaatacagaatacattgttggcgttgtcatattcactgggcacgagacaaaagttatgatgaattccatgaatgttccctcaaaaagaagtacattggaaaaaaagctagacaagcttatccttgctctttttgcaaccctctttacaatgtgtgttattggcgccattggaagtggcatatttattaatgaaaaatacttttatcttggattgcgtgggcatgtggaggatcagttcaatcctaaaaacagatttgtggtgaccattttaaccatgtttactctgataactctatactcaacgatcatccccatttccctttacgtgtccattgagatgatcaaattcatacagtgcacacaattcattaataacgatcttcatatgtaccatgctgagagtaacacccctgctttggcacggacttctaatcttaatgaggagcttggacaggttgaatatatattttctgacaaaactggcacacttacaagaaatctgatggaattctttaaatgctcaattggtggagaaatgtatggaactggcatcacagagattgagaaaggaggagcagaacgggctggaattagaatcgatgatgatgagggcaaaagatctgctaacgcggtccatgaaaaaggattcaattttgatgacgctagaatcatgcgcggtgcatggagaaacgaacctaatcctgaggcttgcaaggaattctttagatgccttgcaatctgtcatacagttcttccagagggtgaggagactccggaaaagataagttaccaggctgcctcacctgatgaggctgcacttgtgtctgctgctaaaaattttggtttcttcttttataggcgtacacccacaactgttatggttcgtgagtcacatgttgaaaggatggggagtatacaagatgttccatatgaaattctgaatgttctagaattcaacagtacaagaaagcgacaatcggtggtttgccggttcacaaatggaagactagttctctattgcaagggtgctgataatgttgtatatgaacgattggctgatggaaatcatgatatgaaaaagatcagtagagagcatctagagcaatttggttctgctggcttacgtacactttgtcttgcctatcgggatcttagtagggagcaatacgaaagctggaacgagaagtttgtacaagcaaagtcatctttacgagatcgtgataagaagcttgatgaggtggctgaattgattgaaaaagaccttatattagttgggtgcacagctatagaggacaaactgcaagaaggggtgccaacctgcattgaaactctctctgcagcgggcataaaaatttgggtgttaactggagataagatggaaacagcgattaacattgcatatgcatgtagcttggtaaacaatgacaccaaacagttcatcattagttcagagacaggcgctattagggaggctgaagaccggggtgaccctgtggaaattgcacgtgttattaaagattcagtaaaacagaatctgaaaagatttcacgaggaagcccggcattctttaattagcacccctgaaaggaagttggctctcattattgatggtagatgcctaatgtacgcactggacccaactcttcgtgttgatcttcttggattgagtctaagttgccactctgttatatgctgccgagtttctccgctgcagaaggcacaggttacaagcttagttaggaagggtgctgagaaaataactctcagcattggtgacggtgctaatgatgtgagtatgattcaagctgctcatgttgggattggcatcagtggccaagaaggaatgcaagctgttatggctagtgactttgccattgcacagtttcgttttcttactgatttgcttcttgtacatggacgatggtcttacttgagactgtgcaaggttatcacatacttcttctacaagaatctgacatttacactaactcagttctggttcacttttcaaactggtttttctggccagcggttttatgatgactggtttcagtctctatataacgttatttttactgcgctacctgtaattatagttggattgtttgataaggatgttagcgcgtcactgtcaaaaaaatacccacagctttacaaggaaggcatcaggaattcattcttcaagtggagagtgattgcagtgtggggtttctttgccttctatcagtcaatagtgttcttctacttcactgcagctgcaagtcggcatggtcagggttcatctggcaagattcttggcctatgggatgttagcaccatggcatttacttgtgtcgtggtgactgtgaatctccgccttctcatggcatgcaactctataacgaggtggcattacataagtgtggcgggcagtatagtggcctggtttatgtttattttcatatactctgcaataatgacgtcatttgacagacaggaaaatgtgtattttgtgatttatgttctgatgagcacctttttcttctatctgacaatcgtacttgttccgatcatcgccctgtttggggatttcctatatctatcgatccaaaggtggctcttcccctacgactaccaaataatacaggagcaacacaaggatgagccacacgagtacagcagggtgccactaccagagaccagccacctaagcccagaggaagcgagaagctacatgatctcgatgctcccacgggagtcatcaaagcacactggctttgccttcgactccccaggatacgagtcgttcttcgcctcgcagcaaggcatcggcgtgccacacaagccgtgggatgtagcccggagagcgagcatgaaaccgcaacgagcaggaaaatcctagtcgggcgaacacctctccgctgtgtaaagtcttgtatatctggtttcttgaccacaggagtttttgtataggtagcagtactgtagcccttttttcgtgtttgtcacccatatgttgttttgggatgaaaagtaggcaacggtccgtttggctgttaaacaatcatgtagggatacttggtagataaaaccaaaggggtattggacatgcagttaggaattttagtttctggcgttcattgcgtgatgtagtcgagttgattggtcggcccgccatgcaacttaaatcatgttactattattggaggcctgtgcattgatcatatcccattttatttcaatataagaacacatcctactcc

SEQ ID NO: 215019 - DNA, 4366 bp, Zea Mays
aaacgaggcacgccctgacgcccacgcgaaagaaagttgacgcccacgccccacgcgcccaggaacaccaccggtgacgcgtgatcagactcgagaaccaatcccccccgactccctagccgccgcgctaaaatctacacaaagcctcgcaaatctggcctgatctcgcgcccccgatctcgcgctcgttcgcagcccaccgggaggtcctccagcctcccgccagatctcagcgtcgttcgttcgcttttagatttggtggggtaagggaggggaggcgggatgagcgcgcggataaaggagatggtgcgtgtggccacggcgcggctgggcggtgagcaggtgggggctggcggggtttcctcctcgggtatcgcgcgtcgggagtccacggcgcggctcggcggcgggggtacaagcctccggaggcagccgcagccgatggcgccctccgtgcgcaccgtctgctgcaacgaccgcgaggccaacgcccctgtcgggtacaagggaaattctgtgtcgactacaaagtacagcatcctgactttcctacctaaaggattatttgagcaggcgggttgcaaatctttactttctcatgatctctatcttgtctactacacctatcagtccagttcatcctgtcactaatgtcgttcctctaagtcttgtgcttctggtgtctctcatcaaggaagcttttgaggattggaagcgtttccagaatgatatgtcaattaacaatgcacatgtcgatgtattgcaaggtcaatgttgggaaagtactccatggaaacgactgcaggttggagatattgtgaggagcagatcaagcaagatggttatttccctgctgacttgctcttcctatcaagtacaaaccctgatggtatctgctacatagagacagcaaatcttgatggggaaacaaatctgaaaataaggaaggctttggagaaaacttgggactatgtaattcctgaaaaggcttctgagttcaaaggtgaagtgcagtgtgaacagccaaacaattccctttatacttttactggcaatcttatcatggacaagcaaactatacccctctcaccgaaccagttactcctaaggggatgcagtcttcgtaatacagaatacattgttggcgttgtcatattcactgggcacgagacaaaagttatgatgaattccatgaatgttccctcaaaaagaagtacattggaaaaaaagctagacaagcttatccttgctctttttgcaaccctctttacaatgtgtgttattggcgccattggaagtggcatatttattaatgaaaaatacttttatcttggattgcgtgggcatgtggaggatcagttcaatcctaaaaacagatttgtggtgaccattttaaccatgtttactctgataactctatactcaacgatcatccccatttccctttacgtgtccattgagatgatcaaattcatacagtgcacacaattcattaataacgatcttcatatgtaccatgctgagagtaacacccctgctttggcacggacttctaatcttaatgaggagcttggacaggttgaatatatattttctgacaaaactggcacacttacaagaaatctgatggaattctttaaatgctcaattggtggagaaatgtatggaactggcatcacagagattgagaaaggaggagcagaacgggctggaattagaatcgatgatgatgagggcaaaagatctgctaacgcggtccatgaaaaaggattcaattttgatgacgctagaatcatgcgcggtgcatggagaaacgaacctaatcctgaggcttgcaaggaattctttagatgccttgcaatctgtcatacagttcttccagagggtgaggagactccggaaaagataagttaccaggctgcctcacctgatgaggctgcacttgtgtctgctgctaaaaattttggtttcttcttttataggcgtacacccacaactgttatggttcgtgagtcacatgttgaaaggatggggagtatacaagatgttccatatgaaattctgaatgttctagaattcaacagtacaagaaagcgacaatcggtggtttgccggttcacaaatggaagactagttctctattgcaagggtgctgataatgttgtatatgaacgattggctgatggaaatcatgatatgaaaaagatcagtagagagcatctagagcaatttggttctgctggcttacgtacactttgtcttgcctatcgggatcttagtagggagcaatacgaaagctggaacgagaagtttgtacaagcaaagtcatctttacgagatcgtgataagaagcttgatgaggtggctgaattgattgaaaaagaccttatattagttgggtgcacagctatagaggacaaactgcaagaaggggtgccaacctgcattgaaactctctctgcagcgggcataaaaatttgggtgttaactggagataagatggaaacagcgattaacattgcatatgcatgtagcttggtaaacaatgacaccaaacagttcatcattagttcagagacaggcgctattagggaggctgaagaccggggtgaccctgtggaaattgcacgtgttattaaagattcagtaaaacagaatctgaaaagatttcacgaggaagcccggcattctttaattagcacccctgaaaggaagttggctctcattattgatggtagatgcctaatgtacgcactggacccaactcttcgtgttgatcttcttggattgagtctaagttgccactctgttatatgctgccgagtttctccgctgcagaaggcacaggttacaagcttagttaggaagggtgctgagaaaataactctcagcattggtgacggtgctaatgatgtgagtatgattcaagctgctcatgttgggattggcatcagtggccaagaaggaatgcaagctgttatggctagtgactttgccattgcacagtttcgttttcttactgatttgcttcttgtacatggacgatggtcttacttgagactgtgcaaggttatcacatacttcttctacaagaatctgacatttacactaactcagttctggttcacttttcaaactggtttttctggccagcggttttatgatgactggtttcagtctctatataacgttatttttactgcgctacctgtaattatagttggattgtttgataaggatgttagcgcgtcactgtcaaaaaaatacccacagctttacaaggaaggcatcaggaattcattcttcaagtggagagtgattgcagtgtggggtttctttgccttctatcagtcaatagtgttcttctacttcactgcagctgcaagtcggcatggtcagggttcatctggcaagattcttggcctatgggatgttagcaccatggcatttacttgtgtcgtggtgactgtgaatctccgccttctcatggcatgcaactctataacgaggtggcattacataagtgtggcgggcagtatagtggcctggtttatgtttattttcatatactctgcaataatgacgtcatttgacagacaggaaaatgtgtattttgtgatttatgttctgatgagcacctttttcttctatctgacaatcgtacttgttccgatcatcgccctgtttggggatttcctatatctatcgatccaaaggtggctcttcccctacgactaccaaataatacaggagcaacacaaggatgagccacacgagtacagcagggtgccactaccagagaccagccacctaagcccagaggaagcgagaagctacatgatctcgatgctcccacgggagtcatcaaagcacactggctttgccttcgactccccaggatacgagtcgttcttcgcctcgcagcaaggcatcggcgtgccacacaagccgtgggatgtagcccggagagcgagcatgaaaccgcaacgagcaggaaaatcctagtcgggcgaacacctctccgctgtgtaaagtcttgtatatctggtttcttgaccacaggagtttttgtataggtagcagtactgtagcccttttttcgtgtttgtcacccatatgttgttttgggatgaaaagtaggcaacggtccgtttggctgttaaacaatcatgtagggatacttggtagataaaaccaaaggggtattggacatgcagttaggaattttagtttctggcgttcattgcgtgatgtagtcgagttgattggtcggcccgccatgcaacttaaatcatgttactattattggaggcctgtgcattgatcatatcccattttatttcaatataagaacacatcctactcc

SEQ ID NO: 215020 - DNA, 4348 bp, Zea Mays
aaacgaggcacgccctgacgcccacgcgaaagaaagttgacgcccacgccccacgcgcccaggaacaccaccggtgacgcgtgatcagactcgagaaccaatcccccccgactccctagccgccgcgctaaaatctacacaaagcctcgcaaatctggcctgatctcgcgcccccgatctcgcgctcgttcgcagcccaccgggaggtcctccagcctcccgccagatctcagcgtcgttcgttcgcttttagatttggtggggtaagggaggggaggcgggatgagcgcgcggataaaggagatggtgcgtgtggccacggcgcggctgggcggtgagcaggtgggggctggcggggtttcctcctcgggtatcgcgcgtcgggagtccacggcgcggctcggcggcgggggtacaagcctccggaggcagccgcagccgatggcgccctccgtgcgcaccgtctgctgcaacgaccgcgaggccaacgcccctgtcgggtacaagggaaattctgtgtcgactacaaagtacagcatcctgactttcctacctaaaggattatttgagcagttcaggcgggttgcaaatctttactttctcatgatctctatcttgtctactacacctatcagtccagttcatcctgtcactaatgtcgttcctctaagtcttgtgcttctggtgtctctcatcaaggaagcttttgaggattggaagcgtttccagaatgatatgtcaattaacaatgcacatgtcgatgtattgcaaggtcaatgttgggaaagtactccatggaaacgactgcagatcaagcaagatggttatttccctgctgacttgctcttcctatcaagtacaaaccctgatggtatctgctacatagagacagcaaatcttgatggggaaacaaatctgaaaataaggaaggctttggagaaaacttgggactatgtaattcctgaaaaggcttctgagttcaaaggtgaagtgcagtgtgaacagccaaacaattccctttatacttttactggcaatcttatcatggacaagcaaactatacccctctcaccgaaccagttactcctaaggggatgcagtcttcgtaatacagaatacattgttggcgttgtcatattcactgggcacgagacaaaagttatgatgaattccatgaatgttccctcaaaaagaagtacattggaaaaaaagctagacaagcttatccttgctctttttgcaaccctctttacaatgtgtgttattggcgccattggaagtggcatatttattaatgaaaaatacttttatcttggattgcgtgggcatgtggaggatcagttcaatcctaaaaacagatttgtggtgaccattttaaccatgtttactctgataactctatactcaacgatcatccccatttccctttacgtgtccattgagatgatcaaattcatacagtgcacacaattcattaataacgatcttcatatgtaccatgctgagagtaacacccctgctttggcacggacttctaatcttaatgaggagcttggacaggttgaatatatattttctgacaaaactggcacacttacaagaaatctgatggaattctttaaatgctcaattggtggagaaatgtatggaactggcatcacagagattgagaaaggaggagcagaacgggctggaattagaatcgatgatgatgagggcaaaagatctgctaacgcggtccatgaaaaaggattcaattttgatgacgctagaatcatgcgcggtgcatggagaaacgaacctaatcctgaggcttgcaaggaattctttagatgccttgcaatctgtcatacagttcttccagagggtgaggagactccggaaaagataagttaccaggctgcctcacctgatgaggctgcacttgtgtctgctgctaaaaattttggtttcttcttttataggcgtacacccacaactgttatggttcgtgagtcacatgttgaaaggatggggagtatacaagatgttccatatgaaattctgaatgttctagaattcaacagtacaagaaagcgacaatcggtggtttgccggttcacaaatggaagactagttctctattgcaagggtgctgataatgttgtatatgaacgattggctgatggaaatcatgatatgaaaaagatcagtagagagcatctagagcaatttggttctgctggcttacgtacactttgtcttgcctatcgggatcttagtagggagcaatacgaaagctggaacgagaagtttgtacaagcaaagtcatctttacgagatcgtgataagaagcttgatgaggtggctgaattgattgaaaaagaccttatattagttgggtgcacagctatagaggacaaactgcaagaaggggtgccaacctgcattgaaactctctctgcagcgggcataaaaatttgggtgttaactggagataagatggaaacagcgattaacattgcatatgcatgtagcttggtaaacaatgacaccaaacagttcatcattagttcagagacaggcgctattagggaggctgaagaccggggtgaccctgtggaaattgcacgtgttattaaagattcagtaaaacagaatctgaaaagatttcacgaggaagcccggcattctttaattagcacccctgaaaggaagttggctctcattattgatggtagatgcctaatgtacgcactggacccaactcttcgtgttgatcttcttggattgagtctaagttgccactctgttatatgctgccgagtttctccgctgcagaaggcacaggttacaagcttagttaggaagggtgctgagaaaataactctcagcattggtgacggtgctaatgatgtgagtatgattcaagctgctcatgttgggattggcatcagtggccaagaaggaatgcaagctgttatggctagtgactttgccattgcacagtttcgttttcttactgatttgcttcttgtacatggacgatggtcttacttgagactgtgcaaggttatcacatacttcttctacaagaatctgacatttacactaactcagttctggttcacttttcaaactggtttttctggccagcggttttatgatgactggtttcagtctctatataacgttatttttactgcgctacctgtaattatagttggattgtttgataaggatgttagcgcgtcactgtcaaaaaaatacccacagctttacaaggaaggcatcaggaattcattcttcaagtggagagtgattgcagtgtggggtttctttgccttctatcagtcaatagtgttcttctacttcactgcagctgcaagtcggcatggtcagggttcatctggcaagattcttggcctatgggatgttagcaccatggcatttacttgtgtcgtggtgactgtgaatctccgccttctcatggcatgcaactctataacgaggtggcattacataagtgtggcgggcagtatagtggcctggtttatgtttattttcatatactctgcaataatgacgtcatttgacagacaggaaaatgtgtattttgtgatttatgttctgatgagcacctttttcttctatctgacaatcgtacttgttccgatcatcgccctgtttggggatttcctatatctatcgatccaaaggtggctcttcccctacgactaccaaataatacaggagcaacacaaggatgagccacacgagtacagcagggtgccactaccagagaccagccacctaagcccagaggaagcgagaagctacatgatctcgatgctcccacgggagtcatcaaagcacactggctttgccttcgactccccaggatacgagtcgttcttcgcctcgcagcaaggcatcggcgtgccacacaagccgtgggatgtagcccggagagcgagcatgaaaccgcaacgagcaggaaaatcctagtcgggcgaacacctctccgctgtgtaaagtcttgtatatctggtttcttgaccacaggagtttttgtataggtagcagtactgtagcccttttttcgtgtttgtcacccatatgttgttttgggatgaaaagtaggcaacggtccgtttggctgttaaacaatcatgtagggatacttggtagataaaaccaaaggggtattggacatgcagttaggaattttagtttctggcgttcattgcgtgatgtagtcgagttgattggtcggcccgccatgcaacttaaatcatgttactattattggaggcctgtgcattgatcatatcccattttatttcaatataagaacacatcctactcc

SEQ ID NO: 215021 - DNA, 4311 bp, Zea Mays
aaacgaggcacgccctgacgcccacgcgaaagaaagttgacgcccacgccccacgcgcccaggaacaccaccggtgacgcgtgatcagactcgagaaccaatcccccccgactccctagccgccgcgctaaaatctacacaaagcctcgcaaatctggcctgatctcgcgcccccgatctcgcgctcgttcgcagcccaccgggaggtcctccagcctcccgccagatctcagcgtcgttcgttcgcttttagatttggtggggtaagggaggggaggcgggatgagcgcgcggataaaggagatggtgcgtgtggccacggcgcggctgggcggtgagcaggtgggggctggcggggtttcctcctcgggtatcgcgcgtcgggagtccacggcgcggctcggcggcgggggtacaagcctccggaggcagccgcagccgatggcgccctccgtgcgcaccgtctgctgcaacgaccgcgaggccaacgcccctgtcgggtacaagggaaattctgtgtcgactacaaagtacagcatcctgactttcctacctaaaggattatttgagcagttcaggcgggttgcaaatctttactttctcatgatctctatcttgtctactacacctatcagtccagttcatcctgtcactaatgtcgttcctctaagtcttgtgcttctggtgtctctcatcaaggaagcttttgaggattgggtcaatgttgggaaagtactccatggaaacgactgcaggttggagatattgtgaggatcaagcaagatggttatttccctgctgacttgctcttcctatcaagtacaaaccctgatggtatctgctacatagagacagcaaatcttgatggggaaacaaatctgaaaataaggaaggctttggagaaaacttgggactatgtaattcctgaaaaggcttctgagttcaaaggtgaagtgcagtgtgaacagccaaacaattccctttatacttttactggcaatcttatcatggacaagcaaactatacccctctcaccgaaccagttactcctaaggggatgcagtcttcgtaatacagaatacattgttggcgttgtcatattcactgggcacgagacaaaagttatgatgaattccatgaatgttccctcaaaaagaagtacattggaaaaaaagctagacaagcttatccttgctctttttgcaaccctctttacaatgtgtgttattggcgccattggaagtggcatatttattaatgaaaaatacttttatcttggattgcgtgggcatgtggaggatcagttcaatcctaaaaacagatttgtggtgaccattttaaccatgtttactctgataactctatactcaacgatcatccccatttccctttacgtgtccattgagatgatcaaattcatacagtgcacacaattcattaataacgatcttcatatgtaccatgctgagagtaacacccctgctttggcacggacttctaatcttaatgaggagcttggacaggttgaatatatattttctgacaaaactggcacacttacaagaaatctgatggaattctttaaatgctcaattggtggagaaatgtatggaactggcatcacagagattgagaaaggaggagcagaacgggctggaattagaatcgatgatgatgagggcaaaagatctgctaacgcggtccatgaaaaaggattcaattttgatgacgctagaatcatgcgcggtgcatggagaaacgaacctaatcctgaggcttgcaaggaattctttagatgccttgcaatctgtcatacagttcttccagagggtgaggagactccggaaaagataagttaccaggctgcctcacctgatgaggctgcacttgtgtctgctgctaaaaattttggtttcttcttttataggcgtacacccacaactgttatggttcgtgagtcacatgttgaaaggatggggagtatacaagatgttccatatgaaattctgaatgttctagaattcaacagtacaagaaagcgacaatcggtggtttgccggttcacaaatggaagactagttctctattgcaagggtgctgataatgttgtatatgaacgattggctgatggaaatcatgatatgaaaaagatcagtagagagcatctagagcaatttggttctgctggcttacgtacactttgtcttgcctatcgggatcttagtagggagcaatacgaaagctggaacgagaagtttgtacaagcaaagtcatctttacgagatcgtgataagaagcttgatgaggtggctgaattgattgaaaaagaccttatattagttgggtgcacagctatagaggacaaactgcaagaaggggtgccaacctgcattgaaactctctctgcagcgggcataaaaatttgggtgttaactggagataagatggaaacagcgattaacattgcatatgcatgtagcttggtaaacaatgacaccaaacagttcatcattagttcagagacaggcgctattagggaggctgaagaccggggtgaccctgtggaaattgcacgtgttattaaagattcagtaaaacagaatctgaaaagatttcacgaggaagcccggcattctttaattagcacccctgaaaggaagttggctctcattattgatggtagatgcctaatgtacgcactggacccaactcttcgtgttgatcttcttggattgagtctaagttgccactctgttatatgctgccgagtttctccgctgcagaaggcacaggttacaagcttagttaggaagggtgctgagaaaataactctcagcattggtgacggtgctaatgatgtgagtatgattcaagctgctcatgttgggattggcatcagtggccaagaaggaatgcaagctgttatggctagtgactttgccattgcacagtttcgttttcttactgatttgcttcttgtacatggacgatggtcttacttgagactgtgcaaggttatcacatacttcttctacaagaatctgacatttacactaactcagttctggttcacttttcaaactggtttttctggccagcggttttatgatgactggtttcagtctctatataacgttatttttactgcgctacctgtaattatagttggattgtttgataaggatgttagcgcgtcactgtcaaaaaaatacccacagctttacaaggaaggcatcaggaattcattcttcaagtggagagtgattgcagtgtggggtttctttgccttctatcagtcaatagtgttcttctacttcactgcagctgcaagtcggcatggtcagggttcatctggcaagattcttggcctatgggatgttagcaccatggcatttacttgtgtcgtggtgactgtgaatctccgccttctcatggcatgcaactctataacgaggtggcattacataagtgtggcgggcagtatagtggcctggtttatgtttattttcatatactctgcaataatgacgtcatttgacagacaggaaaatgtgtattttgtgatttatgttctgatgagcacctttttcttctatctgacaatcgtacttgttccgatcatcgccctgtttggggatttcctatatctatcgatccaaaggtggctcttcccctacgactaccaaataatacaggagcaacacaaggatgagccacacgagtacagcagggtgccactaccagagaccagccacctaagcccagaggaagcgagaagctacatgatctcgatgctcccacgggagtcatcaaagcacactggctttgccttcgactccccaggatacgagtcgttcttcgcctcgcagcaaggcatcggcgtgccacacaagccgtgggatgtagcccggagagcgagcatgaaaccgcaacgagcaggaaaatcctagtcgggcgaacacctctccgctgtgtaaagtcttgtatatctggtttcttgaccacaggagtttttgtataggtagcagtactgtagcccttttttcgtgtttgtcacccatatgttgttttgggatgaaaagtaggcaacggtccgtttggctgttaaacaatcatgtagggatacttggtagataaaaccaaaggggtattggacatgcagttaggaattttagtttctggcgttcattgcgtgatgtagtcgagttgattggtcggcccgccatgcaacttaaatcatgttactattattggaggcctgtgcattgatcatatcccattttatttcaatataagaacacatcctactcc

SEQ ID NO: 215022 - DNA, 1809 bp, Zea Mays
acttgctcttcctatcaagtacaaaccctgatggtatctgctacatagagacagcaaatcttgatggggaaacaaatctgaaaataaggaaggctttggagaaaacttgggactatgtaattcctgaaaaggcttctgagttcaaaggtgaagtgcagtgtgaacagccaaacaattccctttatacttttactggcaatcttatcatggacaagcaaactatacccctctcaccgaaccagttactcctaaggacaagcaacatatttggagttcctaagattggccgcattgcattcaccggcggctgctccaatacaccggcgccggctctccaggactccaccagcgttgtctccagaccagcaccggtgagcaatgacgaagaggacttgatgactggtgctggtcccttccttctcccccttttctatcttattatcagtatgtctacactctgcggcgcctggtcggtcctccgggacgaccagctggtcgctcgacttgaaatcagtggtggtaaaggttatgatgaattccatgaatgttccctcaaaaagaagtacattggaaaaaaagctagacaagcttatccttgctctttttgcaaccctctttacaatgtgtgttattggcgccattggaagtggcatatttattaatgaaaaatacttttatcttggattgcgtgggcatgtggaggatcagttcaatcctaaaaacagatttgtggtgaccattttaaccatgtttactctgataactctatactcaacgatcatccccatttccctttacgtgtccattgagtgcacacaattcattaataacgatcttcatatgtaccatgctgagagtaacacccctgctttggcacggacttctaatcttaatgaggagcttggacaggttgaatatatattttctgacaaaactggcacacttacaagaaatctgatggaattctttaaatgctcaattggtggagaaatgtatggaactggcatcacagagattgagaaaggaggagcagaacgggctggaattagaatcgatgatgatgagggcaaaagatctgctaacgcggtccatgaaaaaggattcaattttgatgacgctagaatcatgcgcggtgcatggagaaacgaacctaatcctgaggcttgcaaggaattctttagatgccttgcaatctgtcatacagttcttccagagggtgaggagactccggaaaagataagttaccaggctgcctcacctgatgaggctgcacttgtgtctgctgctaaaaattttggtttcttcttttataggcgtacacccacaactgttatggttcgtgagtcacatgttgaaaggatggggagtatacaagatgttccatatgaaattctgaatgttctagaattcaacagtacaagaaagcgacaatcggtggtttgccggttcacaaatggaagactagttctctattgcaagggtgctgataatgttgtatatgaacgattggctgatggaaatcatgatatgaaaaagatcagtagagagcatctagagcaatttggttctgctggcttacgtacactttgtcttgcctatcgggatcttagtagggagcaatacgaaagctggaacgagaagtttgtacaagcaaagtcatctttacgagatcgtgataagaagcttgatgaggttaatgagttaccatcttttggttatatgacaattgacatgaactctgacagtgtattctgtatttgcttgaaaatgtggtcctttctgttagaacttatgctactggatctataa

SEQ ID NO: 215023 - DNA, 3334 bp, Zea Mays
tcaagtacaaaccctgatggtatctgctacatagagacagcaaatcttgatggggaaacaaatctgaaaataaggaaggctttggagaaaacttgggactatgtaattcctgaaaaggcttctgagttcaaaggtgaagtgcagtgtgaacagccaaacaattccctttatacttttactggcaatcttatcatggacaagcaaactatacccctctcaccgaaccagttactcctaagggttatgatgaattccatgaatgttccctcaaaaagaagtacattggaaaaaaagctagacaagcttatccttgctctttttgcaaccctctttacaatgtgtgttattggcgccattggaagatgatcaaattcatacagtgcacacaattcattaataacgatcttcatatgtaccatgctgagagtaacacccctgctttggcacggacttctaatcttaatgaggagcttggacaggttgaatatatattttctgacaaaactggcacacttacaagaaatctgatggaattctttaaatgctcaattggtggagaaatgtatggaactggcatcacagagattgagaaaggaggagcagaacgggctggaattagaatcgatgatgatgagggcaaaagatctgctaacgcggtccatgaaaaaggattcaattttgatgacgctagaatcatgcgcggtgcatggagaaacgaacctaatcctgaggcttgcaaggaattctttagatgccttgcaatctgtcatacagttcttccagagggtgaggagactccggaaaagataagttaccaggctgcctcacctgatgaggctgcacttgtgtctgctgctaaaaattttggtttcttcttttataggcgtacacccacaactgttatggttcgtgagtcacatgttgaaaggatggggagtatacaagatgttccatatgaaattctgaatgttctagaattcaacagtacaagaaagcgacaatcggtggtttgccggttcacaaatggaagactagttctctattgcaagggtgctgataatgttgtatatgaacgattggctgatggaaatcatgatatgaaaaagatcagtagagagcatctagagcaatttggttctgctggcttacgtacactttgtcttgcctatcgggatcttagtagggagcaatacgaaagctggaacgagaagtttgtacaagcaaagtcatctttacgagatcgtgataagaagcttgatgaggtggctgaattgattgaaaaagaccttatattagttgggtgcacagctatagaggacaaactgcaagaaggggtgccaacctgcattgaaactctctctgcagcgggcataaaaatttgggtgttaactggagataagatggaaacagcgattaacattgcatatgcatgtagcttggtaaacaatgacaccaaacagttcatcattagttcagagacaggcgctattagggaggctgaagaccggggtgaccctgtggaaattgcacgtgttattaaagattcagtaaaacagaatctgaaaagatttcacgaggaagcccggcattctttaattagcacccctgaaaggaagttggctctcattattgatggtagatgcctaatgtacgcactggacccaactcttcgtgttgatcttcttggattgagtctaagttgccactctgttatatgctgccgagtttctccgctgcagaaggcacaggttacaagcttagttaggaagggtgctgagaaaataactctcagcattggtgacggtgctaatgatgtgagtatgattcaagctgctcatgttgggattggcatcagtggccaagaaggaatgcaagctgttatggctagtgactttgccattgcacagtttcgttttcttactgatttgcttcttgtacatggacgatggtcttacttgagactgtgcaaggttatcacatacttcttctacaagaatctgacatttacactaactcagttctggttcacttttcaaactggtttttctggccagcggttttatgatgactggtttcagtctctatataacgttatttttactgcgctacctgtaattatagttggattgtttgataaggtaggattattcttacttgtttatggagttgtctcctgcaattgcactaagctctgagtcgtttcaggatgttagcgcgtcactgtcaaaaaaatacccacagctttacaaggaaggcatcaggaattcattcttcaagtggagagtgattgcagtgtggggtttctttgccttctatcagtcaatagtgttcttctacttcactgcagctgcaagtcggcatggtcagggttcatctggcaagattcttggcctatgggatgttagcaccatggcatttacttgtgtcgtggtgactgtgaatctccgccttctcatggcatgcaactctataacgaggtggcattacataagtgtggcgggcagtatagtggcctggtttatgtttattttcatatactctgcaataatgacgtcatttgacagacaggaaaatgtgtattttgtgatttatgttctgatgagcacctttttcttctatctgacaatcgtacttgttccgatcatcgccctgtttggggatttcctatatctatcgatccaaaggtggctcttcccctacgactaccaaataatacaggagcaacacaaggatgagccacacgagtacagcagggtgccactaccagagaccagccacctaagcccagaggaagcgagaagctacatgatctcgatgctcccacgggagtcatcaaagcacactggctttgccttcgactccccaggatacgagtcgttcttcgcctcgcagcaaggcatcggcgtgccacacaagccgtgggatgtagcccggagagcgagcatgaaaccgcaacgagcaggaaaatcctagtcgggcgaacacctctccgctgtgtaaagtcttgtatatctggtttcttgaccacaggagtttttgtataggtagcagtactgtagcccttttttcgtgtttgtcacccatatgttgttttgggatgaaaagtaggcaacggtccgtttggctgttaaacaatcatgtagggatacttggtagataaaaccaaaggggtattggacatgcagttaggaattttagtttctggcgttcattgcgtgatgtagtcgagttgattggtcggcccgccatgcaacttaaatcatgttactattattggaggcctgtgcattgatcatatcccattttatttcaatataagaacacatcctactcc

SEQ ID NO: 215024 - DNA, 3423 bp, Zea Mays
caaaccctgatggtatctgctacatagagacagcaaatcttgatggggaaacaaatctgaaaataaggaaggctttggagaaaacttgggactatgtaattcctgaaaaggcttctgagttcaaaggtgaagtgcagtgtgaacagccaaacaattccctttatacttttactggcaatcttatcatggacaagcaaactatacccctctcaccgaaccagttactcctaagggttatgatgaattccatgaatgttccctcaaaaagaagtacattggaaaaaaagctagacaagcttatccttgctctttttgcaaccctctttacaatgtgtgttattggcgccattggaagtggcatatttattaatgaaaaatacttttatcttggattgcgtgggcatgtggaggatcagttcaatcctaaaaacagatttgtggtgaccattttaaccatgtttactctgataactctatactcaacgatcatccccatttccctttacgtgtccattgagatgatcaaattcatacagtgcacacaattcattaataacgatcttcatatgtaccatgctgagagtaacacccctgctttggcacggacttctaatcttaatgaggagcttggacaggttgaatatatattttctgacaaaactggcacacttacaagaaatctgatggaattctttaaatgctcaattggtggagaaatgtatggaactggcatcacagagattgagaaaggaggagcagaacgggctggaattagaatcgatgatgatgagggcaaaagatctgctaacgcggtccatgaaaaaggattcaattttgatgacgctagaatcatgcgcggtgcatggagaaacgaacctaatcctgaggcttgcaaggaattctttagatgccttgcaatctgtcatacagttcttccagagggtgaggagactccggaaaagataagttaccaggctgcctcacctgatgaggctgcacttgtgtctgctgctaaaaattttggtttcttcttttataggcgtacacccacaactgttatggttcgtgagtcacatgttgaaaggatggggagtatacaagatgttccatatgaaattctgaatgttctagaattcaacagtacaagaaagcgacaatcggtggtttgccggttcacaaatggaagactagttctctattgcaagggtgctgataatgttgtatatgaacgattggctgatggaaatcatgatatgaaaaagatcagtagagagcatctagagcaatttggttctgctggcttacgtacactttgtcttgcctatcgggatcttagtagggagcaatacgaaagctggaacgagaagtttgtacaagcaaagtcatctttacgagatcgtgataagaagcttgatgaggtggctgaattgattgaaaaagaccttatattagttgggtgcacagctatagaggacaaactgcaagaaggggtgccaacctgcattgaaactctctctgcagcgggcataaaaatttgggtgttaactggagataagatggaaacagcgattaacattgcatatgcatgtagcttggtaaacaatgacaccaaacagttcatcattagttcagagacaggcgctattagggaggctgaagaccggggtgaccctgtggaaattgcacgtgttattaaagattcagtaaaacagaatctgaaaagatttcacgaggaagcccggcattctttaattagcacccctgaaaggaagttggctctcattattgatggtagatgcctaatgtacgcactggacccaactcttcgtgttgatcttcttggattgagtctaagttgccactctgttatatgctgccgagtttctccgctgcagaaggcacaggttacaagcttagttaggaagggtgctgagaaaataactctcagcattggtgacggtgctaatgatgtgagtatgattcaagctgctcatgttgggattggcatcagtggccaagaaggaatgcaagctgttatggctagtgactttgccattgcacagtttcgttttcttactgatttgcttcttgtacatggacgatggtcttacttgagactgtgcaaggttatcacatacttcttctacaagaatctgacatttacactaactcagttctggttcacttttcaaactggtttttctggccagcggttttatgatgactggtttcagtctctatataacgttatttttactgcgctacctgtaattatagttggattgtttgataaggatgttagcgcgtcactgtcaaaaaaatacccacagctttacaaggaaggcatcaggaattcattcttcaagtggagagtgattgcagtgtggggtttctttgccttctatcagtcaatagtgttcttctacttcactgcagctgcaagtcggcatggtcagggttcatctggcaagattcttggcctatgggatgttagcaccatggcatttacttgtgtcgtggtgactgtgaatctccgccttctcatggcatgcaactctataacgaggtggcattacataagtgtggcgggcagtatagtggcctggtttatgtttattttcatatactctgcaataatgacgtcatttgacagacaggaaaatgtgtattttgtgatttatgttctgatgagcacctttttcttctatctgacaatcgtacttgttccgatcatcgccctgtttggggatttcctatatctatcgatccaaaggtggctcttcccctacgactaccaaataatacaggagcaacacaaggatgagccacacgagtacagcagggtgccactaccagagaccagccacctaagcccagaggaagcgagaagctacatgatctcgatgctcccacgggagtcatcaaagcacactggctttgccttcgactccccaggatacgagtcgttcttcgcctcgcagcaaggcatcggcgtgccacacaagccgtgggatgtagcccggagagcgagcatgaaaccgcaacgagcaggaaaatcctagtcgggcgaacacctctccgctgtgtaaagtcttgtatatctggtttcttgaccacaggagtttttgtataggtagcagtactgtagcccttttttcgtgtttgtcacccatatgttgttttgggatgaaaagtaggcaacggtccgtttggctgttaaacaatcatgtagggatacttggtagataaaaccaaaggggtattggacatgcagttaggaattttagtttctggcgttcattgcgtgatgtagtcgagttgattggtcggcccgccatgcaacttaaatcatgttactattattggaggcctgtgcattgatcatatcccattttatttcaatataagaacacatcctactcc

SEQ ID NO: 215025 - DNA, 595 bp, Zea Mays
cctctgcaggtcacatgcagcgatctactacttagtgcacaaatttgaaggggaaaaatggctggtcacccataccactttcagttgacatcccatatgtagatggatatccagctcttgcaaatcctgaaatgattgatgtttcgtttgaaacccctgggtacaagaaacctactcaggagcactacttgagctacctttcctttgcgccacctgaggtgacatttggcagattccaagcagatgagcaggggtgggttgacaccatcaagtctgttaagcttgggggaattgtaagaatgaataccatggattggcttgggcagtcacagtatgctacccaaacagtctactggtcatctttatcgtcagcaatctcagaggtagtattctcaaagaacgcgaccgtgaggctactcgtcgcctactgggcgcatctcatcccaaacaccgagaaatacctgaagagcctactgtactccaacgttctctgcgcgtcttcggcgtacaaccactgtggcggcaaggtcgagatcaagtactacgtggttcctgggcacaacgagaccggacctgctctgtcccagggcggcga

SEQ ID NO: 215026 - DNA, 2530 bp, Zea Mays
cacgcaccaccaccatcactggccaaaccaccagcaccacctcaccgaggcgggcgcaggcagcgaggctggcaggcattcgcaaggcaaaccgaggcaccgacgcccaaaaataaactaggcgtccccacaaatcgctccaccttccttccctctcccctccccttctcgctccgcttgcgctagccccgagatccacgccgcctcctctccggcgcccccgccctcgcctacggcggctcacgctgcctcctggccatctctgcgcggccgcgaccgaccgccggttttgctaaccggtccagggagcactgggcaggaggaggaggaggtgggttccgtagaggcgcggtgccagcctgagcaagagggcgggcgggcggccgggcgccggtgacgttctcagcttcctgcaagctcgccgagttgccgggcggcgtcctgggcggggttgttggtggcgcagggaagcggggaggaggctcgccttgctcgtagctgcattggccgcgtgcgccgaggaggcggccgatttaatcccaggaggagcctccccagcttgtttcgcacgctcccggcgccctaggtgcttctcgctccgcttccgcttggtccatggtccatggggtggaaggtggcgtcagggtgtaaggcggccggcgacaagctcaggctcccaacctcctccgccgccgcgcggtcgcggatgaagctctggttggtgcgcgccaccaccacggtgctgctctggacctgtgtcgtgcagctcacggccgtcggggacacctggggcccgcgggtgctcaagggctggccctcctgcctcacgccgcgcgaggaggaggcggccgccgcgcgcccgcgccctctcgtcgtcgacagggccgcgctgccgcccaaaagaatatataggaataatggttacttgatggtttcgtgcaatggtgggcttaaccaaatgcgagctgcaatatgtgacatggttgtaattgcaagatatttgaatgtcactttagttgtgccagagttggataagacttcattttggaatgatccaagtgagttccaagatatatttgatgtggagcactttataacctcgttacgaggtgaagttcgcatcctgagagaattacccccaaggatgaagagaagagttgaacttggaatgtttcactccatgcctccaattagttggtctgatatctcctactatcaaaatcagattcttcctttgattcgtaaatacaaggttgtccatctgaatagaactgatgctaggctagcaaacaatggtttaccgatggagactcagaaactgcgatgccgagtaaattatgcctctcttaaatttaccccacaaattgaagagctgggcaagagagtaattagaattcttcgccaaaatggacctttcttggtacttcatttacgttatgaaatggatatgttggctttctctggctgtactcaaggttgcagtactgaagaggcagaagaactcacaagaatgaggtatgcttatccatggtggaaagaaaaagtgattgactcagacttgaaaagaaaagatggcctttgcccattgacgcctgaggagactgctcttgtcctcagagcacttgacattgatagaagtatgcaaatatacattgctgctggggaaatatatggtggaaagcgcaggatggctgctctaacttcagcatacccgaatgtggtgaggaaggagacacttttggaaccttctgatctgatgttcttccagaaccattcatcacaaatggcagcactggattacttagtatccttagaaagtgatatatttgttccaacatatgatgggaatatggctaaagttgttgagggtcatcggaggtttgcactattccacttagtcatatacaatttatattatgcatatcggcctatgcagtttcaacataccaggcagcaggctagtcttatttttgtaattgtttcttctgagcgttgcataatgatgcccgtaaaaagatgaactgttaaagtattaaagcacattgatgatcttgtcttcaacctccatcaattctttactactaacactgttgcttcgagatttgtgtaattgaggtttgagacggcataaaaacactacaatatactttgaaaaccacagtttttgaaaataccacaatatactttagtcatgacaataccacaatttaaaataccgcagtttcggaaactgaggttcagacccaagtttagaatactttaaaacagctacaatatttgcaatactttagttttaaaaacagagattttaaatatcttgccaaacaccattatgtatataatactgcagtatttttttttccaaaactgtgaaaaaactgcactcccaaacaccccctagaactttttcttaccctattttctgaagctgaaatctggaaatatgtccattgaagtttattattaatgactacacattagatatcttatctttgcaatttctaagtagcatgttaattactggtaattc

SEQ ID NO: 215027 - DNA, 2090 bp, Zea Mays
gtttggacgggatatatataggcgcgatgcagcagagtagactgggcatgggccactactgctagtgctagtgctagtagcagcggcacagcgcggagaggcagagaagtagccaaagccaagtaggaggaggaggaggaggcagggcgcggggcgagagcttgacgcggcaaccaccgctgcactgcactgcacccctcgctcctccgagctcagcagcagcagcagcagcagctcgctcgcggcatgtcgccatgtggaccggagataccggcggtactgcgagcagatgcgggcgctggcgggcgggttcgaggcggtggccggggagcgcgcggcggcggcgtacacggcgctggcgtcgcgcaccatctcgcggcacttccggagcctccgggacggcgtggtggcgcagctgcaggcggcgcgcagggcgctcggggagaaggacgtggcggtgcccgggatgacgcgcggggacacgcccaggctcagggtgctcgaccagtgcatccgccagcacaaggcgctcacccaggccgccggcatgatggagagccacccgtggcgcccgcagcgcggactccccgagcgcgccgtcaccatcctccgggcgtggctcttcgagcacttcctgcacccgtatccaagcgacgtcgacaagcatatcctggctcgccagacgggcctctcacggagccaggtgtccaactggttcatcaatgcgcgggtcaggctctggaagccaatggtggaggagatgtacgtggaggagatgaaggccgagggccaggacggcgggggccagcagcaggtaggcgtcgccgtcgccaacaaccctaaccctagcagcgccggccacgcctccgaggcggctgaggacgatgggcgcggggacagcggcggcggcgccgtcgtcgaccggaagccgacgcgggcgcagctcctgcacgacgccggctcgctcgcctcggtcgtcaacatcggcggcggatcgcgcgcgggattcggcatcatggaccacctcgacttcgacgcctacggcggccaccatgccggcgccgtgtccctcacgctgggcctgcagcagcacgactcccacgccgacggcggcgccggcggcgtcaacatcgcgttcggcgcgccgccgcccgcgcaccaccacgggtacctgttcgctccgacggcggcggcggcaggccatcagatgggcggcggcgtgcacccgggactacaccaccacgtccagttcagcggcgccggcgccggcatcgacggcgaggcggcgcacgggcaggagcactaccggggcctgcagggcggcggcgggttccacctcctgcgtgacctggccgggtgatcgatctgctccatccacggcccgtgcatccgcggtcggccgcgcgcgagctctagctgcgactccgagtgagctgagcgatggggacgtcgtgccggcgcctagctagctaccgggtgtccgcgccggattcatggcacgcactcgatcgcgcgtgcgctcatccggccacagcggcgctgtgtacgtacgcaccggatttgtttggcttgttgcttgcctggctcgtgccggtctccatcggtctcgatcgccgccggcggcggcttggccgggcccgggtctagctggctagctagctgccctagttatacataatatatgtatttgtagcgtgtacagatcgggtcgcgatcgagcagtttggacgcgcgcaggtgcagctagtactagtagtagctagcccgccggaactgcgtagttgatcaaacacgcattgcatgcaggttaattgcattgtttgtcaatttcttgaaggattcgacgacgtacggcacaatttataccaggcattattgacgattttcctggcagaatattcatcagtccatatgcccatgcatgtttgcgaattgtctatatgtatgtttgtgattggctggtgtgtaagcctctggttagtttgcattatctaaacttttcgtaaacaaaaaaaggtgagagcgtcagctaatgttttttttcataaattgagtggctgaacaatttgaaatgagctataagagtcagg

SEQ ID NO: 215028 - DNA, 2967 bp, Zea Mays
gggatatatataggcgcgatgcagcagagtagactgggcatgggccactactgctagtgctagtgctagtagcagcggcacagcgcggagaggcagagaagtagccaaagccaagtaggaggaggaggaggaggcagggcgcggggcgagagcttgacgcggcaaccaccgctgcactgcactgcacccctcgctcctccgagctcagcagcagcagcagcagcagctcgctcgcggcatgtcgccatccatgtcaggaaagatttatctggtcggccgatcgagctcctctcctccgaagcactgaagctccagcggctgccctgcctgacagccactccgcacgacaaaattaaaaagcgcgggcgatcaagatggcgcacgaccccagcctgggcttcgcggactacttctcggcggcggcggcggcgggcgccacggcgatggacgacgacgtcggggcgccggagctctatggcctgcatgccgacgacatggagttcctcggcatgcgtggcctggccgccatgccccccgccgcggcacaccaccagcaccaccaccatcacggccacagcaaggccggtgcgctcctcgacgacgacgacgcgggggtggggccagacgtcagcggctccgcggacgacgccaccatgcgcttcctgagcgagcagcagcagcagcagcaccaggcgccgctgtcgctgtcgctgtgccggccggacgtggcgacgacgttgcacgagcagcagcacctcgccggcggtggctcctcgtcccggtaccatcaggagcagcagccggcggcgtgggtgcagcagcagcacgactactcgccgtcgccgcagcagcacgcgtggcacctgcgcagctccaggttcctcgtcccggcgcagcaggtcctgcaggagttctgcagcctccccgtggacagcagcagcgctgccgcctccagcaagcgcgccaaggccgcaaataagccggcctcgcagcagcagcagcagcaagaagacggcggcggcgccgaggggtcgtcgtcgtcggcctcctgggcgccgtcgccgcagatccaggccatggacgcgctggagctgcagcggctcaaggacaagctctacatcatgctggaagaggtggaccggagataccggcggtactgcgagcagatgcgggcgctggcgggcgggttcgaggcggtggccggggagcgcgcggcggcggcgtacacggcgctggcgtcgcgcaccatctcgcggcacttccggagcctccgggacggcgtggtggcgcagctgcaggcggcgcgcagggcgctcggggagaaggacgtggcggtgcccgggatgacgcgcggggacacgcccaggctcagggtgctcgaccagtgcatccgccagcacaaggcgctcacccaggccgccggcatgatggagagccacccgtggcgcccgcagcgcggactccccgagcgcgccgtcaccatcctccgggcgtggctcttcgagcacttcctgcacccgtatccaagcgacgtcgacaagcatatcctggctcgccagacgggcctctcacggagccaggtgtccaactggttcatcaatgcgcgggtcaggctctggaagccaatggtggaggagatgtacgtggaggagatgaaggccgagggccaggacggcgggggccagcagcaggtaggcgtcgccgtcgccaacaaccctaaccctagcagcgccggccacgcctccgaggcggctgaggacgatgggcgcggggacagcggcggcggcgccgtcgtcgaccggaagccgacgcgggcgcagctcctgcacgacgccggctcgctcgcctcggtcgtcaacatcggcggcggatcgcgcgcgggattcggcatcatggaccacctcgacttcgacgcctacggcggccaccatgccggcgccgtgtccctcacgctgggcctgcagcagcacgactcccacgccgacggcggcgccggcggcgtcaacatcgcgttcggcgcgccgccgcccgcgcaccaccacgggtacctgttcgctccgacggcggcggcggcaggccatcagatgggcggcggcgtgcacccgggactacaccaccacgtccagttcagcggcgccggcgccggcatcgacggcgaggcggcgcacgggcaggagcactaccggggcctgcagggcggcggcgggttccacctcctgcgtgacctggccgggtgatcgatctgctccatccacggcccgtgcatccgcggtcggccgcgcgcgagctctagctgcgactccgagtgagctgagcgatggggacgtcgtgccggcgcctagctagctaccgggtgtccgcgccggattcatggcacgcactcgatcgcgcgtgcgctcatccggccacagcggcgctgtgtacgtacgcaccggatttgtttggcttgttgcttgcctggctcgtgccggtctccatcggtctcgatcgccgccggcggcggcttggccgggcccgggtctagctggctagctagctgccctagttatacataatatatgtatttgtagcgtgtacagatcgggtcgcgatcgagcagtttggacgcgcgcaggtgcagctagtactagtagtagctagcccgccggaactgcgtagttgatcaaacacgcattgcatgcaggttaattgcattgtttgtcaatttcttgaaggattcgacgacgtacggcacaatttataccaggcattattgacgattttcctggcagaatattcatcagtccatatgcccatgcatgtttgcgaattgtctatatgtatgtttgtgattggctggtgtgtaagcctctggttagtttgcattatctaaacttttcgtaaacaaaaaaaggtgagagcgtcagctaatgttttttttcataaattgagtggctgaacaatttgaaatgagctataagagtcagg

SEQ ID NO: 215029 - DNA, 3453 bp, Zea Mays
gggcatgggccactactgctagtgctagtgctagtagcagcggcacagcgcggagaggcagagaagtagccaaagccaagtaggaggaggaggaggaggcagggcgcggggcgagagcttgacgcggcaaccaccgctgcactgcactgcacccctcgctcctccgagctcagcagcagcagcagcagcagctcgctcgcggcatgtcgccatgtatgcttttgctggcgcccgtcgcccccacccttttcccgttccccttccccgctcgcggatgagatctttgggtttggttggtttctttaagacccgagcgtccaaatcacccctgtgctactgctgtgcctgccttttcttttgatcccaatttcctccttttccacccctgccctcccccaacacaaagcgagattcttgcttgcttggcagaggtaaagagggggggcctatggctacctagctatctatctgctagcggctcgtgctactattcttgctctcccccgatgattgctacttgcaacgcatcttatttgacttaattagcttgcttgcttgcttatgttttctcctttttctctctcttttctcatcaggactgtatatgttttctctggtatatgtgtgtgtatacatctctctctctctctctctcttttgctgtgtgtctgtgttcctcgttgatcgatgatcatgcgtgtcgtctgggctggtcgacgatgagctatagctggccatgtcaggaaagatttatctggtcggccgatcgagctcctctcctccgaagcactgaagctccagcggctgccctgcctgacagccactccgcacgacaaaattaaaaagcgcgggcgatcaagatggcgcacgaccccagcctgggcttcgcggactacttctcggcggcggcggcggcgggcgccacggcgatggacgacgacgtcggggcgccggagctctatggcctgcatgccgacgacatggagttcctcggcatgcgtggcctggccgccatgccccccgccgcggcacaccaccagcaccaccaccatcacggccacagcaaggccggtgcgctcctcgacgacgacgacgcgggggtggggccagacgtcagcggctccgcggacgacgccaccatgcgcttcctgagcgagcagcagcagcagcagcaccaggcgccgctgtcgctgtcgctgtgccggccggacgtggcgacgacgttgcacgagcagcagcacctcgccggcggtggctcctcgtcccggtaccatcaggagcagcagccggcggcgtgggtgcagcagcagcacgactactcgccgtcgccgcagcagcacgcgtggcacctgcgcagctccaggttcctcgtcccggcgcagcaggtcctgcaggagttctgcagcctccccgtggacagcagcagcgctgccgcctccagcaagcgcgccaaggccgcaaataagccggcctcgcagcagcagcagcagcaagaagacggcggcggcgccgaggggtcgtcgtcgtcggcctcctgggcgccgtcgccgcagatccaggccatggacgcgctggagctgcagcggctcaaggacaagctctacatcatgctggaagaggtggaccggagataccggcggtactgcgagcagatgcgggcgctggcgggcgggttcgaggcggtggccggggagcgcgcggcggcggcgtacacggcgctggcgtcgcgcaccatctcgcggcacttccggagcctccgggacggcgtggtggcgcagctgcaggcggcgcgcagggcgctcggggagaaggacgtggcggtgcccgggatgacgcgcggggacacgcccaggctcagggtgctcgaccagtgcatccgccagcacaaggcgctcacccaggccgccggcatgatggagagccacccgtggcgcccgcagcgcggactccccgagcgcgccgtcaccatcctccgggcgtggctcttcgagcacttcctgcacccgtatccaagcgacgtcgacaagcatatcctggctcgccagacgggcctctcacggagccaggtgtccaactggttcatcaatgcgcgggtcaggctctggaagccaatggtggaggagatgtacgtggaggagatgaaggccgagggccaggacggcgggggccagcagcaggtaggcgtcgccgtcgccaacaaccctaaccctagcagcgccggccacgcctccgaggcggctgaggacgatgggcgcggggacagcggcggcggcgccgtcgtcgaccggaagccgacgcgggcgcagctcctgcacgacgccggctcgctcgcctcggtcgtcaacatcggcggcggatcgcgcgcgggattcggcatcatggaccacctcgacttcgacgcctacggcggccaccatgccggcgccgtgtccctcacgctgggcctgcagcagcacgactcccacgccgacggcggcgccggcggcgtcaacatcgcgttcggcgcgccgccgcccgcgcaccaccacgggtacctgttcgctccgacggcggcggcggcaggccatcagatgggcggcggcgtgcacccgggactacaccaccacgtccagttcagcggcgccggcgccggcatcgacggcgaggcggcgcacgggcaggagcactaccggggcctgcagggcggcggcgggttccacctcctgcgtgacctggccgggtgatcgatctgctccatccacggcccgtgcatccgcggtcggccgcgcgcgagctctagctgcgactccgagtgagctgagcgatggggacgtcgtgccggcgcctagctagctaccgggtgtccgcgccggattcatggcacgcactcgatcgcgcgtgcgctcatccggccacagcggcgctgtgtacgtacgcaccggatttgtttggcttgttgcttgcctggctcgtgccggtctccatcggtctcgatcgccgccggcggcggcttggccgggcccgggtctagctggctagctagctgccctagttatacataatatatgtatttgtagcgtgtacagatcgggtcgcgatcgagcagtttggacgcgcgcaggtgcagctagtactagtagtagctagcccgccggaactgcgtagttgatcaaacacgcattgcatgcaggttaattgcattgtttgtcaatttcttgaaggattcgacgacgtacggcacaatttataccaggcattattgacgattttcctggcagaatattcatcagtccatatgcccatgcatgtttgcgaattgtctatatgtatgtttgtgattggctggtgtgtaagcctctggttagtttgcattatctaaacttttcgtaaacaaaaaaaggtgagagcgtcagctaatgttttttttcataaattgagtggctgaacaatttgaaatgagctataagagtcagg

SEQ ID NO: 215030 - DNA, 2607 bp, Zea Mays
gggcatgggccactactgctagtgctagtgctagtagcagcggcacagcgcggagaggcagagaagtagccaaagccaagtaggaggaggaggaggaggcagggcgcggggcgagagcttgacgcggcaaccaccgctgcactgcactgcacccctcgctcctccgagctcagcagcagcagcagcagcagctcgctcgcggcatgtcgccatgtatgcttttgctggcgcccgtcgcccccacccttttcccgttccccttccccgctcgcggatgagatctttgggtttggttggtttctttaagacccgagcgtccaaatcacccctgtgctactgctgtgcctgccttttcttttgatcccaatttcctccttttccacccctgccctcccccaacacaaagcgagattcttgcttgcttggcagaggtaaagagggggggcctatggctacctagctatctatctgctagcggctcgtgctactattcttgctctcccccgatgattgctacttgcaacgcatcttatttgacttaattagcttgcttgcttgcttatgttttctcctttttctctctcttttctcatcaggactgtatatgttttctctggtatatgtgtgtgtatacatctctctctctctctctctcttttgctgtgtgtctgtgttcctcgttgatcgatgatcatgcgtgtcgtctgggctggtcgacgatgagctatagctgggtagtatcagtagctagtagctatccccatgcatggatcatatcactgctggccggccggccggtggtcgctgagcactaactacgtgcctcttgtagccatgtcaggaaagatttatctggtcggccgatcgagctcctctcctccgaagcactgaagctccagcggctgccctgcctgacagccactccgcacgacaaaattaaagcgcgcagggcgctcggggagaaggacgtggcggtgcccgggatgacgcgcggggacacgcccaggctcagggtgctcgaccagtgcatccgccagcacaaggcgctcacccaggccgccggcatgatggagagccacccgtggcgcccgcagcgcggactccccgagcgcgccgtcaccatcctccgggcgtggctcttcgagcacttcctgcacccgtatccaagcgacgtcgacaagcatatcctggctcgccagacgggcctctcacggagccaggtgtccaactggttcatcaatgcgcgggtcaggctctggaagccaatggtggaggagatgtacgtggaggagatgaaggccgagggccaggacggcgggggccagcagcaggtaggcgtcgccgtcgccaacaaccctaaccctagcagcgccggccacgcctccgaggcggctgaggacgatgggcgcggggacagcggcggcggcgccgtcgtcgaccggaagccgacgcgggcgcagctcctgcacgacgccggctcgctcgcctcggtcgtcaacatcggcggcggatcgcgcgcgggattcggcatcatggaccacctcgacttcgacgcctacggcggccaccatgccggcgccgtgtccctcacgctgggcctgcagcagcacgactcccacgccgacggcggcgccggcggcgtcaacatcgcgttcggcgcgccgccgcccgcgcaccaccacgggtacctgttcgctccgacggcggcggcggcaggccatcagatgggcggcggcgtgcacccgggactacaccaccacgtccagttcagcggcgccggcgccggcatcgacggcgaggcggcgcacgggcaggagcactaccggggcctgcagggcggcggcgggttccacctcctgcgtgacctggccgggtgatcgatctgctccatccacggcccgtgcatccgcggtcggccgcgcgcgagctctagctgcgactccgagtgagctgagcgatggggacgtcgtgccggcgcctagctagctaccgggtgtccgcgccggattcatggcacgcactcgatcgcgcgtgcgctcatccggccacagcggcgctgtgtacgtacgcaccggatttgtttggcttgttgcttgcctggctcgtgccggtctccatcggtctcgatcgccgccggcggcggcttggccgggcccgggtctagctggctagctagctgccctagttatacataatatatgtatttgtagcgtgtacagatcgggtcgcgatcgagcagtttggacgcgcgcaggtgcagctagtactagtagtagctagcccgccggaactgcgtagttgatcaaacacgcattgcatgcaggttaattgcattgtttgtcaatttcttgaaggattcgacgacgtacggcacaatttataccaggcattattgacgattttcctggcagaatattcatcagtccatatgcccatgcatgtttgcgaattgtctatatgtatgtttgtgattggctggtgtgtaagcctctggttagtttgcattatctaaacttttcgtaaacaaaaaaaggtgagagcgtcagctaatgttttttttcataaattgagtggctgaacaatttgaaatgagctataagagtcagg

SEQ ID NO: 215031 - DNA, 1864 bp, Zea Mays
gccttttctttcgcttctgcatgctgctaggtggaccggagataccggcggtactgcgagcagatgcgggcgctggcgggcgggttcgaggcggtggccggggagcgcgcggcggcggcgtacacggcgctggcgtcgcgcaccatctcgcggcacttccggagcctccgggacggcgtggtggcgcagctgcaggcggcgcgcagggcgctcggggagaaggacgtggcggtgcccgggatgacgcgcggggacacgcccaggctcagggtgctcgaccagtgcatccgccagcacaaggcgctcacccaggccgccggcatgatggagagccacccgtggcgcccgcagcgcggactccccgagcgcgccgtcaccatcctccgggcgtggctcttcgagcacttcctgcacccgtatccaagcgacgtcgacaagcatatcctggctcgccagacgggcctctcacggagccaggtgtccaactggttcatcaatgcgcgggtcaggctctggaagccaatggtggaggagatgtacgtggaggagatgaaggccgagggccaggacggcgggggccagcagcaggtaggcgtcgccgtcgccaacaaccctaaccctagcagcgccggccacgcctccgaggcggctgaggacgatgggcgcggggacagcggcggcggcgccgtcgtcgaccggaagccgacgcgggcgcagctcctgcacgacgccggctcgctcgcctcggtcgtcaacatcggcggcggatcgcgcgcgggattcggcatcatggaccacctcgacttcgacgcctacggcggccaccatgccggcgccgtgtccctcacgctgggcctgcagcagcacgactcccacgccgacggcggcgccggcggcgtcaacatcgcgttcggcgcgccgccgcccgcgcaccaccacgggtacctgttcgctccgacggcggcggcggcaggccatcagatgggcggcggcgtgcacccgggactacaccaccacgtccagttcagcggcgccggcgccggcatcgacggcgaggcggcgcacgggcaggagcactaccggggcctgcagggcggcggcgggttccacctcctgcgtgacctggccgggtgatcgatctgctccatccacggcccgtgcatccgcggtcggccgcgcgcgagctctagctgcgactccgagtgagctgagcgatggggacgtcgtgccggcgcctagctagctaccgggtgtccgcgccggattcatggcacgcactcgatcgcgcgtgcgctcatccggccacagcggcgctgtgtacgtacgcaccggatttgtttggcttgttgcttgcctggctcgtgccggtctccatcggtctcgatcgccgccggcggcggcttggccgggcccgggtctagctggctagctagctgccctagttatacataatatatgtatttgtagcgtgtacagatcgggtcgcgatcgagcagtttggacgcgcgcaggtgcagctagtactagtagtagctagcccgccggaactgcgtagttgatcaaacacgcattgcatgcaggttaattgcattgtttgtcaatttcttgaaggattcgacgacgtacggcacaatttataccaggcattattgacgattttcctggcagaatattcatcagtccatatgcccatgcatgtttgcgaattgtctatatgtatgtttgtgattggctggtgtgtaagcctctggttagtttgcattatctaaacttttcgtaaacaaaaaaaggtgagagcgtcagctaatgttttttttcataaattgagtggctgaacaatttgaaatgagctataagagtcagg

SEQ ID NO: 215032 - DNA, 1630 bp, Zea Mays
aaaagtaatacatgcatgtaacatccatgttactatatactagtacaaaataaactacaatacacacacacatactcctagctagctatatatatattgccatgttgtttgcatcgaccggccgggccgggcattcgttctgagaacaagaaagcttacattatgctaagcaattgcggaggattctttggaaccggccgcgtcgcgtagatgacacatcaattcattggttgccatgtcaaggtgtccaactggttcatcaatgcgcgggtcaggctctggaagccaatggtggaggagatgtacgtggaggagatgaaggccgagggccaggacggcgggggccagcagcaggtaggcgtcgccgtcgccaacaaccctaaccctagcagcgccggccacgcctccgaggcggctgaggacgatgggcgcggggacagcggcggcggcgccgtcgtcgaccggaagccgacgcgggcgcagctcctgcacgacgccggctcgctcgcctcggtcgtcaacatcggcggcggatcgcgcgcgggattcggcatcatggaccacctcgacttcgacgcctacggcggccaccatgccggcgccgtgtccctcacgctgggcctgcagcagcacgactcccacgccgacggcggcgccggcggcgtcaacatcgcgttcggcgcgccgccgcccgcgcaccaccacgggtacctgttcgctccgacggcggcggcggcaggccatcagatgggcggcggcgtgcacccgggactacaccaccacgtccagttcagcggcgccggcgccggcatcgacggcgaggcggcgcacgggcaggagcactaccggggcctgcagggcggcggcgggttccacctcctgcgtgacctggccgggtgatcgatctgctccatccacggcccgtgcatccgcggtcggccgcgcgcgagctctagctgcgactccgagtgagctgagcgatggggacgtcgtgccggcgcctagctagctaccgggtgtccgcgccggattcatggcacgcactcgatcgcgcgtgcgctcatccggccacagcggcgctgtgtacgtacgcaccggatttgtttggcttgttgcttgcctggctcgtgccggtctccatcggtctcgatcgccgccggcggcggcttggccgggcccgggtctagctggctagctagctgccctagttatacataatatatgtatttgtagcgtgtacagatcgggtcgcgatcgagcagtttggacgcgcgcaggtgcagctagtactagtagtagctagcccgccggaactgcgtagttgatcaaacacgcattgcatgcaggttaattgcattgtttgtcaatttcttgaaggattcgacgacgtacggcacaatttataccaggcattattgacgattttcctggcagaatattcatcagtccatatgcccatgcatgtttgcgaattgtctatatgtatgtttgtgattggctggtgtgtaagcctctggttagtttgcattatctaaacttttcgtaaacaaaaaaaggtgagagcgtcagctaatgttttttttcataaattgagtggctgaacaatttgaaatgagctataagagtcagg

SEQ ID NO: 215033 - DNA, 4209 bp, Zea Mays
cctccgcctgtttcgctctctgcgctccaactcaacgcggcccccacccccaccgccgcggcgccgcttgcgccagtgccccctcctcgctttccgctttcatccgggccccactcgccgcttcggtctgagctcggccaaccatcggccatcgccagtgccgctgccgtatccgtcgagtaatgcagcctcccggcccgcctctggcgacgccgcagccgctgccgccggcggtggcggcggagctcgcgcagcttgagtcgaggctgggccaggtcgccggagagcccgcgcgccacgagctcgcggagctaggcgaagtcgccgcggttcgcgtgctacgtaggatcgcgaggtctcaagagcaggtccggacgctcactggctacatcgtctcggctgcggtgcaggagacgttcgcgctcaatgcgcaggccgtccccaccgccgagagccgcgcctgcaactcctccgctccttccctaagtgatggatctgtacaagggccgcagtgcgccagtgaacttcgaatggaagaagtaactgcgggcctctcaaactatcgcatggcaatatgcgagggtcaaggtcaggaggatcatgcagtgatgatggcaattgacaacccacctgactgcatccccccctggggttgggaccaagattgcattgaagttgataaccttgtgccaggaattgcttctcaggcaaaccagatgcctatgcagtatggcgaccgcgaccgtatccaagaactagtttctattgtaccacatggtgttcgtatgctggctgaaagtcttgaaaatggcagagcatctgagttgcagaactatgtacaaaatggcattcccgaacagtggatggttccagcagatcaaagaatggaatccacctcgagccgcctgcaacatgttttaaaatgtcttcagggagttggaccctttggacaccatctcggtccggaatgtgcaataatgataccaaagcctgagccaaatgttgttgtcgaaaatttgttcagggagatagcaagccctcatatcacagacaacaaattgaggaatacagcgagccctcagatgtgtgcgttggaggatttagagttcagcaagagatttttgatactctcttatctttgtcggaataacctggaagatgaagttgtactgactgtggactatattaaatcgttgaagtttctgtccatggttcattttgagtcccaaatttggaggaaatttggtcagaagaattttcaggcatccaatagagctgcaacagatagggcaaagaatttcgattcagacccaactacaacaaaattataccattgcaatatcgagataagaggggagtccatattctttgttttgaaggggccatatatggagaataagaggacttatctacaaaaagttcttggtgatgataatgttcttctagtaaagtttatggtttcttcagacaagagcactgatttctaccgccaacattaccatagggttgttgaagatggtattgttttgggtctgcgacgatataattttttcggatttttctttggaagttttggaggatgcatgagaaatggtcctcttgtcagggatctgaaacattggagttgcatgcaaatattaagttattggggattcctaacaggctgataaaagcagcagacttcttaatttatctgcattttgctgtgctgcagcagttcttggacttctagttttcagattgattccattggtcttcttccacagtttacaaggatccaggaaaagagacgaaaaagaaagacagtgaacagggggatatcaagaaatgcacttcgcctgtaagatgctattttatttgcactaagtctgggtggaggggggatgaggcttatattccaattgacaagtgccgcaaactgttcatgcatatccatactgctcccaccattgcaaattatatgaaaaggtttcatttgatactttccaaaactctaacactggatgttgatttatcgacaattgacgttatactgattgatgatgaaccttgtcgggacgagcatgggaacattgttatgctagatgggaagcgtttgatccatactgatgggactggcttcatatctgaaaatttggctaagaaatgccctagcagaataatcaaaggaaagaagtcaaaagtttatatgcatcaaggtgaaacaacgcctcttctcatgcaggtccgtcttttttataatggatatgctgtaaagggaactctgctagttgacaaaaggattagtaataatactattgtgatccgaccatcaatggtaaaagtaaaagctgacccaaagttgtgccggatgaagtctctgagttctttggaaatagtttccacaagccatcaatccaataggacatcaacatcaaggatcttgattgcgttgcttcactatggaggagttaaggcagaatattttatggaacttctacataatgcaattgaaggggttaataatgctcgttatagtttcagacacgcgctgaagcttgcatatggatatgctaatatggaggattcaatgttagaacgcatgattcattctggaattccactagaagaaccatacttgctatctaggctgagttttatggccaaacaggaaatgaaagtattcagagaaggaaagctaccaattgatgaatgctattatttgatgggtacaacagatcctacaggaacgctgaaaccaaatgaagtttgtgtgatacttgacagcggacaatactctggagatgttcttgtgtttaaacatcctgggctacattttggcgatatacatatcttaactgcaaggcaaattgatggactagagaagaattttattggatattcaaaaaatgcaatactttttcctacttctggacaaagatcattggctgatgagatggccaatagtgattttgatggtgacgagttctgggtctcaagaaacaatatgttactaaagactttcgagaagcgaagtgagccatgggttgaactattaaaactgaaggagacccagcacaggcttagcaaacctggggatttaaatgaattgattctcgaaagagtgctatttaatgaatgcttgacgactatgtttatacccaattacacaaaaggtttagcgcctgactgttggttagcacatatggaccgattattaacagaaggagtcgatcaagatgagaagaagtcaatcgtggaaaacatgattaaattagttgacctttattatgcggctctggatgggcacaaggtagatgttgatcgccatctgagagtaaaagcatatccacacttcatggagaagaaaggatttgaatcctaccattcttcatctattttgggcagaatctacgatgagactgaggaaataatagcgcagcaatgtgacgaacagatccagataacgacactgccgtgcttcagtgaggtggaggcaaccccggaatgcacctccctatgggaacaccggtaccaggagtacttgacaaagagcaggggccttttcgatctgggcaaggaagaaaagaacgacgagttccagaaactctaccaacactacaaacatctgctatacgacgccgacgaactggaggagacctcgcgggacctctcagacgtgttcatggaggcctgcgcgatatacaggatcgtgtacgagcgagcatggtgtaccaggagcgtcagcaggtgccgtttcgtgtggaacgtggctggagcggcgctgtgccacctccacgcgaccaagtacgcggcgcagcgcggggagaaaaccgcgctctgcccgctctcagttatccgccagctttacatctgatatatatattttttttttggtaaagcagctgatttctgcctgtaaaatgaaacgggtgagctgatgcgtcttaagagaagtatatactggggctctcgatcaacttagtcaagagcttcacagttgctttgatttgatgaggttaatatagaattgctttcttgtacgtcaccagccttcaatcttaaagactcgttcgcatcttttgatacacagaagttgtgtaggtttgccgattttttttatctaaatgacatctggtacagatttattgaagcttgaattgcagttggacaactttattgctgacattcatcgaaaggaagttgagaaataagatagttgtattgaac

SEQ ID NO: 215034 - DNA, 1088 bp, Zea Mays
gtgcagttcaactcggactctagttacacaaaaggtttagcgcctgactgttggttagcacatatggaccgattattaacagaaggagtcgatcaagatgagaagaagtcaatcgtggaaaacatgattaaattagttgacctttattatgcggctctggatgggcacaaggtagatgttgatcgccatctgagagtaaaagcatatccacacttcatggagaagaaaggatttgaatcctaccattcttcatctattttgggcagaatctacgatgagactgaggaaataatagcgcagcaatgtgacgaacagatccagataacgacactgccgtgcttcagtgaggtggaggcaaccccggaatgcacctccctatgggaacaccggtaccaggagtacttgacaaagagcaggggccttttcgatctgggcaaggaagaaaagaacgacgagttccagaaactctaccaacactacaaacatctgctatacgacgccgacgaactggaggagacctcgcgggacctctcagacgtgttcatggaggcctgcgcgatatacaggatcgtgtacgagcgagcatggtgtaccaggagcgtcagcaggtgccgtttcgtgtggaacgtggctggagcggcgctgtgccacctccacgcgaccaagtacgcggcgcagcgcggggagaaaaccgcgctctgcccgctctcagttatccgccagctttacatctgatatatatattttttttttggtaaagcagctgatttctgcctgtaaaatgaaacgggtgagctgatgcgtcttaagagaagtatatactggggctctcgatcaacttagtcaagagcttcacagttgctttgatttgatgaggttaatatagaattgctttcttgtacgtcaccagccttcaatcttaaagactcgttcgcatcttttgatacacagaagttgtgtaggtttgccgattttttttatctaaatgacatctggtacagatttattgaagcttgaattgcagttggacaactttattgctgacattcatcgaaaggaagttgagaaataagatagttgtattgaac

SEQ ID NO: 215035 - DNA, 7920 bp, Zea Mays
ctcgcacccaagcagcaaggcctggaagccaaaggctgcaatcgaacactccggtacttcgccacaccgcgaaagcacggcggctcctatcccgcgcgggcatcgccatgcccgctatccccctcgtgatccccaacgcactagctggctaggcgctcaccgacgttcctctccatggcggcgtcggagcgggaggccgcgctcctcacacgcgtggcagcgaaccacctctttctcgcgcagttcgagcccctgcgtgcggtgctcctcagcctccgccgccgtgacccggtgctatgtgcggacttcctccgcgcggtcgccgctgcgggcggccgcgtcccgggcgtgctctggtccgctccccctgcctgcccgtccccatcccacctcgcctggcttgccgtgctcgaactcgccgccctcccctccactcccaatcccgaggcgctgcgcctgaaggcagagttcctggtcctcctccagcccatcgctgacgaccccgccattggcgccgaggccagagaaatcctcacgaaactgctggatttgggggtgacgaggttgaagctcgaggtcgaaggcggaggggacgcaggtgctagtgccgaggaagcctccgtgaaggatctgagagggctatgggaagtgttcctcgacaacgcctttgtgtttgatgcgttgtgcataggcgtctcgaggcagatcgccttggacaggggtttcggtgtggatgtgctcctatggctgcggcggaacgtgcaacttgcccatttggatgccgtgaagactcttgtcacggaaggtgatctggatgctgctcctggccatcttcggtttctttgccttgaccatggactggagaaggatgagtacaaggttgtcatagcagagcttctcagaaagggatgggcaaaaacatccaattatggtggaacatggtctgagttgcagaataggataactaaattatatggagcagctcttcaatctactagtcccgagctcgtgcaacttgttcagctcattctggataacattctttctgaagaaattgaagatcatgatgtctctgatgctaatgggatgcctcttcctttcgaaaaatttctcgaaacattgttgttggagagggatactgactcagatgacaaggtcttgttggatgcggctataacgtcctgcaaaaaagatctgtaccattattgccgattgtctggaaagcacatgcttgaagtagtcttggaaactgctctatcatcaattaagagggagcagcttcttgaggctgttgatgttgtttcgttgttcccccttctccacccactggttgctgtcttgggatgggatattttgaagggtaaaacaggtctgcggagaaagctaatgcagctgttctggacaagcaaatcccaaggtctacgactacaggaatattcacattaccgtagcccgacagatgagacatcctgtgaagagtacttgtgtgatcttctatgcttccatctggaccttgcacgttttgtttcaagtgttaattctggctgtttgtggaatttgaggaattcattgttgtttacccaacaagagcaaggttcagatgttaacaatgcagaaatattagacccttttgtcgagaacttgatacttgagcggttagctgttcagagtcccatgagagtgctatttgacgtagtcccaggaataaaatttcaagatgcgatcgagcttgttggtatgcagccacttccttcaacaactgccgcttggaagaggatgcatgatattgaactgatgcacatgcgatattctcttcagtcagttgcgcttgctctaggagagatggaaaagtgtacaggtgatgagaatgagtgttattatcataaagcattgtcatatctcagggagatgcaaaattttatggaggctatcaaaagttctccaagaaagattttcatggttagcattattttatccttgttacacatggatgattgtgccaaattgtctcaatctgtcccttctgagtgctatgttagtcatgaatgccatgatataaatatcgaatctgagggaaagaacgtggtggtatattttgttgggcttttacttgatatacttcgtcataatctcgaatcaaaaggctctgatacggatcacctttcaagtactggtctgtcgcctgctggtagacaagcgttagaatggaggctcaaacatgccaaacattctattgaagacctggattggcgtctatctgttctaaaacgtcttccacctctgtctgagcggcaatggagttggaaggaggcattagttcttctacgtgctgctccttcgaaattactgaatctatgcatgcaaagggaaaactatgatataggagaagaagctgtgcaacgattttctttacctgctgaggataaagcttcccttgaactagctgaatgggtagctggtgcatataaaagagcactggttgaggatgctgttaatcgtgtcacagataatacaaatgcagcacatgaattggatattttgtcattacgcacgcagcttggttctttaactacaattctgctttgtgttgatgttgctgcaacatctgctaagtcagttcatatgtgccgatttcttctcgatgaggcaacaagcatgttatctgaaatatttccaggaaggtcccccaaagtaggaccaacttactgggatcagatccaagaacttgctaccatatcagtgataaagcgcatacttcagcgtctgcatgacatcttggatctggatactcttccatctcttcaagtgttctttactgagatgagcatctcttcgtcaacggaatgtagcagagttggacaaaagcaacgtcctcttgggcttctgcaccaaatgattgatgacgccttcaaaggaaagcgacagttcttgagtggtaagcttcacaatgttgctagagctattgttgatgaggactttgatactgtttattcgaaagaaggtgtcaacttagaaaagaaggatattttgagctctgaaaaaggcatactccttggtcacgggcttagaattctaaaacaagcatctaggagtgaccttgcatcttcaaatgttgtggatagtggtccagaacacaaaggttctgcaaacagatatctgggccctctatctaccaagccgtcaacatatttatcaaacttcataatatatactgcaaccattggtgacatagttgatggaactgacacaactcatgatttcaactatttctcgttagtctatgaatggccaaaagatctattaactcgtctggtttttgagcgtggaagcactgatgcagcagcaaaggttgctgacacaatgagtgttgattttgtgcatgagattatatcagcatgtgtgccacctgttttacctccacgaacaggacaaggatgggcttgcattcctgtcatacctaccatttgtaatattagttcagaaaacagactatgcaccaagtcttctcctgctcaaggatggagtgcacatgattcgtccttgtcttctcgtcaagaacccctctatcctctccaattaaatttagtgaagcatttagcccagttatcttcagtaagagcagttttggcctgtgtatttggaagcagcatactatctggggacaatgaatcatcttttactcatgtgaaagattcaacacaagctccagaaactgagagatcattttttgaatttgctcttgagcaatcagagagatatccaaccttgaaccggtggatacagatgcagtctaatcttcatcgagtatccgagtcttctataacagataaatccgaagtctctttgcatcaatccaagggaaagttttgtatgaagcgaacccgtgagtctgacagtgatggtgaatcagagcttgaagagaatgtcataagcgggaacaccagttcaagttcactagaatccactaaacatgaagacgctaggctagagccaacaacttttatttcatttgattgggagaatgaagcaccatatgaaaaagctgttgagaggttaattagtgaaggaaaattaagtgatgctcttgctgtgtctgatcgttgtttgcgcaatggagcatctgataatttgcttcagttgctcatcgaacagaaggaagaaaaaggtccaggcacaggacaaattcatccatatggatctcacagtcttgggaatgatacttctcagtactgcttgaggctgagagacaaaaaagttgcagctcagctcgctctaaagtacttgcacagctgggaccttgatgctgcaaccaatgttctaactatgtgcatgtgccacttacctgagaatgatcctatgcgcagtgaggtgttgcacatgaagcaatctttacagaggtatggccatatcatgagtgctgatgagcactacactagatggcaagaggtggaagctgattgtgaagatgacccagagggcttggcactccgtcttgctgccaaaggagctgtttccgctgctttggaggttgctgaaagtgcctctttatcaattgatttgcggagggagttgcaaggccgtcagcttgtcaaactgctaatcactgatccacttaatggcggaggcccagctgcagcttcaagatttctgtcaactttaagggattccaatgatgctcttcctgtagccattggtgctatgaatttattacctgacctgcgttcaaagcagcttcttgtgcatttcttcctcaagcgtacagttgggaatctatcagatgctgagattgcacggcttaatttgtgggcattaggtctccgtgttctttccttattgccattgccatcacaacagcgttgttcttctctgcacgaacaccctcagttgatcgtagaagtactgttgatgatgaaacaactccagtctgcttctttgattttgaaagaattttcttccttgagggatgataagttaattattgcgtatgctaaaaaagcaatctcaattaacagagaagcacgcaaagcattctcatgggtcccccgtgatagtggcactaaaacacccccaaaagatatccttcggaaaagaaagagttcaggctctggaggtgatagatcctcttgggaagcaatgcctggtttacaggaggagcggacacctgtatatccttctgaggcgcaagaaagacttccttttgtctctgctcctgatgagtgggtgctgacgggagatcctgacaaggatgatgcaactcgttcatcccataaatatgaaacctctcctgatatcacactgttcaaggcattgatatccttgtgcaccaatgagtcagtagctgcaaaaggtgcacttgaattgtgtatgactcagatgaaggttgtgctaagctcccaacagttgcctcttgatgcctctatggacaacatagcccgggcttatcatgcaacggaaacttatgtacaggcactctcttatgctaagaatctatttaaaaagctcgttggtagtagtgatttgtcaagtggctctgaaagaagtaaggaagttgatgatgtttctgtggacactggcagttcaagcactgggagccagtatctggatgagctgtctgatttcctaactcaagcagacatgtggttagggcgtgcagagcttcttcaaagcctgctgggatcaggtattattgcctcgctggatgatatagctgacaaagaatcttcaagtagactacgtgacagattggtcaacgatgaacggtacagcatggctgtatatacttgtagaaagtgcaagattgatgctgtaccagtatgggttgcatggggccatgcattagttcgaatggagcactatgctcaagctcgtgtgaagttcaagcaagcacttcaacaatacaaaggcgatgcaacttctgttgttactgaaataatcaacacaattgaaggagggcctccagttgatgtttcttctgtccgttccatgtatgagcatttggcaaagagtgcggcgaccatctttgatgattccctttctgctgatgcttatctgaatgttctgtacatgccatcgacatttccacgatctgagaggtcccgacagtccagaggtcatgtagacagccaattcaggactgctagttcctaccttgaagatggccctcgcagcaatcttgatagtgtccgatatgctgagtgtattcattacttgcaagattatgctcggccacaaatgcttgctttcatgttcaggcatggccattacactgaagcatgctctctgttcttcccattcagtcaaccaaccacggaaggggaaacatctttgtcttcagctccatggagtgatcctttaacaactgattatgggacaattgatgacttgtgtgatctctgtcttggatatggtgccatggctgttttggagaatacaatacggacaataacacaatcgcccacatatcatgaggcacacatgattcagtacatgaacactattatcacccgcatttgcaactattgtgaaacacacaggcattttaattatctctacaacttcctggttctaaaagatgaccatgttgcttctggcctttgttgtattcaattatttatgaattcaatgtctcaagaggaggctttgaggcatttgggacatgccaagacacatttcgaagaagccttatctgtacgagatagaacaatcgaggctactaagttggtattgcggtctgctcggaataagggtgcacctggaaaaatgaccagggaaacgataatgaaatattccactcgtgtttcctatcaggcgaaggtgcatggttgttgaaactctggctgaaaagcattttgatttagctttcagaatgcttcatgagtttgatctcccagctgttgatatttatgctggggtagctgcatccctcgcagaaaggaaaaaagggggccagttgacagagttcttgaagaatataagggggactatagatgatgatgaatgggatcaggttattggtgctgctataaatgtttatgccaacaagcataaagaaagaccagatcgccttatcgacatgctaatcagcaatcacaggaaagtacttgcttgtgttgtctgtggacgtctaaaaagtgcattccaaatagccgcacgaagtggaagtgtcgctgatgttcaatatgttgcccatcaggcattacatgcaaatgcattgacagtgcttgatatgtgtaagcaatggctcgcgcagtacatgtgataccatagatacttgctgagagagttctcacgtgaagacagaaaaactaaggggcatttggtttgaagagtcaatctattttagatgatgttgtgtatcataagtttattttataaatttggtggaataaattcgttctccatattattactaattatgagcttatgatgaatgaaatgctgatgaatcaatttattatattcaacaaactaaaaaagaaagtgagaggtgagaagatgatagactatcttaatccttaaaccaaacatgtcacaagtaatcaaagcaaggaaccatctgaaagctggtgttcaatcctcatatcccatttcaacttctttccgctttccacttcgtgcagcacaatgcctccatgtgtatatgcctctttaagggcatattcgttatactatcctattgcattctttggtctttgctgctccctcggtcctaaattataaaatattttctagatttatagctttttgttatgtatttaaatatacattgtatctaaatatatagtaaaaaataatgtacgtagaaaaatcaaaacgttttataatttagtgttgtaaagctttgtaatttcattacttgtccatccagtgagactgtttaattgtgagcgcttggcagcccacaaaacagtcagtgccagc

SEQ ID NO: 215036 - DNA, 7433 bp, Zea Mays
ctggaagccaaaggctgcaatcgaacactccggtacttcgccacaccgcgaaagcacggcggctcctatcccgcgcgggcatcgccatgcccgctatccccctcgtgatccccaacgcactagctggctaggcgctcaccgacgttcctctccatggcggcgtcggagcgggaggccgcgctcctcacacgcgtggcagcgaaccacctctttctcgcgcagttcgagcccctgcgtgcggtgctcctcagcctccgccgccgtgacccggtgctatgtgcggacttcctccgcgcggtcgccgctgcgggcggccgcgtcccgggcgtgctctggtccgctccccctgcctgcccgtccccatcccacctcgcctggcttgccgtgctcgaactcgccgccctcccctccactcccaatcccgaggcgctgcgcctgaaggcagagttcctggtcctcctccagcccatcgctgacgaccccgccattggcgccgaggccagagaaatcctcacgaaactgctggatttgggggtgacgaggttgaagctcgaggtcgaaggcggaggggacgcaggtgctagtgccgaggaagcctccgtgaaggatctgagagggctatgggaagtgttcctcgacaacgcctttgtgtttgatgcgttgtgcataggcgtctcgaggcagatcgccttggacaggggtttcggtgtggatgtgctcctatggctgcggcggaacgtgcaacttgcccatttggatgccgtgaagactcttgtcacggaaggtgatctggatgctgctcctggccatcttcggtttctttgccttgaccatggactggagaaggatgagtacaaggttgtcatagcagagcttctcagaaagggatgggcaaaaacatccaattatggtggaacatggtctgagttgcagaataggataactaaattatatggagcagctcttcaatctactagtcccgagctcgtgcaacttgttcagctcattctggataacattctttctgaagaaattgaagatcatgatgtctctgatgctaatgggatgcctcttcctttcgaaaaatttctcgaaacattgttgttggagagggatactgactcagatgacaaggtcttgttggatgcggctataacgtcctgcaaaaaagatctgtaccattattgccgattgtctggaaagcacatgcttgaagtagtcttggaaactgctctatcatcaattaagagggagcagcttcttgaggctgttgatgttgtttcgttgttcccccttctccacccactggttgctgtcttgggatgggatattttgaagggtaaaacaggtctgcggagaaagctaatgcagctgttctggacaagcaaatcccaaggtctacgactacaggaatattcacattaccgtagcccgacagatgagacatcctgtgaagagtacttgtgtgatcttctatgcttccatctggaccttgcacgttttgtttcaagtgttaattctggctgtttgtggaatttgaggaattcattgttgtttacccaacaagagcaaggttcagatgttaacaatgcagaaatattagacccttttgtcgagaacttgatacttgagcggttagctgttcagagtcccatgagagtgctatttgacgtagtcccaggaataaaatttcaagatgcgatcgagcttgttggtatgcagccacttccttcaacaactgccgcttggaagaggatgcatgatattgaactgatgcacatgcgatattctcttcagtcagttgcgcttgctctaggagagatggaaaagtgtacaggtgatgagaatgagtgttattatcataaagcattgtcatatctcagggagatgcaaaattttatggaggctatcaaaagttctccaagaaagattttcatggttagcattattttatccttgttacacatggatgattgtgccaaattgtctcaatctgtcccttctgagtgctatgttagtcatgaatgccatgatataaatatcgaatctgagggaaagaacgtggtggtatattttgttgggcttttacttgatatacttcgtcataatctcgaatcaaaaggctctgatacggatcacctttcaagtactggtctgtcgcctgctggtagacaagcgttagaatggaggctcaaacatgccaaacattctattgaagacctggattggcgtctatctgttctaaaacgtcttccacctctgtctgagcggcaatggagttggaaggaggcattagttcttctacgtgctgctccttcgaaattactgaatctatgcatgcaaagggaaaactatgatataggagaagaagctgtgcaacgattttctttacctgctgaggataaagcttcccttgaactagctgaatgggtagctggtgcatataaaagagcactggttgaggatgctgttaatcgtgtcacagataatacaaatgcagcacatgaattggatattttgtcattacgcacgcagcttggttctttaactacaattctgctttgtgttgatgttgctgcaacatctgctaagtcagttcatatgtgccgatttcttctcgatgaggcaacaagcatgttatctgaaatatttccaggaaggtcccccaaagtaggaccaacttactgggatcagatccaagaacttgctaccatatcagtgataaagcgcatacttcagcgtctgcatgacatcttggatctggatactcttccatctcttcaagtgttctttactgagatgagcatctcttcgtcaacggaatgtagcagagttggacaaaagcaacgtcctcttgggcttctgcaccaaatgattgatgacgccttcaaaggaaagcgacagttcttgagtggtaagcttcacaatgttgctagagctattgttgatgaggactttgatactgtttattcgaaagaaggtgtcaacttagaaaagaaggatattttgagctctgaaaaaggcatactccttggtcacgggcttagaattctaaaacaagcatctaggagtgaccttgcatcttcaaatgttgtggatagtggtccagaacacaaaggttctgcaaacagatatctgggccctctatctaccaagccgtcaacatatttatcaaacttcataatatatactgcaaccattggtgacatagttgatggaactgacacaactcatgatttcaactatttctcgttagtctatgaatggccaaaagataatacttgtggcttggtgtctctggctcctatgagcgcatttggaaaacttggtacaaaacagctattaactcgtctggtttttgagcgtggaagcactgatgcagcagcaaaggttgctgacacaatgagtgttgattttgtgcatgagattatatcagcatgtgtgccacctgttttacctccacgaacaggacaaggatgggcttgcattcctgtcatacctaccatttgtaatattagttcagaaaacagactatgcaccaagtcttctcctgctcaaggatggagtgcacatgattcgtccttgtcttctcgtcaagaacccctctatcctctccaattaaatttagtgaagcatttagcccagttatcttcagtaagagcagttttggcctgtgtatttggaagcagcatactatctggggacaatgaatcatcttttactcatgtgaaagattcaacacaagctccagaaactgagagatcattttttgaatttgctcttgagcaatcagagagatatccaaccttgaaccggtggatacagatgcagtctaatcttcatcgagtatccgagtcttctataacagataaatccgaagtctctttgcatcaatccaagggaaagttttgtatgaagcgaacccgtgagtctgacagtgatggtgaatcagagcttgaagagaatgtcataagcgggaacaccagttcaagttcactagaatccactaaacatgaagacgctaggctagagccaacaacttttatttcatttgattgggagaatgaagcaccatatgaaaaagctgttgagaggttaattagtgaaggaaaattaagtgatgctcttgctgtgtctgatcgttgtttgcgcaatggagcatctgataatttgcttcagttgctcatcgaacagaaggaagaaaaaggtccaggcacaggacaaattcatccatatggatctcacagtcttgggaatgatacttctcagtactgcttgaggctgagagacaaaaaagttgcagctcagctcgctctaaagtacttgcacagctgggaccttgatgctgcaaccaatgttctaactatgtgcatgtgccacttacctgagaatgatcctatgcgcagtgaggtgttgcacatgaagcaatctttacagaggtatggccatatcatgagtgctgatgagcactacactagatggcaagaggtggaagctgattgtgaagatgacccagagggcttggcactccgtcttgctgccaaaggagctgtttccgctgctttggaggttgctgaaagtgcctctttatcaattgatttgcggagggagttgcaaggccgtcagcttgtcaaactgctaatcactgatccacttaatggcggaggcccagctgcagcttcaagatttctgtcaactttaagggattccaatgatgctcttcctgtagccattggtgctatgaatttattacctgacctgcgttcaaagcagcttcttgtgcatttcttcctcaagcgtacagttgggaatctatcagatgctgagattgcacggcttaatttgtgggcattaggtctccgtgttctttccttattgccattgccatcacaacagcgttgttcttctctgcacgaacaccctcagttgatcgtagaagtactgttgatgatgaaacaactccagtctgcttctttgattttgaaagaattttcttccttgagggatgataagttaattattgcgtatgctaaaaaagcaatctcaattaacgttagctcagctcctagggaacgtcgatcgaatatctctgcatcaagggcaaaacaaaaaaaggctacaactccagctaaaacaaattttgtgcaaagttttggtaactttcagagagaagcacgcaaagcattctcatgggtcccccgtgatagtggcactaaaacacccccaaaagatatccttcggaaaagaaagagttcaggctctggaggtgatagatcctcttgggaagcaatgcctggtttacaggaggagcggacacctgtatatccttctgaggcgcaagaaagacttccttttgtctctgctcctgatgagtgggtgctgacgggagatcctgacaaggatgatgcaactcgttcatcccataaatatgaaacctctcctgatatcacactgttcaaggcattgatatccttgtgcaccaatgagtcagtagctgcaaaaggtgcacttgaattgtgtatgactcagatgaaggttgtgctaagctcccaacagttgcctcttgatgcctctatggacaacatagcccgggcttatcatgcaacggaaacttatgtacaggcactctcttatgctaagaatctatttaaaaagctcgttggtagtagtgatttgtcaagtggctctgaaagaagtaaggaagttgatgatgtttctgtggacactggcagttcaagcactgggagccagtatctggatgagctgtctgatttcctaactcaagcagacatgtggttagggcgtgcagagcttcttcaaagcctgctgggatcaggtattattgcctcgctggatgatatagctgacaaagaatcttcaagtagactacgtgacagattggtcaacgatgaacggtacagcatggctgtatatacttgtagaaagtgcaagattgatgctgtaccagtatgggttgcatggggccatgcattagttcgaatggagcactatgctcaagctcgtgtgaagttcaagcaagcacttcaacaatacaaaggcgatgcaacttctgttgttactgaaataatcaacacaattgaaggagggcctccagttgatgtttcttctgtccgttccatgtatgagcatttggcaaagagtgcggcgaccatctttgatgattccctttctgctgatgcttatctgaatgttctgtacatgccatcgacatttccacgatctgagaggtcccgacagtccagaggtcatgtagacagccaattcaggactgctagttcctaccttgaagatggccctcgcagcaatcttgatagtgtccgatatgctgagtgtattcattacttgcaagattatgctcggccacaaatgcttgctttcatgttcaggcatggccattacactgaagcatgctctctgttcttcccattcagtcaaccaaccacggaaggggaaacatctttgtcttcagctccatggagtgatcctttaacaactgattatgggacaattgatgacttgtgtgatctctgtcttggatatggtgccatggctgttttggagaatacaatacggacaataacacaatcgcccacatatcatgaggcacacatgattcagtacatgaacactattatcacccgcatttgcaactattgtgaaacacacaggcattttaattatctctacaacttcctggttctaaaagatgaccatgttgcttctggcctttgttgtattcaattatttatgaattcaatgtctcaagaggaggctttgaggcatttgggacatgccaaggcgaaggtgcatggttgttgaaactctggctgaaaagcattttgatttagctttcagaatgcttcatgagtttgatctcccagctgttgatatttatgctggggtagctgcatccctcgcagaaaggaaaaaagggggccagttgacagagttcttgaagaatataagggggactatagatgatgatgaatgggatcaggttattggtgctgctataaatgtttatgccaacaagcataaagaaagaccagatcgccttatcgacatgctaatcagcaatcacaggaaagtacttgcttgtgttgtctgtggacgtctaaaaagtgcattccaaatagccgcacgaagtggaagtgtcgctgatgttcaatatgttgcccatcaggtcagttatcttcacaaatttacagatgtttgctgcttattaataatcgaatgaattttatgttgcatctttctactaccatcaatgacttgtagccccctgcccctcttcaaaactatagttcagctttgtactactccctatcctaaaattactgtcattttagctttgaaagtatgtcccacaaagagtgtcgtttcgctagctacggaagtcctgtgcctattgg

SEQ ID NO: 215037 - DNA, 7853 bp, Zea Mays
ctcctatcccgcgcgggcatcgccatgcccgctatccccctcgtgatccccaacgcactagctggctaggcgctcaccgacgttcctctccatggcggcgtcggagcgggaggccgcgctcctcacacgcgtggcagcgaaccacctctttctcgcgcagttcgagcccctgcgtgcggtgctcctcagcctccgccgccgtgacccggtgctatgtgcggacttcctccgcgcggtcgccgctgcgggcggccgcgtcccgggcgtgctctggtccgctccccctgcctgcccgtccccatcccacctcgcctggcttgccgtgctcgaactcgccgccctcccctccactcccaatcccgaggcgctgcgcctgaaggcagagttcctggtcctcctccagcccatcgctgacgaccccgccattggcgccgaggccagagaaatcctcacgaaactgctggatttgggggtgacgaggttgaagctcgaggtcgaaggcggaggggacgcaggtgctagtgccgaggaagcctccgtgaaggatctgagagggctatgggaagtgttcctcgacaacgcctttgtgtttgatgcgttgtgcataggcgtctcgaggcagatcgccttggacaggggtttcggtgtggatgtgctcctatggctgcggcggaacgtgcaacttgcccatttggatgccgtgaagactcttgtcacggaaggtgatctggatgctgctcctggccatcttcggtttctttgccttgaccatggactggagaaggatgagtacaaggttgtcatagcagagcttctcagaaagggatgggcaaaaacatccaattatggtggaacatggtctgagttgcagaataggataactaaattatatggagcagctcttcaatctactagtcccgagctcgtgcaacttgttcagaaattgaagatcatgatgtctctgatgctaatgggatgcctcttcctttcgaaaaatttctcgaaacattgttgttggagagggatactgactcagatgacaaggtcttgttggatgcggctataacgtcctgcaaaaaagatctgtaccattattgccgattgtctggaaagcacatgcttgaagtagtcttggaaactgctctatcatcaattaagagggagcagcttcttgaggctgttgattggttttctgcaggttgtttcgttgttcccccttctccacccactggttgctgtcttgggatgggatattttgaagggtaaaacaggtctgcggagaaagctaatgcagctgttctggacaagcaaatcccaaggtctacgactacaggaatattcacattaccgtagcccgacagatgagacatcctgtgaagagtacttgtgtgatcttctatgcttccatctggaccttgcacgttttgtttcaagtgttaattctggctgtttgtggaatttgaggaattcattgttgtttacccaacaagagcaaggttcagatgttaacaatgcagaaatattagacccttttgtcgagaacttgatacttgagcggttagctgttcagagtcccatgagagtgctatttgacgtagtcccaggaataaaatttcaagatgcgatcgagcttgttggtatgcagccacttccttcaacaactgccgcttggaagaggatgcatgatattgaactgatgcacatgcgatattctcttcagtcagttgcgcttgctctaggagagatggaaaagtgtacaggtgatgagaatgagtgttattatcataaagcattgtcatatctcagggagatgcaaaattttatggaggctatcaaaagttctccaagaaaggttggctcttctgtgatatgttcttattcagattttcatggttagcattattttatccttgttacacatggatgattgtgccaaattgtctcaatctgtcccttctgagtgctatgttagtcatgaatgccatgatataaatatcgaatctgagggaaagaacgtggtggtatattttgttgggcttttacttgatatacttcgtcataatctcgaatcaaaaggctctgatacggatcacctttcaagtactggtctgtcgcctgctggtagacaagcgttagaatggaggctcaaacatgccaaacattctattgaagacctggattggcgtctatctgttctaaaacgtcttccacctctgtctgagcggcaatggagttggaaggaggcattagttcttctacgtgctgctccttcgaaattactgaatctatgcatgcaaagggaaaactatgatataggagaagaagctgtgcaacgattttctttacctgctgaggataaagcttcccttgaactagctgaatgggtagctggtgcatataaaagagcactggttgaggatgctgttaatcgtgtcacagataatacaaatgcagcacatgaattggatattttgtcattacgcacgcagcttggttctttaactacaattctgctttgtgttgatgttgctgcaacatctgctaagtcagttcatatgtgccgatttcttctcgatgaggcaacaagcatgttatctgaaatatttccaggaaggtcccccaaagtaggaccaacttactgggatcagatccaagaacttgctaccatatcagtgataaagcgcatacttcagcgtctgcatgacatcttggatctggatactcttccatctcttcaagtgttctttactgagatgagcatctcttcgtcaacggaatgtagcagagttggacaaaagcaacgtcctcttgggcttctgcaccaaatgattgatgacgccttcaaaggaaagcgacagttcttgagtggtaagcttcacaatgttgctagagctattgttgatgaggactttgatactgtttattcgaaagaaggtgtcaacttagaaaagaaggatattttgagctctgaaaaaggcatactccttggtcacgggcttagaattctaaaacaagcatctaggagtgaccttgcatcttcaaatgttgtggatagtggtccagaacacaaaggttctgcaaacagatatctgggccctctatctaccaagccgtcaacatatttatcaaacttcataatatatactgcaaccattggtgacatagttgatggaactgacacaactcatgatttcaactatttctcgttagtctatgaatggccaaaagatctattaactcgtctggtttttgagcgtggaagcactgatgcagcagcaaaggttgctgacacaatgagtgttgattttgtgcatgagattatatcagcatgtgtgccacctgttttacctccacgaacaggacaaggatgggcttgcattcctgtcatacctaccatttgtaatattagttcagaaaacagactatgcaccaagtcttctcctgctcaaggatggagtgcacatgattcgtccttgtcttctcgtcaagaacccctctatcctctccaattaaatttagtgaagcatttagcccagttatcttcagtaagagcagttttggcctgtgtatttggaagcagcatactatctggggacaatgaatcatcttttactcatgtgaaagattcaacacaagctccagaaactgagagatcattttttgaatttgctcttgagcaatcagagagatatccaaccttgaaccggtggatacagatgcagtctaatcttcatcgagtatccgagtcttctataacagataaatccgaagtctctttgcatcaatccaagggaaagttttgtatgaagcgaacccgtgagtctgacagtgatggtgaatcagagcttgaagagaatgtcataagcgggaacaccagttcaagttcactagaatccactaaacatgaagacgctaggctagagccaacaacttttatttcatttgattgggagaatgaagcaccatatgaaaaagctgttgagaggttaattagtgaaggaaaattaagtgatgctcttgctgtgtctgatcgttgtttgcgcaatggagcatctgataatttgcttcagttgctcatcgaacagaaggaagaaaaaggtccaggcacaggacaaattcatccatatggatctcacagtcttgggaatgatacttctcagtactgcttgaggctgagagacaaaaaagttgcagctcagctcgctctaaagtacttgcacagctgggaccttgatgctgcaaccaatgttctaactatgtgcatgtgccacttacctgagaatgatcctatgcgcagtgaggtgttgcacatgaagcaatctttacagaggtatggccatatcatgagtgctgatgagcactacactagatggcaagaggtggaagctgattgtgaagatgacccagagggcttggcactccgtcttgctgccaaaggagctgtttccgctgctttggaggttgctgaaagtgcctctttatcaattgatttgcggagggagttgcaaggccgtcagcttgtcaaactgctaatcactgatccacttaatggcggaggcccagctgcagcttcaagatttctgtcaactttaagggattccaatgatgctcttcctgtagccattggtgctatgaatttattacctgacctgcgttcaaagcagcttcttgtgcatttcttcctcaagcgtacagttgggaatctatcagatgctgagattgcacggcttaatttgtgggcattaggtctccgtgttctttccttattgccattgccatcacaacagcgttgttcttctctgcacgaacaccctcagttgatcgtagaagtactgttgatgatgaaacaactccagtctgcttctttgattttgaaagaattttcttccttgagggatgataagttaattattgcgtatgctaaaaaagcaatctcaattaacagagaagcacgcaaagcattctcatgggtcccccgtgatagtggcactaaaacacccccaaaagatatccttcggaaaagaaagagttcaggctctggaggtgatagatcctcttgggaagcaatgcctggtttacaggaggagcggacacctgtatatccttctgaggcgcaagaaagacttccttttgtctctgctcctgatgagtgggtgctgacgggagatcctgacaaggatgatgcaactcgttcatcccataaatatgaaacctctcctgatatcacactgttcaaggcattgatatccttgtgcaccaatgagtcagtagctgcaaaaggtgcacttgaattgtgtatgactcagatgaaggttgtgctaagctcccaacagttgcctcttgatgcctctatggacaacatagcccgggcttatcatgcaacggaaacttatgtacaggcactctcttatgctaagaatctatttaaaaagctcgttggtagtagtgatttgtcaagtggctctgaaagaagtaaggaagttgatgatgtttctgtggacactggcagttcaagcactgggagccagtatctggatgagctgtctgatttcctaactcaagcagacatgtggttagggcgtgcagagcttcttcaaagcctgctgggatcaggtattattgcctcgctggatgatatagctgacaaagaatcttcaagtagactacgtgacagattggtcaacgatgaacggtacagcatggctgtatatacttgtagaaagtgcaagattgatgctgtaccagtatgggttgcatggggccatgcattagttcgaatggagcactatgctcaagctcgtgtgaagttcaagcaagcacttcaacaatacaaaggcgatgcaacttctgttgttactgaaataatcaacacaattgaaggagggcctccagttgatgtttcttctgtccgttccatgtatgagcatttggcaaagagtgcggcgaccatctttgatgattccctttctgctgatgcttatctgaatgttctgtacatgccatcgacatttccacgatctgagaggtcccgacagtccagaggtcatgtagacagccaattcaggactgctagttcctaccttgaagatggccctcgcagcaatcttgatagtgtccgatatgctgagtgtattcattacttgcaagattatgctcggccacaaatgcttgctttcatgttcaggcatggccattacactgaagcatgctctctgttcttcccattcagtcaaccaaccacggaaggggaaacatctttgtcttcagctccatggagtgatcctttaacaactgattatgggacaattgatgacttgtgtgatctctgtcttggatatggtgccatggctgttttggagaatacaatacggacaataacacaatcgcccacatatcatgaggcacacatgattcagtacatgaacactattatcacccgcatttgcaactattgtgaaacacacaggcattttaattatctctacaacttcctggttctaaaagatgaccatgttgcttctggcctttgttgtattcaattatttatgaattcaatgtctcaagaggaggctttgaggcatttgggacatgccaagacacatttcgaagaagccttatctgtacgagatagaacaatcgaggctactaagttggtattgcggtctgctcggaataagggtgcacctggaaaaatgaccagggaaacgataatgaaatattccactcgtgtttcctatcaggcgaaggtgcatggttgttgaaactctggctgaaaagcattttgatttagctttcagaatgcttcatgagtttgatctcccagctgttgatatttatgctggggtagctgcatccctcgcagaaaggaaaaaagggggccagttgacagagttcttgaagaatataagggggactatagatgatgatgaatgggatcaggttattggtgctgctataaatgtttatgccaacaagcataaagaaagaccagatcgccttatcgacatgctaatcagcaatcacaggaaagtacttgcttgtgttgtctgtggacgtctaaaaagtgcattccaaatagccgcacgaagtggaagtgtcgctgatgttcaatatgttgcccatcaggcattacatgcaaatgcattgacagtgcttgatatgtgtaagcaatggctcgcgcagtacatgtgataccatagatacttgctgagagagttctcacgtgaagacagaaaaactaaggggcatttggtttgaagagtcaatctattttagatgatgttgtgtatcataagtttattttataaatttggtggaataaattcgttctccatattattactaattatgagcttatgatgaatgaaatgctgatgaatcaatttattatattcaacaaactaaaaaagaaagtgagaggtgagaagatgatagactatcttaatccttaaaccaaacatgtcacaagtaatcaaagcaaggaaccatctgaaagctggtgttcaatcctcatatcccatttcaacttctttccgctttccacttcgtgcagcacaatgcctccatgtgtatatgcctctttaagggcatattcgttatactatcctattgcattctttggtctttgctgctccctcggtcctaaattataaaatattttctagatttatagctttttgttatgtatttaaatatacattgtatctaaatatatagtaaaaaataatgtacgtagaaaaatcaaaacgttttataatttagtgttgtaaagctttgtaatttcattacttgtccatccagtgagactgtttaattgtgagcgcttggcagcccacaaaacagtcagtgccagc

SEQ ID NO: 215038 - DNA, 5309 bp, Zea Mays
cttggcgtgggttgtccctcccagtgcaacgtcaggcaacaagcatgttatctgaaatatttccaggaaggtcccccaaagtaggaccaacttactgggatcagatccaagaacttgctaccatatcagtgataaagcgcatacttcagcgtctgcatgacatcttggatctggatactcttccatctcttcaagtgttctttactgagatgagcatctcttcgtcaacggaatgtagcagagttggacaaaagcaacgtcctcttgggcttctgcaccaaatgattgatgacgccttcaaaggaaagcgacagttcttgagtggtaagcttcacaatgttgctagagctattgttgatgaggactttgatactgtttattcgaaagaaggtgtcaacttagaaaagaaggatattttgagctctgaaaaaggcatactccttggtcacgggcttagaattctaaaacaagcatctaggagtgaccttgcatcttcaaatgttgtggatagtggtccagaacacaaaggttctgcaaacagatatctgggccctctatctaccaagccgtcaacatatttatcaaacttcataatatatactgcaaccattggtgacatagttgatggaactgacacaactcatgatttcaactatttctcgttagtctatgaatggccaaaagatctattaactcgtctggtttttgagcgtggaagcactgatgcagcagcaaaggttgctgacacaatgagtgttgattttgtgcatgagattatatcagcatgtgtgccacctgttttacctccacgaacaggacaaggatgggcttgcattcctgtcatacctaccatttgtaatattagttcagaaaacagactatgcaccaagtcttctcctgctcaaggatggagtgcacatgattcgtccttgtcttctcgtcaagaacccctctatcctctccaattaaatttagtgaagcatttagcccagttatcttcagtaagagcagttttggcctgtgtatttggaagcagcatactatctggggacaatgaatcatcttttactcatgtgaaagattcaacacaagctccagaaactgagagatcattttttgaatttgctcttgagcaatcagagagatatccaaccttgaaccggtggatacagatgcagtctaatcttcatcgagtatccgagtcttctataacagataaatccgaagtctctttgcatcaatccaagggaaagttttgtatgaagcgaacccgtgagtctgacagtgatggtgaatcagagcttgaagagaatgtcataagcgggaacaccagttcaagttcactagaatccactaaacatgaagacgctaggctagagccaacaacttttatttcatttgattgggagaatgaagcaccatatgaaaaagctgttgagaggttaattagtgaaggaaaattaagtgatgctcttgctgtgtctgatcgttgtttgcgcaatggagcatctgataatttgcttcagttgctcatcgaacagaaggaagaaaaaggtccaggcacaggacaaattcatccatatggatctcacagtcttgggaatgatacttctcagtactgcttgaggctgagagacaaaaaagttgcagctcagctcgctctaaagtacttgcacagctgggaccttgatgctgcaaccaatgttctaactatgtgcatgtgccacttacctgagaatgatcctatgcgcagtgaggtgttgcacatgaagcaatctttacagaggtatggccatatcatgagtgctgatgagcactacactagatggcaagaggtggaagctgattgtgaagatgacccagagggcttggcactccgtcttgctgccaaaggagctgtttccgctgctttggaggttgctgaaagtgcctctttatcaattgatttgcggagggagttgcaaggccgtcagcttgtcaaactgctaatcactgatccacttaatggcggaggcccagctgcagcttcaagatttctgtcaactttaagggattccaatgatgctcttcctgtagccattggtgctatgaatttattacctgacctgcgttcaaagcagcttcttgtgcatttcttcctcaagcgtacagttgggaatctatcagatgctgagattgcacggcttaatttgtgggcattaggtctccgtgttctttccttattgccattgccatcacaacagcgttgttcttctctgcacgaacaccctcagttgatcgtagaagtactgttgatgatgaaacaactccagtctgcttctttgattttgaaagaattttcttccttgagggatgataagttaattattgcgtatgctaaaaaagcaatctcaattaacagagaagcacgcaaagcattctcatgggtcccccgtgatagtggcactaaaacacccccaaaagatatccttcggaaaagaaagagttcaggctctggaggtgatagatcctcttgggaagcaatgcctggtttacaggaggagcggacacctgtatatccttctgaggcgcaagaaagacttccttttgtctctgctcctgatgagtgggtgctgacgggagatcctgacaaggatgatgcaactcgttcatcccataaatatgaaacctctcctgatatcacactgttcaaggcattgatatccttgtgcaccaatgagtcagtagctgcaaaaggtgcacttgaattgtgtatgactcagatgaaggttgtgctaagctcccaacagttgcctcttgatgcctctatggacaacatagcccgggcttatcatgcaacggaaacttatgtacaggcactctcttatgctaagaatctatttaaaaagctcgttggtagtagtgatttgtcaagtggctctgaaagaagtaaggaagttgatgatgtttctgtggacactggcagttcaagcactgggagccagtatctggatgagctgtctgatttcctaactcaagcagacatgtggttagggcgtgcagagcttcttcaaagcctgctgggatcaggtattattgcctcgctggatgatatagctgacaaagaatcttcaagtagactacgtgacagattggtcaacgatgaacggtacagcatggctgtatatacttgtagaaagtgcaagattgatgctgtaccagtatgggttgcatggggccatgcattagttcgaatggagcactatgctcaagctcgtgtgaagttcaagcaagcacttcaacaatacaaaggcgatgcaacttctgttgttactgaaataatcaacacaattgaaggagggcctccagttgatgtttcttctgtccgttccatgtatgagcatttggcaaagagtgcggcgaccatctttgatgattccctttctgctgatgcttatctgaatgttctgtacatgccatcgacatttccacgatctgagaggtcccgacagtccagaggtcatgtagacagccaattcaggactgctagttcctaccttgaagatggccctcgcagcaatcttgatagtgtccgatatgctgagtgtattcattacttgcaagattatgctcggccacaaatgcttgctttcatgttcaggcatggccattacactgaagcatgctctctgttcttcccattcagtcaaccaaccacggaaggggaaacatctttgtcttcagctccatggagtgatcctttaacaactgattatgggacaattgatgacttgtgtgatctctgtcttggatatggtgccatggctgttttggagaatacaatacggacaataacacaatcgcccacatatcatgaggcacacatgattcagtacatgaacactattatcacccgcatttgcaactattgtgaaacacacaggcattttaattatctctacaacttcctggttctaaaagatgaccatgttgcttctggcctttgttgtattcaattatttatgaattcaatgtctcaagaggaggctttgaggcatttgggacatgccaagacacatttcgaagaagccttatctgtacgagatagaacaatcgaggctactaagttggtattgcggtctgctcggaataagggtgcacctggaaaaatgaccagggaaacgataatgaaatattccactcgtgtttcctatcaggcgaaggtgcatggttgttgaaactctggctgaaaagcattttgatttagctttcagaatgcttcatgagtttgatctcccagctgttgatatttatgctggggtagctgcatccctcgcagaaaggaaaaaagggggccagttgacagagttcttgaagaatataagggggactatagatgatgatgaatgggatcaggttattggtgctgctataaatgtttatgccaacaagcataaagaaagaccagatcgccttatcgacatgctaatcagcaatcacaggaaagtacttgcttgtgttgtctgtggacgtctaaaaagtgcattccaaatagccgcacgaagtggaagtgtcgctgatgttcaatatgttgcccatcaggcattacatgcaaatgcattgacagtgcttgatatgtgtaagcaatggctcgcgcagtacatgtgataccatagatacttgctgagagagttctcacgtgaagacagaaaaactaaggggcatttggtttgaagagtcaatctattttagatgatgttgtgtatcataagtttattttataaatttggtggaataaattcgttctccatattattactaattatgagcttatgatgaatgaaatgctgatgaatcaatttattatattcaacaaactaaaaaagaaagtgagaggtgagaagatgatagactatcttaatccttaaaccaaacatgtcacaagtaatcaaagcaaggaaccatctgaaagctggtgttcaatcctcatatcccatttcaacttctttccgctttccacttcgtgcagcacaatgcctccatgtgtatatgcctctttaagggcatattcgttatactatcctattgcattctttggtctttgctgctccctcggtcctaaattataaaatattttctagatttatagctttttgttatgtatttaaatatacattgtatctaaatatatagtaaaaaataatgtacgtagaaaaatcaaaacgttttataatttagtgttgtaaagctttgtaatttcattacttgtccatccagtgagactgtttaattgtgagcgcttggcagcccacaaaacagtcagtgccagc

SEQ ID NO: 215039 - DNA, 5483 bp, Zea Mays
ggcgtgggttgtccctcccagtgcaacgtcaggcaacaagcatgttatctgaaatatttccaggaaggtcccccaaagtaggaccaacttactgggatcagatccaagaacttgctaccatatcagtgataaagcgcatacttcagcgtctgcatgacatcttggatctggatactcttccatctcttcaagtgttctttactgagatgagcatctcttcgtcaacggaatgtagcagagttggacaaaagcaacgtcctcttgggcttctgcaccaaatgattgatgacgccttcaaaggaaagcgacagttcttgagtggtaagcttcacaatgttgctagagctattgttgatgaggactttgatactgtttattcgaaagaaggtgtcaacttagaaaagaaggatattttgagctctgaaaaaggcatactccttggtcacgggcttagaattctaaaacaagcatctaggagtgaccttgcatcttcaaatgttgtggatagtggtccagaacacaaaggttctgcaaacagatatctgggccctctatctaccaagccgtcaacatatttatcaaacttcataatatatactgcaaccattggtgacatagttgatggaactgacacaactcatgatttcaactatttctcgttagtctatgaatggccaaaagataatacttgtggcttggtgtctctggctcctatgagcgcatttggaaaacttggtacaaaacagctattaactcgtctggtttttgagcgtggaagcactgatgcagcagcaaaggttgctgacacaatgagtgttgattttgtgcatgagattatatcagcatgtgtgccacctgttttacctccacgaacaggacaaggatgggcttgcattcctgtcatacctaccatttgtaatattagttcagaaaacagactatgcaccaagtcttctcctgctcaaggatggagtgcacatgattcgtccttgtcttctcgtcaagaacccctctatcctctccaattaaatttagtgaagcatttagcccagttatcttcagtaagagcagttttggcctgtgtatttggaagcagcatactatctggggacaatgaatcatcttttactcatgtgaaagattcaacacaagctccagaaactgagagatcattttttgaatttgctcttgagcaatcagagagatatccaaccttgaaccggtggatacagatgcagtctaatcttcatcgagtatccgagtcttctataacagataaatccgaagtctctttgcatcaatccaagggaaagttttgtatgaagcgaacccgtgagtctgacagtgatggtgaatcagagcttgaagagaatgtcataagcgggaacaccagttcaagttcactagaatccactaaacatgaagacgctaggctagagccaacaacttttatttcatttgattgggagaatgaagcaccatatgaaaaagctgttgagaggttaattagtgaaggaaaattaagtgatgctcttgctgtgtctgatcgttgtttgcgcaatggagcatctgataatttgcttcagttgctcatcgaacagaaggaagaaaaaggtccaggcacaggacaaattcatccatatggatctcacagtcttgggaatgatacttctcagtactgcttgaggctgagagacaaaaaagttgcagctcagctcgctctaaagtacttgcacagctgggaccttgatgctgcaaccaatgttctaactatgtgcatgtgccacttacctgagaatgatcctatgcgcagtgaggtgttgcacatgaagcaatctttacagaggtatggccatatcatgagtgctgatgagcactacactagatggcaagaggtggaagctgattgtgaagatgacccagagggcttggcactccgtcttgctgccaaaggagctgtttccgctgctttggaggttgctgaaagtgcctctttatcaattgatttgcggagggagttgcaaggccgtcagcttgtcaaactgctaatcactgatccacttaatggcggaggcccagctgcagcttcaagatttctgtcaactttaagggattccaatgatgctcttcctgtagccattggtgctatgaatttattacctgacctgcgttcaaagcagcttcttgtgcatttcttcctcaagcgtacagttgggaatctatcagatgctgagattgcacggcttaatttgtgggcattaggtctccgtgttctttccttattgccattgccatcacaacagcgttgttcttctctgcacgaacaccctcagttgatcgtagaagtactgttgatgatgaaacaactccagtctgcttctttgattttgaaagaattttcttccttgagggatgataagttaattattgcgtatgctaaaaaagcaatctcaattaacgttagctcagctcctagggaacgtcgatcgaatatctctgcatcaagggcaaaacaaaaaaaggctacaactccagctaaaacaaattttgtgcaaagttttggtaactttcagagagaagcacgcaaagcattctcatgggtcccccgtgatagtggcactaaaacacccccaaaagatatccttcggaaaagaaagagttcaggctctggaggtgatagatcctcttgggaagcaatgcctggtttacaggaggagcggacacctgtatatccttctgaggcgcaagaaagacttccttttgtctctgctcctgatgagtgggtgctgacgggagatcctgacaaggatgatgcaactcgttcatcccataaatatgaaacctctcctgatatcacactgttcaaggcattgatatccttgtgcaccaatgagtcagtagctgcaaaaggtgcacttgaattgtgtatgactcagatgaaggttgtgctaagctcccaacagttgcctcttgatgcctctatggacaacatagcccgggcttatcatgcaacggaaacttatgtacaggcactctcttatgctaagaatctatttaaaaagctcgttggtagtagtgatttgtcaagtggctctgaaagaagtaaggaagttgatgatgtttctgtggacactggcagttcaagcactgggagccagtatctggatgagctgtctgatttcctaactcaagcagacatgtggttagggcgtgcagagcttcttcaaagcctgctgggatcaggtattattgcctcgctggatgatatagctgacaaagaatcttcaagtagactacgtgacagattggtcaacgatgaacggtacagcatggctgtatatacttgtagaaagtgcaagattgatgctgtaccagtatgggttgcatggggccatgcattagttcgaatggagcactatgctcaagctcgtgtgaagttcaagcaagcacttcaacaatacaaaggcgatgcaacttctgttgttactgaaataatcaacacaattgaaggagggcctccagttgatgtttcttctgtccgttccatgtatgagcatttggcaaagagtgcggcgaccatctttgatgattccctttctgctgatgcttatctgaatgttctgtacatgccatcgacatttccacgatctgagaggtcccgacagtccagaggtcatgtagacagccaattcaggactgctagttcctaccttgaagatggccctcgcagcaatcttgatagtgtccgatatgctgagtgtattcattacttgcaagattatgctcggccacaaatgcttgctttcatgttcaggcatggccattacactgaagcatgctctctgttcttcccattcagtcaaccaaccacggaaggggaaacatctttgtcttcagctccatggagtgatcctttaacaactgattatgggacaattgatgacttgtgtgatctctgtcttggatatggtgccatggctgttttggagaatacaatacggacaataacacaatcgcccacatatcatgaggcacacatgattcagtacatgaacactattatcacccgcatttgcaactattgtgaaacacacaggcattttaattatctctacaacttcctggttctaaaagatgaccatgttgcttctggcctttgttgtattcaattatttatgaattcaatgtctcaagaggaggctttgaggcatttgggacatgccaagacacatttcgaagaagccttatctgtacgagatagaacaatcgaggctactaagttggtattgcggtctgctcggaataagggtgcacctggaaaaatgaccagggaaacgataatgaaatattccactcgtgtttcctatcaggcgaaggtgcatggttgttgaaactctggctgaaaagcattttgatttagctttcagaatgcttcatgagtttgatctcccagctgttgatatttatgctggggtagctgcatccctcgcagaaaggaaaaaagggggccagttgacagagttcttgaagaatataagggggactatagatgatgatgaatgggatcaggttattggtgctgctataaatgtttatgccaacaagcataaagaaagaccagatcgccttatcgacatgctaatcagcaatcacaggaaagtacttgcttgtgttgtctgtggacgtctaaaaagtgcattccaaatagccgcacgaagtggaagtgtcgctgatgttcaatatgttgcccatcaggcattacatgcaaatgcattgacagtgcttgatatgtgtaagcaatggctcgcgcagtacatgtgataccatagatacttgctgagagagttctcacgtgaagacagaaaaactaaggggcatttggtttgaagagtcaatctattttagatgatgttgtgtatcataagtttattttataaatttggtggaataaattcgttctccatattattactaattatgagcttatgatgaatgaaatgctgatgaatcaatttattatattcaacaaactaaaaaagaaagtgagaggtgagaagatgatagactatcttaatccttaaaccaaacatgtcacaagtaatcaaagcaaggaaccatctgaaagctggtgttcaatcctcatatcccatttcaacttctttccgctttccacttcgtgcagcacaatgcctccatgtgtatatgcctctttaagggcatattcgttatactatcctattgcattctttggtctttgctgctccctcggtcctaaattataaaatattttctagatttatagctttttgttatgtatttaaatatacattgtatctaaatatatagtaaaaaataatgtacgtagaaaaatcaaaacgttttataatttagtgttgtaaagctttgtaatttcattacttgtccatccagtgagactgtttaattgtgagcgcttggcagcccacaaaacagtcagtgccagc

SEQ ID NO: 215040 - DNA, 5480 bp, Zea Mays
ctacaaccttctcatcatgcccagttaaggcaacaagcatgttatctgaaatatttccaggaaggtcccccaaagtaggaccaacttactgggatcagatccaagaacttgctaccatatcagtgataaagcgcatacttcagcgtctgcatgacatcttggatctggatactcttccatctcttcaagtgttctttactgagatgagcatctcttcgtcaacggaatgtagcagagttggacaaaagcaacgtcctcttgggcttctgcaccaaatgattgatgacgccttcaaaggaaagcgacagttcttgagtggtaagcttcacaatgttgctagagctattgttgatgaggactttgatactgtttattcgaaagaaggtgtcaacttagaaaagaaggatattttgagctctgaaaaaggcatactccttggtcacgggcttagaattctaaaacaagcatctaggagtgaccttgcatcttcaaatgttgtggatagtggtccagaacacaaaggttctgcaaacagatatctgggccctctatctaccaagccgtcaacatatttatcaaacttcataatatatactgcaaccattggtgacatagttgatggaactgacacaactcatgatttcaactatttctcgttagtctatgaatggccaaaagataatacttgtggcttggtgtctctggctcctatgagcgcatttggaaaacttggtacaaaacagctattaactcgtctggtttttgagcgtggaagcactgatgcagcagcaaaggttgctgacacaatgagtgttgattttgtgcatgagattatatcagcatgtgtgccacctgttttacctccacgaacaggacaaggatgggcttgcattcctgtcatacctaccatttgtaatattagttcagaaaacagactatgcaccaagtcttctcctgctcaaggatggagtgcacatgattcgtccttgtcttctcgtcaagaacccctctatcctctccaattaaatttagtgaagcatttagcccagttatcttcagtaagagcagttttggcctgtgtatttggaagcagcatactatctggggacaatgaatcatcttttactcatgtgaaagattcaacacaagctccagaaactgagagatcattttttgaatttgctcttgagcaatcagagagatatccaaccttgaaccggtggatacagatgcagtctaatcttcatcgagtatccgagtcttctataacagataaatccgaagtctctttgcatcaatccaagggaaagttttgtatgaagcgaacccgtgagtctgacagtgatggtgaatcagagcttgaagagaatgtcataagcgggaacaccagttcaagttcactagaatccactaaacatgaagacgctaggctagagccaacaacttttatttcatttgattgggagaatgaagcaccatatgaaaaagctgttgagaggttaattagtgaaggaaaattaagtgatgctcttgctgtgtctgatcgttgtttgcgcaatggagcatctgataatttgcttcagttgctcatcgaacagaaggaagaaaaaggtccaggcacaggacaaattcatccatatggatctcacagtcttgggaatgatacttctcagtactgcttgaggctgagagacaaaaaagttgcagctcagctcgctctaaagtacttgcacagctgggaccttgatgctgcaaccaatgttctaactatgtgcatgtgccacttacctgagaatgatcctatgcgcagtgaggtgttgcacatgaagcaatctttacagaggtatggccatatcatgagtgctgatgagcactacactagatggcaagaggtggaagctgattgtgaagatgacccagagggcttggcactccgtcttgctgccaaaggagctgtttccgctgctttggaggttgctgaaagtgcctctttatcaattgatttgcggagggagttgcaaggccgtcagcttgtcaaactgctaatcactgatccacttaatggcggaggcccagctgcagcttcaagatttctgtcaactttaagggattccaatgatgctcttcctgtagccattggtgctatgaatttattacctgacctgcgttcaaagcagcttcttgtgcatttcttcctcaagcgtacagttgggaatctatcagatgctgagattgcacggcttaatttgtgggcattaggtctccgtgttctttccttattgccattgccatcacaacagcgttgttcttctctgcacgaacaccctcagttgatcgtagaagtactgttgatgatgaaacaactccagtctgcttctttgattttgaaagaattttcttccttgagggatgataagttaattattgcgtatgctaaaaaagcaatctcaattaacgttagctcagctcctagggaacgtcgatcgaatatctctgcatcaagggcaaaacaaaaaaaggctacaactccagctaaaacaaattttgtgcaaagttttggtaactttcagagagaagcacgcaaagcattctcatgggtcccccgtgatagtggcactaaaacacccccaaaagatatccttcggaaaagaaagagttcaggctctggaggtgatagatcctcttgggaagcaatgcctggtttacaggaggagcggacacctgtatatccttctgaggcgcaagaaagacttccttttgtctctgctcctgatgagtgggtgctgacgggagatcctgacaaggatgatgcaactcgttcatcccataaatatgaaacctctcctgatatcacactgttcaaggcattgatatccttgtgcaccaatgagtcagtagctgcaaaaggtgcacttgaattgtgtatgactcagatgaaggttgtgctaagctcccaacagttgcctcttgatgcctctatggacaacatagcccgggcttatcatgcaacggaaacttatgtacaggcactctcttatgctaagaatctatttaaaaagctcgttggtagtagtgatttgtcaagtggctctgaaagaagtaaggaagttgatgatgtttctgtggacactggcagttcaagcactgggagccagtatctggatgagctgtctgatttcctaactcaagcagacatgtggttagggcgtgcagagcttcttcaaagcctgctgggatcaggtattattgcctcgctggatgatatagctgacaaagaatcttcaagtagactacgtgacagattggtcaacgatgaacggtacagcatggctgtatatacttgtagaaagtgcaagattgatgctgtaccagtatgggttgcatggggccatgcattagttcgaatggagcactatgctcaagctcgtgtgaagttcaagcaagcacttcaacaatacaaaggcgatgcaacttctgttgttactgaaataatcaacacaattgaaggagggcctccagttgatgtttcttctgtccgttccatgtatgagcatttggcaaagagtgcggcgaccatctttgatgattccctttctgctgatgcttatctgaatgttctgtacatgccatcgacatttccacgatctgagaggtcccgacagtccagaggtcatgtagacagccaattcaggactgctagttcctaccttgaagatggccctcgcagcaatcttgatagtgtccgatatgctgagtgtattcattacttgcaagattatgctcggccacaaatgcttgctttcatgttcaggcatggccattacactgaagcatgctctctgttcttcccattcagtcaaccaaccacggaaggggaaacatctttgtcttcagctccatggagtgatcctttaacaactgattatgggacaattgatgacttgtgtgatctctgtcttggatatggtgccatggctgttttggagaatacaatacggacaataacacaatcgcccacatatcatgaggcacacatgattcagtacatgaacactattatcacccgcatttgcaactattgtgaaacacacaggcattttaattatctctacaacttcctggttctaaaagatgaccatgttgcttctggcctttgttgtattcaattatttatgaattcaatgtctcaagaggaggctttgaggcatttgggacatgccaagacacatttcgaagaagccttatctgtacgagatagaacaatcgaggctactaagttggtattgcggtctgctcggaataagggtgcacctggaaaaatgaccagggaaacgataatgaaatattccactcgtgtttcctatcaggcgaaggtgcatggttgttgaaactctggctgaaaagcattttgatttagctttcagaatgcttcatgagtttgatctcccagctgttgatatttatgctggggtagctgcatccctcgcagaaaggaaaaaagggggccagttgacagagttcttgaagaatataagggggactatagatgatgatgaatgggatcaggttattggtgctgctataaatgtttatgccaacaagcataaagaaagaccagatcgccttatcgacatgctaatcagcaatcacaggaaagtacttgcttgtgttgtctgtggacgtctaaaaagtgcattccaaatagccgcacgaagtggaagtgtcgctgatgttcaatatgttgcccatcaggcattacatgcaaatgcattgacagtgcttgatatgtgtaagcaatggctcgcgcagtacatgtgataccatagatacttgctgagagagttctcacgtgaagacagaaaaactaaggggcatttggtttgaagagtcaatctattttagatgatgttgtgtatcataagtttattttataaatttggtggaataaattcgttctccatattattactaattatgagcttatgatgaatgaaatgctgatgaatcaatttattatattcaacaaactaaaaaagaaagtgagaggtgagaagatgatagactatcttaatccttaaaccaaacatgtcacaagtaatcaaagcaaggaaccatctgaaagctggtgttcaatcctcatatcccatttcaacttctttccgctttccacttcgtgcagcacaatgcctccatgtgtatatgcctctttaagggcatattcgttatactatcctattgcattctttggtctttgctgctccctcggtcctaaattataaaatattttctagatttatagctttttgttatgtatttaaatatacattgtatctaaatatatagtaaaaaataatgtacgtagaaaaatcaaaacgttttataatttagtgttgtaaagctttgtaatttcattacttgtccatccagtgagactgtttaattgtgagcgcttggcagcccacaaaacagtcagtgccagc

SEQ ID NO: 215041 - DNA, 2474 bp, Zea Mays
caaacacaagagggcagtccctcctatataaatgcaagcgcgggatggatcgtattcaacagcgatcacgtccttgagtcagtagagcggagaggggagttagaaagatcagcaatggcgaagttttctaacagtgccatagttctcctaatgttgctcatcgcagcatggaggacgacgccggcgatgtcccatttcaggatgggcaagccaccagccgagccggagctggactacggaggccgggtgaagaatgagaagaaaacaggcccgtatgatccagagtttaagaaggcggctggtgaggctgcactcttgatcagggccaagcaagagatgacgaagcgcatggtgaaacacatcgagaccatcgcctccagcgcgaaaatcgcgatccacctgaagctggtgctgttgatcaagtcggcggagttcatgagggccatggccggagaggtcgcggaccagatgttcgtcgtcagccagcagcacgccagcgtcgcggccgccgacatcgtggcggcgctcaggttccagcaggagatccttaagaaggccgccgaacgctgcaaggccatctccagcgacgttgccatggcacagaagatgaagcatgagatgctcaagggcgtggcgcacgacctctgcaatgtcgcaggaaacatagccatcagcatgtcatcgatggctgagatggcaatgagcgtgtctggtcgggtagtagttggtgtcgatgtcaaagtccatactgacatggagagccgagctctggctaaagttgaagctgaagctgtcgctgaagctcaagctctagacaaagccgaaggcgaagccgttgctggggctgaaggagaagctaaaaaaggcaagagcggcggtgtcagcgctggtggcgacgccggaggatatgcaggtggcaaaaccgatgctgatgcaactgcttctggtggcaaaatcgatgccggtgctggagctggtggtgcgtctggaggtgcaaaggttggctctgatgtaggaggatctgttggtgggggtgctgacgtcaatgctggagctggagctggagctggtgctgatgccggtgtctatactgttgctaagggtaataaggcaggtggaagtgatgctaaggctgatatttcggggggtgctaaagctggtggtgatgctggagcagatgctagcgctggtaccggtgctggtgtaggcatctccaagagtttcacgattggcggtggcgttgcaggaaaggctggcgggagtggcaacgctgaagctggtgtcgatgctggtgttggaggaaaggcaggagagagtgggaaggcatataccggagctgatgctgttgtctccaaagacgccaaagttggtggtggcgctggaggaagtgtgggagggagtggcaatgcatataccggagctgatgcaggtacaagtgtttcgagcggaggatctgctggcgccgatgcgggtaccggtgctaccgtgggtgctggtgtctccaaagacgccaaagttggtggtggcgtcggaggaagtgtgggagggagtggcaatgcctataccggaactggtgccggcgtttctagtggaggatcctccggtggcgccgatgctggcgctggcgctaccgtaggtgctggtgtctcgggaggcgctaaagttggtggtggcgttggaggaaacgcgggaggaagtggcaaggcgtatacaggaaccggtgccgatgcgggtgtttccggtggaggatccggtggcgccagtgcaggtaccagtgctaccgtgggtgctggtgtctccggaggtgccaaagttggtggtggcgtaggaggaaatgcaggaggaagtggcaacgtctatactggaaccggtgccgatgcaggcgtttctggtggaggatccggtggcgccgacggtggtattggagctaacataggtgctggtgtcttcggaggcgtcaaatttggtggcggcgccggaggaagtgtaggaggaagtggcagtgctgctgcaggtgcttctggagggagtaaatcatcggggggtggctcagattttggatatggttcagcgagcaaggagttatagaggatgatgaccactcaccaccgtaagatcgatatgatccgtcccaaggaatttattcctgccctttttgttatcgcgtgttgttttattaccacgcaccagtcaatagtgtggaggcaatatacattgattccccttgactggacaatacaaagataaccttatgtatttcatttttgcttacttaacattgccatgtaaaccagaatagctgaggcttattctcatgataaacatgacatttattttacggcttcatcttgatattattgttttcttcttgtattgttttcttgaatgtccaccctcttcaatcaccccaaacgcaccacctcgaaaatctcaggcagactatctttaagccttgtgtgtaaagcaactaagtg

SEQ ID NO: 215042 - DNA, 3569 bp, Zea Mays
caaccgctccccaccgccagccggatctcctgagaggcgacgccgcgactgccggacggcaaccctgctcctccgccggtgccctcccgcacgatgagccgcagcgggcctcgccgcggcatcttcgatggcctccccatcccggccgacaaatcctacctcaaggaaagcctgtcgcggatcgacgagagctgggcggccgcgcggttcgactcgctgccgcacgtcgtgcacatcctcacctccaaggaccgcgagggcgagatccagttcctcaaagagcagagcgacctcatcgaggacgtcgtggacgaggtcgtgcacgcctaccaccacggcttcaacaaggccatccagaactactcccagatcctgcggctgttcagcgagtctgcagagagcattaccggactcaagggggagatggaggaggcgaagaagctgcttggcaggaagaataagcacctcggccagttgtggtaccgctccctcacactgcgccatgtgctatcccttttggatcaggtcgaggatgttgccaaggttcctgctcgaattgaaaacttaatggcagagaagcagctgtatgctgcagtgcaattgcaagtccaatcagttctgatactagaacgagaaggccttcaagcggtaggtgctcttcaagatgttcgttctgatctaacaaagctgcgaggagtactattttacaaaattttggaagagttacatgcccatttgtacaacaatggcgaatatagctctgcagttttaagtatggttgacagtgagcaagcaccgacttctacagctactgggcgattggtaaacagcatgcaacctctttcaaggagaactagatcaattaaaggtgacaaccacattggtgggccagtagatgggtttccaaaagttagttctgttgatggagggaatcaatgataaaggcagatgctccccttaatgtgaagtacctgagaacattggtacaatgcttatccatgcttggaaaggttgcagctgcaggagctgtgatatgccaacgagtacgccctacaatccatgatgttatcacttcaaagattaaagcatgttctgaagacgcttcaaaatccagtatgggcaaagctgcaaaaacgaatgatgtgttgcattcaaatggacccactccccggtttcaaatgttcacacagaaaacaaagagtggcgcatctgtaatggcagcccaactagttgtcagtcccatttcgccgactatggcacccactggagatgctcagcgtgcagctactcaacttcttagatcaatatttgaatgtcttgtagagatacttgagaaccatattattgttggagagcttcttgaacaaaaatcaacatctgaggttgataatgtaaacacacctcatattgcaaatggggatgcaagctggaatccagactctgaatctttccaagctactggtggtttcagtgttgcattctctctatcagtcgtgcagagtgagtgccagcaacttctgtgtgaaattttgcgggcaactccagaagctgctactgctgacgcagctgtccagacagctaggcttgcaaataaggatccagtgaaggaaaagagggatggatcagaaggcctttcttttgccttccgcattactgatgcagcaaccccagcgtcaaatgaaggtcaaggatggcgaagaaattccaatgtgcctcaagaagggtatggaacagcaagtgtcatacctgaccaaggaattttcctagccgcgtctgtttaccgtcctgtttttgagtttatgaataaaatagggttgatgttgcctcagaagtactcacaacttgggagtgatggcttattggcttttgtgaataactttctgaaggagcacttcttgccagcaatatttgtagattaccgaaaatgcgttcagcaggccatatctagtccagcagcatttagaccacgtgtacatgcaacatcagcatatagttcatcggtggaacttggacgccctgtgcttcaagggcttctcgccattgatataatagccaaagaggttcttggatgggttcaattgatgccaaactatgcgactgagcttgtggagtatgtacgcacatttttagaacgtgctcatgagagatgtcgtgcatcatatatggaggctgtccttgaaaagcaaagttatattctcctttcaaggaatgacattgagagtttaatgcgcctggaaccagcaaacatttctttgcaaaattctactggtgaacatgataacaatgcaacaggtgcagaggcagtcgaagtagagattgaactaagtgatctcttattagatatgtgcccaataaaacaggaaaacttgatccatgacgaccagaaactgatattgttggcttctcttagtgactcattggaatatttagcagattcagttgaaaggcttggggaatcattcataagtccaccaaccacttcagagagcataaatcatagccatggtcgacatgcccgctcatctagtgcaattccaaaaagtctcgcgtctctggctaatgagtacagaaggttagctgttgattgtgtcagagtattgagattggaaatgcagctagaggcgatataccacatgcaggaaatgaccaaaagagaatacgtcgaagatcaagatgctgaagatcctgatgactttattatctcccttacaactcagattgcacgacgggatgaagaaatggctccttatatcacggaatcagaaaggaattacatatttggtgggatttccagtgttgctgctaatgcatcaataaaggcacttgctcaaatgaagtcaataaacttgttaggagtccagcaaatatgcaggaattcgatagctctggaacaggctcttgcagccataccttcaatagatagtgaagcagtccaacagcgattggatcgcgttcgaacgttctatgagttgttaaatttgccttttgagtctttgcttggattcatcgcagaacatgaatatttgttttctgctaaagaatacctgagtgttctaaaggtcaatgtgccgggtagagaaatacctgcggatgctgaacgacgcatctcacagattttgggtcactagatctaatcagacacaatggtgctatttttgactggttatgccttatgtgggctttggctaccaaatggttctccacctgtttccatggcggtgtttgtgtagatttagctggtttttgctatttagtaattttgtttccttttgtatttcacgtgatatattcttttgtatgtcttatcagttatcattgattgtaaatttgtagtgttccggataaaattttcattattgattattgtaaatgtgttatctgtctggatgcgatatttaataagctcatcagattcagtgtcctgtatggtgcacagacgagttgccagtcatgaacttttcagtcttgtaaaattgggaaatttattgggaatggttgaacaagtggaacgccataaaaatgtgacagtgaagtatgcactacactatgatgtttggtttacgaaatgt

SEQ ID NO: 215043 - DNA, 3594 bp, Zea Mays
caaccgctccccaccgccagccggatctcctgagaggcgacgccgcgactgccggacggcaaccctgctcctccgccggtgccctcccgcacgatgagccgcagcgggcctcgccgcggcatcttcgatggcctccccatcccggccgacaaatcctacctcaaggaaagcctgtcgcggatcgacgagagctgggcggccgcgcggttcgactcgctgccgcacgtcgtgcacatcctcacctccaaggaccgcgagggcgagatccagttcctcaaagagcagagcgacctcatcgaggacgtcgtggacgaggtcgtgcacgcctaccaccacggcttcaacaaggccatccagaactactcccagatcctgcggctgttcagcgagtctgcagagagcattaccggactcaagggggagatggaggaggcgaagaagctgcttggcaggaagaataagcacctcggccagttgtggtaccgctccctcacactgcgccatgtgctatcccttttggatcaggtcgaggatgttgccaaggttcctgctcgaattgaaaacttaatggcagagaagcagctgtatgctgcagtgcaattgcaagtccaatcagttctgatactagaacgagaaggccttcaagcggtaggtgctcttcaagatgttcgttctgatctaacaaagctgcgaggagtactattttacaaaattttggaagagttacatgcccatttgtacaacaatggcgaatatagctctgcagttttaagtatggttgacagtgagcaagcaccgacttctacagctactgggcgattggtaaacagcatgcaacctctttcaaggagaactagatcaattaaaggtgacaaccacattggtgggccagtagatgggtttccaaaagttagttctgttgatggaggctcttcgtttgatggcccagatgataatagcttagatatgagtgaaagtgatggacacactcgaaaggattcgaaaagtttttctcatgaaatcccaatttttctttcctatgctacaccagatgagtttcttgaatcaatgataaaggcagatgctccccttaatgtgaagtacctgagaacattggtacaatgcttatccatgcttggaaaggttgcagctgcaggagctgtgatatgccaacgagtacgccctacaatccatgatgttatcacttcaaagattaaagcatgttctgaagacgcttcaaaatccagtatgggcaaagctgcaaaaacgaatgatgtgttgcattcaaatggacccactccccggtttcaaatgttcacacagaaaacaaagagtggcgcatctgtaatggcagcccaactagttgtcagtcccatttcgccgactatggcacccactggagatgctcagcgtgcagctactcaacttcttagatcaatatttgaatgtcttgtagagatacttgagaaccatattattgttggagagcttcttgaacaaaaatcaacatctgaggttgataatgtaaacacacctcatattgcaaatggggatgcaagctggaatccagactctgaatctttccaagctactggtggtttcagtgttgcattctctctatcagtcgtgcagagtgagtgccagcaacttctgtgtgaaattttgcgggcaactccagaagctgctactgctgacgcagctgtccagacagctaggcttgcaaataaggatccagtgaaggaaaagagggatggatcagaaggcctttcttttgccttccgcattactgatgcagcaaccccagcgtcaaatgaaggtcaaggatggcgaagaaattccaatgtgcctcaagaagggtatggaacagcaagtgtcatacctgaccaaggaattttcctagccgcgtctgtttaccgtcctgtttttgagtttatgaataaaatagggttgatgttgcctcagaagtactcacaacttgggagtgatggcttattggcttttgtgaataactttctgaaggagcacttcttgccagcaatatttgtagattaccgaaaatgcgttcagcaggccatatctagtccagcagcatttagaccacgtgtacatgcaacatcagcatatagttcatcggtggaacttggacgccctgtgcttcaagggcttctcgccattgatataatagccaaagaggctgtccttgaaaagcaaagttatattctcctttcaaggaatgacattgagagtttaatgcgcctggaaccagcaaacatttctttgcaaaattctactggtgaacatgataacaatgcaacaggtgcagaggcagtcgaagtagagattgaactaagtgatctcttattagatatgtgcccaataaaacaggaaaacttgatccatgacgaccagaaactgatattgttggcttctcttagtgactcattggaatatttagcagattcagttgaaaggcttggggaatcattcataagtccaccaaccacttcagagagcataaatcatagccatggtcgacatgcccgctcatctagtgcaattccaaaaagtctcgcgtctctggctaatgagtacagaaggttagctgttgattgtgtcagagtattgagattggaaatgcagctagaggcgatataccacatgcaggaaatgaccaaaagagaatacgtcgaagatcaagatgctgaagatcctgatgactttattatctcccttacaactcagattgcacgacgggatgaagaaatggctccttatatcacggaatcagaaaggaattacatatttggtgggatttccagtgttgctgctaatgcatcaataaaggcacttgctcaaatgaagtcaataaacttgttaggagtccagcaaatatgcaggaattcgatagctctggaacaggctcttgcagccataccttcaatagatagtgaagcagtccaacagcgattggatcgcgttcgaacgttctatgagttgttaaatttgccttttgagtctttgcttggattcatcgcagaacatgaatatttgttttctgctaaagaatacctgagtgttctaaaggtcaatgtgccgggtagagaaatacctgcggatgctgaacgacgcatctcacagattttgggtcactagatctaatcagacacaatggtgctatttttgactggttatgccttatgtgggctttggctaccaaatggttctccacctgtttccatggcggtgtttgtgtagatttagctggtttttgctatttagtaattttgtttccttttgtatttcacgtgatatattcttttgtatgtcttatcagttatcattgattgtaaatttgtagtgttccggataaaattttcattattgattattgtaaatgtgttatctgtctggatgcgatatttaataagctcatcagattcagtgtcctgtatggtgcacagacgagttgccagtcatgaacttttcagtcttgtaaaattgggaaatttattgggaatggttgaacaagtggaacgccataaaaatgtgacagtgaagtatgcactacactatgatgtttggtttacgaaatgt

SEQ ID NO: 215044 - DNA, 3452 bp, Zea Mays
ggaccacgcaccatcgacatacacacacacacacaccagctgtgcttacgctacgcggtcgccaaccgctccccaccgccagccggatctcctgagaggcgacgccgcgactgccggacggcaaccctgctcctccgccggtgccctcccgcacgatgagccgcagcgggcctcgccgcggcatcttcgatggcctccccatcccggccgacaaatcctacctcaaggaaagcctgtcgcggatcgacgagagctgggcggccgcgcggttcgactcgctgccgcacgtcgtgcacatcctcacctccaaggaccgcgagggcgagatccagttcctcaaagagcagagcgacctcatcgaggacgtcgtggacgaggtcgtgcacgcctaccaccacggcttcaacaaggccatccagaactactcccagatcctgcggctgttcagcgagtctgcagagagcattaccggactcaagggggagatggaggaggcgaagaagctgcttggcaggaagaataagcacctcggccagttgtggtaccgctccctcacactgcgccatgtgctatcccttttggatcaggtcgaggatgttgccaaggttcctgctcgaattgaaaacttaatggcagagaagcagctgtatgctgcagtgcaattgcaagtccaatcagttctgatactagaacgagaaggccttcaagcggtaggtgctcttcaagatgttcgttctgatctaacaaagctgcgaggagtactattttacaaaattttggaagagttacatgcccatttgtacaacaatggcgaatatagctctgcagttttaagtatggttgacagtgagcaagcaccgacttctacagctactgggcgattggtaaacagcatgcaacctctttcaaggagaactagatcaattaaaggtgacaaccacattggtgggccagtagatgggtttccaaaagttagttctgttgatggaggctcttcgtttgatggcccagatgataatagcttagatatgagtgaaagtgatggacacactcgaaaggattcgaaaagtttttctcatgaaatcccaatttttctttcctatgctacaccagatgagtttcttgaatcaatgataaaggcagatgctccccttaatgtgaagtacctgagaacattggtacaatgcttatccatgcttggaaaggttgcagctgcaggagctgtgatatgagaaccatattattgttggagagcttcttgaacaaaaatcaacatctgaggttgataatgtaaacacacctcatattgcaaatggggatgcaagctggaatccagactctgaatctttccaagctactggtggtttcagtgttgcattctctctatcagtcgtgcagagtgagtgccagcaacttctgtgtgaaattttgcgggcaactccagaagctgctactgctgacgcagctgtccagacagctaggcttgcaaataaggatccagtgaaggaaaagagggatggatcagaaggcctttcttttgccttccgcattactgatgcagcaaccccagcgtcaaatgaaggtcaaggatggcgaagaaattccaatgtgcctcaagaagggtatggaacagcaagtgtcatacctgaccaaggaattttcctagccgcgtctgtttaccgtcctgtttttgagggttgatgttgcctcagaagtactcacaacttgggagtgatggcttattggcttttgtgaataactttctgaaggagcacttcttgccagcaatatttgtagattaccgaaaatgcgttcagcaggccatatctagtccagcagcatttagaccacgtgtacatgcaacatcagcatatagttcatcggtggaacttggacgccctgtgcttcaagggcttctcgccattgatataatagccaaagaggttcttggatgggttcaattgatgccaaactatgcgactgagcttgtggagtatgtacgcacatttttagaacgtgctcatgagagatgtcgtgcatcatatatggaggctgtccttgaaaagcaaagttatattctcctttcaaggaatgacattgagagtttaatgcgcctggaaccagcaaacatttctttgcaaaattctactggtgaacatgataacaatgcaacaggtgcagaggcagtcgaagtagagattgaactaagtgatctcttattagatatgtgcccaataaaacaggaaaacttgatccatgacgaccagaaactgatattgttggcttctcttagtgactcattggaatatttagcagattcagttgaaaggcttggggaatcattcataagtccaccaaccacttcagagagcataaatcatagccatggtcgacatgcccgctcatctagtgcaattccaaaaagtctcgcgtctctggctaatgagtacagaaggttagctgttgattgtgtcagagtattgagattggaaatgcagctagaggcgatataccacatgcaggaaatgaccaaaagagaatacgtcgaagatcaagatgctgaagatcctgatgactttattatctcccttacaactcagattgcacgacgggatgaagaaatggctccttatatcacggaatcagaaaggaattacatatttggtgggatttccagtgttgctgctaatgcatcaataaaggcacttgctcaaatgaagtcaataaacttgttaggagtccagcaaatatgcaggaattcgatagctctggaacaggctcttgcagccataccttcaatagatagtgaagcagtccaacagcgattggatcgcgttcgaacgttctatgagttgttaaatttgccttttgagtctttgcttggattcatcgcagaacatgaatatttgttttctgctaaagaatacctgagtgttctaaaggtcaatgtgccgggtagagaaatacctgcggatgctgaacgacgcatctcacagattttgggtcactagatctaatcagacacaatggtgctatttttgactggttatgccttatgtgggctttggctaccaaatggttctccacctgtttccatggcggtgtttgtgtagatttagctggtttttgctatttagtaattttgtttccttttgtatttcacgtgatatattcttttgtatgtcttatcagttatcattgattgtaaatttgtagtgttccggataaaattttcattattgattattgtaaatgtgttatctgtctggatgcgatatttaataagctcatcagattcagtgtcctgtatggtgcacagacgagttgccagtcatgaacttttcagtcttgtaaaattgggaaatttattgggaatggttgaacaagtggaacgccataaaaatgtgacagtgaagtatgcactacactatgatgtttggtttacgaaatgt

SEQ ID NO: 215045 - DNA, 3761 bp, Zea Mays
tggaccacgcaccatcgacatacacacacacacacaccagctgtgcttacgctacgcggtcgccaaccgctccccaccgccagccggatctcctgagaggcgacgccgcgactgccggacggcaaccctgctcctccgccggtgccctcccgcacgatgagccgcagcgggcctcgccgcggcatcttcgatggcctccccatcccggccgacaaatcctacctcaaggaaagcctgtcgcggatcgacgagagctgggcggccgcgcggttcgactcgctgccgcacgtcgtgcacatcctcacctccaaggaccgcgagggcgagatccagttcctcaaagagcagagcgacctcatcgaggacgtcgtggacgaggtcgtgcacgcctaccaccacggcttcaacaaggccatccagaactactcccagatcctgcggctgttcagcgagtctgcagagagcattaccggactcaagggggagatggaggaggcgaagaagctgcttggcaggaagaataagcacctcggccagttgtggtaccgctccctcacactgcgccatgtgctatcccttttggatcaggtcgaggatgttgccaaggttcctgctcgaattgaaaacttaatggcagagaagcagctgtatgctgcagtgcaattgcaagtccaatcagttctgatactagaacgagaaggccttcaagcggtgctcttcaagatgttcgttctgatctaacaaagctgcgaggagtactattttacaaaattttggaagagttacatgcccatttgtacaacaatggcgaatatagctctgcagttttaagtatggttgacagtgagcaagcaccgacttctacagctactgggcgattggtaaacagcatgcaacctctttcaaggagaactagatcaattaaaggtgacaaccacattggtgggccagtagatgggtttccaaaagttagttctgttgatggaggctcttcgtttgatggcccagatgataatagcttagatatgagtgaaagtgatggacacactcgaaaggattcgaaaagtttttctcatgaaatcccaatttttctttcctatgctacaccagatgagtttcttgaatcaatgataaaggcagatgctccccttaatgtgaagtacctgagaacattggtacaatgcttatccatgcttggaaaggttgcagctgcaggagctgtgatatgccaacgagtacgccctacaatccatgatgttatcacttcaaagattaaagcatgttctgaagacgcttcaaaatccagtatgggcaaagctgcaaaaacgaatgatgtgttgcattcaaatggacccactccccggtttcaaatgttcacacagaaaacaaagagtggcgcatctgtaatggcagcccaactagttgtcagtcccatttcgccgactatggcacccactggagatgctcagcgtgcagctactcaacttcttagatcaatatttgaatgtcttgtagagatacttgagaaccatattattgttggagagcttcttgaacaaaaatcaacatctgaggttgataatgtaaacacacctcatattgcaaatggggatgcaagctggaatccagactctgaatctttccaagctactggtggtttcagtgttgcattctctctatcagtcgtgcagagtgagtgccagcaacttctgtgtgaaattttgcgggcaactccagaagctgctactgctgacgcagctgtccagacagctaggcttgcaaataaggatccagtgaaggaaaagagggatggatcagaaggcctttcttttgccttccgcattactgatgcagcaaccccagcgtcaaatgaaggtcaaggatggcgaagaaattccaatgtgcctcaagaagggtatggaacagcaagtgtcatacctgaccaaggaattttcctagccgcgtctgtttaccgtcctgtttttgagtttatgaataaaatagggttgatgttgcctcagaagtactcacaacttgggagtgatggcttattggcttttgtgaataactttctgaaggagcacttcttgccagcaatatttgtagattaccgaaaatgcgttcagcaggccatatctagtccagcagcatttagaccacgtgtacatgcaacatcagcatatagttcatcggtggaacttggacgccctgtgcttcaagggcttctcgccattgatataatagccaaagaggttcttggatgggttcaattgatgccaaactatgcgactgagcttgtggagtatgtacgcacatttttagaacgtgctcatgagagatgtcgtgcatcatatatggaggctgtccttgaaaagcaaagttatattctcctttcaaggaatgacattgagagtttaatgcgcctggaaccagcaaacatttctttgcaaaattctactggtgaacatgataacaatgcaacaggtgcagaggcagtcgaagtagagattgaactaagtgatctcttattagatatgtgcccaataaaacaggaaaacttgatccatgacgaccagaaactgatattgttggcttctcttagtgactcattggaatatttagcagattcagttgaaaggcttggggaatcattcataagtccaccaaccacttcagagagcataaatcatagccatggtcgacatgcccgctcatctagtgcaattccaaaaagtctcgcgtctctggctaatgagtacagaaggttagctgttgattgtgtcagagtattgagattggaaatgcagctagaggcgatataccacatgcaggaaatgaccaaaagagaatacgtcgaagatcaagatgctgaagatcctgatgactttattatctcccttacaactcagattgcacgacgggatgaagaaatggctccttatatcacggaatcagaaaggaattacatatttggtgggatttccagtgttgctgctaatgcatcaataaaggcacttgctcaaatgaagtcaataaacttgttaggagtccagcaaatatgcaggaattcgatagctctggaacaggctcttgcagccataccttcaatagatagtgaagcagtccaacagcgattggatcgcgttcgaacgttctatgagttgttaaatttgccttttgagtctttgcttggattcatcgcagaacatgaatatttgttttctgctaaagaatacctgagtgttctaaaggtcaatgtgccgggtagagaaatacctgcggatgctgaacgacgcatctcacagattttgggtcactagatctaatcagacacaatggtgctatttttgactggttatgccttatgtgggctttggctaccaaatggttctccacctgtttccatggcggtgtttgtgtagatttagctggtttttgctatttagtaattttgtttccttttgtatttcacgtgatatattcttttgtatgtcttatcagttatcattgattgtaaatttgtagtgttccggataaaattttcattattgattattgtaaatgtgttatctgtctggatgcgatatttaataagctcatcagattcagtgtcctgtatggtgcacagacgagttgccagtcatgaacttttcagtcttgtaaaattgggaaatttattgggaatggttgaacaagtggaacgccataaaaatgtgacagtgaagtatgcactacactatgatgtttggtttacgaaatgt

SEQ ID NO: 215046 - DNA, 3476 bp, Zea Mays
gtggacctggaccacgcaccatcgacatacacacacacacacaccagctgtgcttacgctacgcggtcgccaaccgctccccaccgccagccggatctcctgagaggcgacgccgcgactgccggacggcaaccctgctcctccgccggtgccctcccgcacgatgagccgcagcgggcctcgccgcggcatcttcgatggcctccccatcccggccgacaaatcctacctcaaggaaagcctgtcgcggatcgacgagagctgggcggccgcgcggttcgactcgctgccgcacgtcgtgcacatcctcacctccaaggaccgcgagggcgagatccagttcctcaaagagcagagcgacctcatcgaggacgtcgtggacgaggtcgtgcacgcctaccaccacggcttcaacaaggccatccagaactactcccagatcctgcggctgttcagcgagtctgcagagagcattaccggactcaagggggagatggaggaggcgaagaagctgcttggcaggaagaataagcacctcggccagttgtggtaccgctccctcacactgcgccatgtgctatcccttttggatcaggtcgaggatgttgccaaggttcctgctcgaattgaaaacttaatggcagagaagcagctgtatgctgcagtgcaattgcaagtccaatcagttctgatactagaacgagaaggccttcaagcggtaggtgctcttcaagatgttcgttctgatctaacaaagctgcgaggagtactattttacaaaattttggaagagttacatgcccatttgtacaacaatggcgaatatagctctgcagttttaagtatggttgacagtgagcaagcaccgacttctacagctactgggcgattggtaaacagcatgcaacctctttcaaggagaactagatcaattaaaggtgacaaccacattggtgggccagtagatgggtttccaaaagttagttctgttgatggaggctcttcgtttgatggcccagatgataatagcttagatatgagtgaaagtgatggacacactcgaaaggattcgaaaagtttttctcatgaaatcccaatttttctttcctatgctacaccagatgagtttcttgaatcaatgataaaggcagatgctccccttaatgtgaagtacctgagaacattggtacaatgcttatccatgcttggaaaggttgcagctgcaggagctgtgatatgagaaccatattattgttggagagcttcttgaacaaaaatcaacatctgaggttgataatgtaaacacacctcatattgcaaatggggatgcaagctggaatccagactctgaatctttccaagctactggtggtttcagtgttgcattctctctatcagtcgtgcagagtgagtgccagcaacttctgtgtgaaattttgcgggcaactccagaagctgctactgctgacgcagctgtccagacagctaggcttgcaaataaggatccagtgaaggaaaagagggatggatcagaaggcctttcttttgccttccgcattactgatgcagcaaccccagcgtcaaatgaaggtcaaggatggcgaagaaattccaatgtgcctcaagaagggtatggaacagcaagtgtcatacctgaccaaggaattttcctagccgcgtctgtttaccgtcctgtttttgagtttatgaataaaatagggttgatgttgcctcagaagtactcacaacttgggagtgatggcttattggcttttgtgaataactttctgaaggagcacttcttgccagcaatatttgtagattaccgaaaatgcgttcagcaggccatatctagtccagcagcatttagaccacgtgtacatgcaacatcagcatatagttcatcggtggaacttggacgccctgtgcttcaagggcttctcgccattgatataatagccaaagaggttcttggatgggttcaattgatgccaaactatgcgactgagcttgtggagtatgtacgcacatttttagaacgtgctcatgagagatgtcgtgcatcatatatggaggctgtccttgaaaagcaaagttatattctcctttcaaggaatgacattgagagtttaatgcgcctggaaccagcaaacatttctttgcaaaattctactggtgaacatgataacaatgcaacaggtgcagaggcagtcgaagtagagattgaactaagtgatctcttattagatatgtgcccaataaaacaggaaaacttgatccatgacgaccagaaactgatattgttggcttctcttagtgactcattggaatatttagcagattcagttgaaaggcttggggaatcattcataagtccaccaaccacttcagagagcataaatcatagccatggtcgacatgcccgctcatctagtgcaattccaaaaagtctcgcgtctctggctaatgagtacagaaggttagctgttgattgtgtcagagtattgagattggaaatgcagctagaggcgatataccacatgcaggaaatgaccaaaagagaatacgtcgaagatcaagatgctgaagatcctgatgactttattatctcccttacaactcagattgcacgacgggatgaagaaatggctccttatatcacggaatcagaaaggaattacatatttggtgggatttccagtgttgctgctaatgcatcaataaaggcacttgctcaaatgaagtcaataaacttgttaggagtccagcaaatatgcaggaattcgatagctctggaacaggctcttgcagccataccttcaatagatagtgaagcagtccaacagcgattggatcgcgttcgaacgttctatgagttgttaaatttgccttttgagtctttgcttggattcatcgcagaacatgaatatttgttttctgctaaagaatacctgagtgttctaaaggtcaatgtgccgggtagagaaatacctgcggatgctgaacgacgcatctcacagattttgggtcactagatctaatcagacacaatggtgctatttttgactggttatgccttatgtgggctttggctaccaaatggttctccacctgtttccatggcggtgtttgtgtagatttagctggtttttgctatttagtaattttgtttccttttgtatttcacgtgatatattcttttgtatgtcttatcagttatcattgattgtaaatttgtagtgttccggataaaattttcattattgattattgtaaatgtgttatctgtctggatgcgatatttaataagctcatcagattcagtgtcctgtatggtgcacagacgagttgccagtcatgaacttttcagtcttgtaaaattgggaaatttattgggaatggttgaacaagtggaacgccataaaaatgtgacagtgaagtatgcactacactatgatgtttggtttacgaaatgt

SEQ ID NO: 215047 - DNA, 2243 bp, Zea Mays
attttttttcagaaaataagttcaactctgttctagatttatcaataagcaacctattcgttttggctttgataaattacataccttgccttaaatatatagtttgctgacatgtactgacactcttctgggcggttactatgctggtttctcgaagtttggttttatttagttgagggaagtgccttgggcaccttgatgaatatcttgtaagctggtgactccagcagaactaaactttgttttctataagttgggatcaatggtctttggtctaaaaaaggtaaaagtaccttggcatgtacattaggccgggagctccacacaagagggaagcttgcatatgttcttgacggtgataacttaagacatggtctgaacaaggatcttggctttaaagctgaagatcgtgctgaaaatataaggagagttggtaagtgtctcaccaatatagataaaaaaggacagacctagtgctggtggggaaggaataagacaagccttaccctgcattgcatcgaacccgaacctttggctcagtggaaaggcttcccatcacttcgctaggcctgttcttctgtctcgccaatatagatgtctattatatttcaaggaactcccacgaaagtaaaagcatgataaacaagtcttgcttctgccattattttatctttccagcattctgcagttcacatttttccttgaatacacgggagagctgtgtatctttgtattaggagtgaaaaaagggggtccaatacagactacagaacttcgcctcctgttctggaccaagcagagaggactgccaaaacaaacacgactactgagactaactaatcagacaataactgtaggacctaagtacctaaccaacactgtgaaaactactaactagcccacccctcgaactggactcagttctttaagatgtttggccccggcaaaacaccaaagatggtgttctttagcaaaattgtgcagaggccttctgcatgttgggctgaacaacggcattcctatgctttcaaagagaccaagctcctagaatgatggccgagataactccttgctggaccagttttgagaggtgttcaatgctctccttcaatcagcaaaagaggattcagcttgacttggctcttgaggcaaagcccaagtttgaaagaattttaaaccagaattctctagtgaaaacacaagtggtaataatatgctggacattctcctcttcttggtcacaaacacacattattgagggcgggggaggcctttttttgctaaccggtcagccatccagcacctatttctaattgctagctaggatgatcttgcactttgctggagcacaggttttccaaatccgcctccatgcctcaaaggtcacagatccttggaagattttgcacttagcagttcacattttgtttcaactattttgaacaggtgaagtagcaaagttattttcagacgctggccttgtatgtattgcaagtttgatatctccatataggagagaccgtgaatcttgccgtgcactgttgtcggatggtagctttattgaagttttcttgaatatgtccttggaattatgtgaagcaagggacccaaagggcctctataagcttgctcgtgctgggaaaataaagggttttacaggaatagatgacccttatgaagcaccactgaattgtgagattgagatcaaggaaatagatggtgtatgcccttcgccttctgacatggcggggcaagtggttacttaccttgaggagaaaggcttcctgcacgagtaggctgacgctgaatcgaagctacatccggggaaggtttcaatcagacaagcgcagaataagtcaaaagcgctgccagttaccgtatggttacatagattgatctggatgcctagtatttttctttccgcgcttgctctaccacaagttccattcagtttcattcagatgagcctagatggttcctaatttctttgacctctggaatagattacctgtaatgcaattctgataacagcttggggcagtatcgatttgtcacgggaaggtacgcctaatgttgagagaaactgtattcttgtgctccactttctgcagtgccgacgtgtaccctttccgttttactaaattataattagcttcccttcatttataagtttatttattttttatacactattcttgttacatatctaagtatgtctggatatatagcaaaaaaaaaaaaaa

SEQ ID NO: 215048 - DNA, 1101 bp, Zea Mays
gggcggttactatgctggtttctcgaagtttggttttatttagttgagggaagtgccttgggcaccttgatgaatatcttgtaagctggtgactccagcagaactaaactttgttttctataagttgggatcaatggtctttggtctaaaaaaggtaaaagtaccttggcatgtacattaggccgggagctccacacaagagggaagcttgcatatgttcttgacggtgataacttaagacatggtctgaacaaggatcttggctttaaagctgaagatcgtgctgaaaatataaggagagttggtgaagtagcaaagttattttcagacgctggccttgtatgtattgcaagtttgatatctccatataggagagaccgtgaatcttgccgtgcactgttgtcggatggtagctttattgaagttttcttgaatatgtccttggaattatgtgaagcaagggacccaaagggcctctataagcttgctcgtgctgggaaaataaagggttttacaggaatagatgacccttatgaagcaccactgaattgtgagattgagatcaaggaaatagatggtgtatgcccttcgccttctgacatggcggggcaagtggttacttaccttgaggagaaaggcttcctgcacgagtaggctgacgctgaatcgaagctacatccggggaaggtttcaatcagacaagcgcagaataagtcaaaagcgctgccagttaccgtatggttacatagattgatctggatgcctagtatttttctttccgcgcttgctctaccacaagttccattcagtttcattcagatgagcctagatggttcctaatttctttgacctctggaatagattacctgtaatgcaattctgataacagcttggggcagtatcgatttgtcacgggaaggtacgcctaatgttgagagaaactgtattcttgtgctccactttctgcagtgccgacgtgtaccctttccgttttactaaattataattagcttcccttcatttataagtttatttattttttatacactattcttgttacatatctaagtatgtctggatatatagcaaaaaaaaaaaaaa

SEQ ID NO: 215049 - DNA, 2228 bp, Zea Mays
gcctgtcatttgtctctcgcccgccccactgcgcgtcggattcagcaaagccatccttctccttcagtgacaaaggatccagctcgtagtcgcagcccatccatgccccatgcggccatgcctatatatactatactggacgcactccggcccggcgtgctcgtgctcgtcctctcccagcaccgtaaccaccgacagagcacgcaccatgacgaggaccaccaccagcagcacgctgctgacagcggcgctgctctgcctcgcgctgccgctgctccccggggccacggccaataaggcggcgcggcggcggcagggcgacaacctggcgcgcctgcgcgggtcgccgtggccggccgagtcgtcggtgtcgctggcggtcgcggcgacggatgacagagcgtcccggcacgcggcgtcgccgcccgcggggcgcagcaaggaggacgaccgcgtggacaagctgcccgggcagccgtcgggcgtggacttcgagcagtacgccgggtacgtgacggtggacgccgcggccgggcgcgcgctcttctactacctgaccgaggccgtcggcggcggggcggcggccaagccactcctcctctggctcaacggaggccccgggtgctcgtcgctggggtacggcgccatggaggagctgggccctttccgggtgaagagcgacggcaagacgctgtaccgcaacccgtacgcgtggaacaacgcggcgaacgtgctgttcctggagagccccgccggcgtgggcttctcctactccaacaggacggaggactacagccggagcggcgacaacaagacggccgaggacgcgctcctgttcctgctcaactggatggagaagttccccgagtacaagggccgcgacttgtacctcgccggcgagagctacgccggccactacgtcccgcagctggcccacgccatcctccgccacgccgccgccgccgccggcaagccgtcgtcgcccatcaacctcagaggcatcatgatcgggaacgcggtgatcaacgactggacggacaccaagggcatgtacgacttcttctggacgcacgcgctcatctccgacgcgacggccgacgccatcggcaggcactgcaacttcagcgccgccgccgccgccgccgcgggctccaacgacaagtgcgacgaggcgacgtcggaggccgacgaggccctggaggacatcgacatctacaacatctacgcgcccaactgccagtccgccgacctcgtctcgccgcccatcaccccctcgatggacaactttgacccgtgctcggattattacgtggacgcctacctcaacgacccggacgtgcagcgggcgctccacgccaacgtcacccgcctcgaccacccctggtccgcctgcagcgatgtcttgagacgctggactgacagcgccgcgaccgtcctgccgattctcgcggagctcctcaagaacgacctcagggtgtgggtgtacagtggagacaccgacgggagagtgccggtgacttccagcaggtactccgtcaaccagctccagctccccgtggctgcaaaatggagggcatggttcagcagcactcagggggccggggaggtgggtggctacgtggtgcagtacaagggcaaggagaagggcagcctcagcctggtcaccgtgaggggagctgggcacgaggtgcccagctaccagccaaagcgagcgctcgtgcttgtccagggcttcctcgcgggcaaggcgctccccgactgcgaaacatgcgagtcgggttaagcgtagctagcgtttggaagcagcacgcagcacgcagcacacaagagaagagagcgctgtgcaacagcatgtacccccatgcatccatttgatccagtacgacagacaaagtctgagatagaaacatacgcacgcacccaccgtaccttgcagaaaaccatgcaaaaatgcagtcatacacagagcaatctgtacacgaatgaagatggaatcaaacggatctttaagcaaatctttacagtgatgaaatgaatgagctatcactagagaagtgtgctataaaaaagaactgattttatatagagagaaccactgttgtgtaagcaaagtttaggtgcaaatatagtactgaacaccatcagttattttctaggcttacaggaacgctgacaaggcttgtattagaagcaacaggctctaagaaggatgtagagagaggccgacg

SEQ ID NO: 215050 - DNA, 2333 bp, Zea Mays
ctttgccctcacatccatattccataccacaccacaccgcagcccgacttcgcctcacctcgccacgcttgggattcccgcagggatccaatttctggtgaatcttccgtacttctaattcctgaaatatgagaagattctttttctttgggtcctccgctgcaaatgctggcgacgaaaacgggacaccgggcagtgatagcgggactacgcataaaaagacactggtggcagatgtgggcaacgaaagttctggttcctgcagcacaaggttgtcaagatccagaagccgtggtcaaaagcggaataaggaggaaccagccaatccgaagcagctcaggaggtccatgtcattctcgtctccggccacaaacacttgcttagacgaacgatgctttagtttctctggtgatgttccatgcactttgtatgatggatttgatgcacctcagaatgtcaaagatgttgcccccaacatatggtcaccagaaggaaatccagttttgagagaatatgcaataaatatcccaaaagatcattcttccatggaaaacgattctcctcgttcaagatgttgttcatgctcggcagggcactctcctgttagctctcccattgctcttcgatgcaggtcaacaagactaagcaatctattaagcaagaatgaagtactagatcgatacattgatagagggcatgaagatgcaatggtaaatgagaaacagaggcagtatccctccgccgcatctatggtttctactttgggaaggccacctcgaccccaatcaacagtaccatccataccaaaatcaatgaaagggaatacagagtgctacccagatgtagacataaaagaagactgcctttggcaagttgctcaagagggtacaagagataactgcaagattacaactatgtgcgatgcaggtagaaaccacgtaagcatgccagatgcttttgagagagacagtgctacatctgttgtagatatttgtgaagatttgcaagaagtgagacctccaaatgttatttgcccctccgcttgtcctatttcaggggagcaagaaaccaatgacatgttgctgcaaagagctaaagaagttgagtcaaggttcattgttcattgtggagatgaatatgaattcaacattatcagagataagcgaatgagctcaaatgacatgtttcagttgatccagcagttgacagaagataggaaacagttaacgcatgaactgtcttcacatataagagcacacgttgcagaaagatctgctgccaaacagcaatacaaacaatcaaagaaagaactagataccagaactaggaggttggagaaggagaagagtgaaagacaaactacactggagagagagatggacagaaggtcacatgattggtctgtcaaactatcaagatttcaatctgaagaagagagactacatgaacgggtgagagaacttgcagagcagaatgtgtcatttcaaagagaagttgcctttcttgaagcaaataaggctgaagcttcaaccaaagttgctagtttggaattgcaaaacaacaaattaaatgacgatctagagaaacttagaaacgagcatgagaagctccataattcctcagtagataaggatgctcgttttgctgaggttgttgaggaaagggaccacaccagggaatacttgaaggacaaggagggagagaacaaagcattgcacaaagtgattgccagactacaaacaacatgtaatgaacaggaaagagcaatcacaagtctaagacagggatgcaaagctcaattagacaagaaatttgttgagtgtgacagtgataaaatgaggaaattgcgaatggaactgattagactgacaggggtggagcaaaagttgagatgtgaaattcgttcttgtcatcttgaagttgggtccctcagacaagagaacattgcactcttaaatcgtttacaagttgttggaaatggagcacccttctcaattcgccttgaccaagagcttcaggctagagtggacaacctgcaggtgcaaggcttgtcattgcttaataagaccagccaactttgcaccaaattgttggatttgatgaaacacaagaaacttgaaaatgagtctttcagtggcaatgatgtgttgatagtcagtaattacacttttgagtaccaaagcatcaaaggaggaattgaaagtttgaagcgaagtttgaagacaataaattctgtactgaatgaaaagcaaagtgtaaaagaaaaatctggtgagactgcagctagaggtagttcttccagggagcaaacgtatttgtcaagtgtagaggag

SEQ ID NO: 215051 - DNA, 2129 bp, Zea Mays
gccaagagtgatatttttgttctcaagcaacattatgaaaagaaattagatgacttggaacaagaaaataaagctcttcaggtccatgagctcaagaaacaaaaaagtgatgaggcagcaaagcgtttacaagaagatattcagcatataaaatctcagaaggatcagcttcaacaaaaggccaagcaagagtctgaaaaatttatgtcttggaaggctgcccctgaaaaggaagtaatacagctcaagaaggaagggagacgaaatgaatatgacatgcacaagctcttggctttaaatcagaggcaaaaaatggtcttacagaggaaaactgaagaagcagcagctgctacaaaaagattcatggagttgctggaagcaaagaactcatcacttgagacatatggcagtggaaatgcttcggggatgcaggccttaatgcgagctgttgatgatgaactggaagtcactataagagcacatgaattacgctcgtattaccagcgacaaatgcaagagagagcagcaatatccaaggaaatagcaaagctggaggaggaaccaaagcacaagatgagtgattgtcctcaagctatgtctcctagtgctagaagttttaggatatcagcattagagaacatgtcctcatcatcaagcgctatggtgtctatggcttctcaactatcagaagcagaggagcgggagcgggtattcaatggtaaaggtagatggtatcatgtcaggtccctcccagaggcagagaacataatgaaccaccttttccagttagcatcatcttcaaggtgtaaagaaaaagaacacaccattatggaattgaaggaaaaggtggttgtgcttaatagtgaaatcaggcagttagaaacacaagcgacggatctaaggagcacaaataagaggacatatcctgtgcaatcactcattttggtgcaagcgtgcaatcaaactatccagagcatccaatctagatccaacggtttcatatggaaggggttaaaacttttcaatggattgaacaattcaaagaaatctgctaggtcgaatggcactggatttgctccacgtcaggtatttttctttgagtgttttcaagtttatctagtgatattcgtgcgttttggttatagcaaggacaacttcaattgggtggacgatatggacatttcagacagtgagcagttggatgagttagagggtatgcgtgatggatctgattcagactcggtacagtcgaccaggaaaggcagaaacacaccagtcaagagcgtgtagccattcaaatcctaacctggatcgtcaaaatacacacagacgatgcaaagccagagaagccctcagacgaaaaagtgcagtttgcccgaaactattccatcggacggctgttcctgctcaaaagcctcatcatgcaagaccaagaagtgccagtgcagaggctcaggtgcacaatgcggtgcaggctgtggttgtaaggattccaaatgtacattgtggcatcacctcattctgtgtgcaactgttgtgttctcaggttaaaaagtggcgcaattcagcagttcaacccgtccttggatctttacttccctccgagccagagacaccgaagctgcccctcggaacagcgccgacattcccctaaagctaccgagggccatggcaactcctgcggagagcaaccctaccctcacggaccgcaatgctgccaagcccgacaaatccgtcagcaccggcatcaaggatagcaccggagctgccgccacgaggccaccgtctcagctgcgtctgttgcgataatctgattgtgacattcagtatccgtgtcgcggaagtcttttgctgtacaatgggggaggctgcctcctgccttggcgtcctttggagcgaggcaggtagacgtagaccctggaaggctcgctctcggcgtgttcttttgcaacgacaatgccttgtactcgccttagctctgctttggtggaacgcaaccttataatggtgaggtaacatggtgcattaagttatactagtcggttacccgtgcgttgcgacgactcataataatacacacgtaaattatcgataaaaaaagatttcaatattttttattgattgtctcc

SEQ ID NO: 215052 - DNA, 2094 bp, Zea Mays
gagatgaaacaatttgccaagagtgatatttttgttctcaagcaacattatgaaaagaaattagatgacttggaacaagaaaataaagctcttcagaaagaaatagagaatcttcaccatgcattaaccaatgtatgttcttctatggatgagaatgctcaaaaactgaaagaaaactatcttcagaagctgaatgcacttgaatcccaggtccatgagctcaagaaacaaaaaagtgatgaggcagcaaagcgtttacaagaagatattcagcatataaaatctcagaaggatcagcttcaacaaaaggccaagcaagagtctgaaaaatttatgtcttggaaggctgcccctgaaaaggaagtaatacagctcaagaaggaagggagacgaaatgaatatgacatgcacaagctcttggctttaaatcagaggcaaaaaatggtcttacagaggaaaactgaagaagcagcagctgctacaaaaagattcatggagttgctggaagcaaagaactcatcacttgagacatatggcagtggaaatgcttcggggatgcaggccttaatgcgagctgttgatgatgaactggaagtcactataagagcacatgaattacgctcgtattaccagcgacaaatgcaagagagagcagcaatatccaaggaaatagcaaagctggaggaggaaccaaagcacaagatgagtgattgtcctcaagctatgtctcctagtgctagaagttttaggatatcagcattagagaacatgtcctcatcatcaagcgctatggtgtctatggcttctcaactatcagaagcagaggagcgggagcgggtattcaatggtaaaggtagatggtatcatgtcaggtccctcccagaggcagagaacataatgaaccaccttttccagttagcatcatcttcaaggtgtaaagaaaaagaacacaccattatggaattgaaggaaaaggtggttgtgcttaatagtgaaatcaggcagttagaaacacaagcgacggatctaaggagcacaaataagaggacatatcctgtgcaatcactcattttggtgcaagcgtgcaatcaaactatccagagcatccaatctagatccaacggtttcatatggaaggggttaaaagtaaaataggtactatgttttagatggaaggggttaaatataaaataacagtcatcattagatctatatcggatgcaccagatcgcttgattgcatgcttgcaccaggataagtgattgcataggatattttccccacaaataagcagcttttcaatggattgaacaattcaaagaaatctgctaggtcgaatggcactggatttgctccacgtcaggtatttttctttgagtgttttcaagtttatctagtgatattcgtggtaagtatgcaatctttgcggtttttcttgttagatatgtctgaccattcctcgtacatgcatagtgttcgaccttcccagcgttttggttatagcaaggacaacttcaattgggtggacgatatggacatttcagacagtgagcagttggatgagttagaggccagagacaccgaagctgcccctcggaacagcgccgacattcccctaaagctaccgagggccatggcaactcctgcggagagcaaccctaccctcacggaccgcaatgctgccaagcccgacaaatccgtcagcaccggcatcaaggatagcaccggagctgccgccacgaggccaccgtctcagctgcgtctgttgcgataatctgattgtgacattcagtatccgtgtcgcggaagtcttttgctgtacaatgggggaggctgcctcctgccttggcgtcctttggagcgaggcaggtagacgtagaccctggaaggctcgctctcggcgtgttcttttgcaacgacaatgccttgtactcgccttagctctgctttggtggaacgcaaccttataatggtgaggtaacatggtgcattaagttatactagtcggttacccgtgcgttgcgacgactcataataatacacacgtaaattatcgataaaaaaagatttcaatattttttattgattgtctcc

SEQ ID NO: 215053 - DNA, 3157 bp, Zea Mays
ccggctgaccattttttccttttcaagatctcaaggctatcatgaagcttggtggtcaaagtcccaaaagaatgagggacctatcaagcttgtgggttccaccagtataccggagactcttaagtgctgacaaggcagaaagggacatggtagaaaggtgccttattaaggtgtcatgtgttattctaccacctcaacctctcctttccaaggctgttgcttcagaccttgagcagaagctactctcctgtatggtaaatatgcttgatgatccttccaagaaagttcaaactgtgaagtcatggggatggattgtatctttgcttggtccagatgcagtgaacaatagacctctgcttaataaacttataaaggttcctgagcagatgtttactgatctgaatccacaagttcaggttgctacaatggtttcctggaaaagtttggtggatgcattttttccttctcaggcaactgagattgtggcccagcaaactgtgatttccccattaaaacccattgaacaggcaagtgcacaggtgaaaaggataagattaattatggtgcctatatgtcgagttctgtcaagaagtcgcaatattgtacttagctcttcttgtttgagtacatggcattaccttctacatagacttggtaatctgatcaattatttacccattctggaggctgcttttggaccaatactcaaaataattttctcttttgggatcaatgatcagaacaagccactgtggtcattttgcttgaacctttttcttgattttgtttcatcaaaaaatagggtcagagaggatttatgtgccccagtgaatcagaacttgctagctcaatcatgcaagcatatcaaggccttattggatattcaacacatcaaatggttaccatgggatattagttgctttaatttccaactcaatattcttggcataattcttaagccagaactattccaggacataattcctgaaacaatggtgattgttatggattctgcaacagagattttcagatttcttctaaaaggtattcaaatcgaacttagagagcagcgtgcttatgaacaagtcaatgaatgcattactaacgcgtgcaagtttgcaaagaggttgttgctggatcatgtaggaaagaatagtgttatcaagtgtgctgcattactggaatttggtcttcggtttatgaaagttattgcgaaggaactagatcattctttgttagcttctgaaaacattgaggtatgcttagacatcgaacacataaaggagaaccaacatgcagaatgcagcccaaagctgtccttaccaagaatcagatcactctcttacatggagatggtttctccagcagtttatgtgactgcactgtctctgtccatgatatctcagtatactggagagttttctcatagagatgcagatgaattagtttcaattctggatccatcatcagatgccctggagaattttcatactgctgtctcttttatgtatatgcagatcaggcggccaacatgtaacaaggaaagattaaaatggttgatggtttggaactcgtttgcaaaaaaaatgaacagtcaaattatctcttatttggaaaccaattctggattatgttaccatgatgttctccatcagttcttctgttatccaatccttaattttttataccccaaggggatatccattcttttgaatgctgaaaatagctccgagtcaaaattttctgtcctgcaaaacctggagatggaatcaacaattgaagtttatagatccctctctacaaactcctgtaattcgaagtttttttccaaggttttctttgatggtttttacaaatacttggtttgcactattgatgaaaacatggcattgttccaagccaaccttgagcatttgtcggaggagtttgaaaatgctagtgtcctttctgctcttggtgaaatagtcattggactgttacagaatgatcaaatgttgacctatgctaatcaagagttgaaggaaacacctgaagattcttctgtgtgcagacaaccggaacttttcttgaattgcttcaagcttgctaataggtttatgaagttgtcaagttttcatttcaaagcaaatccagctggacagcaccaggtcacaagcaggtttttttcatctttatctaattttgctgggcatctcactttaaaggaagatgttcttcttttcgagattattggagaccaacttaccgagtggctctctttaagcatcatattgtactctgaaatgcaacaaggacaaattgttgttcatcttgagaacctttggctcaagatggttgagtgcctgaagaggagtcagctagttagtgatgttcccttaataaatcagaagcatcgacttcttcaagctgcactcaatcgcccacatcgccccatttcagttgcaacagcatcagtttgcagagtagcaacacatggcaacacaaccctgcaccctggttgcttaatttctgaatttgctgagttattaatgcatagaagaaaggctcttgatagctccaggaaaacagtcatcacatccaatcctactgatctcacggccgagaggtatgatggatctgtgaatgtctcggtgggtttggggaggaagaggctgaagatcatgaagtattcaactaaaccaaaggaactcaacaaaaatagagccaacatgggcatctcaccaggtaatacggaaaatagggcgtgtaggaaaccagaattaatattggagatgctacagaggaagacatagttgtttgaactcaatgttaggtttaaagaacataaatgtgtacatacgtatagaaagcggaaggtcagtgcaatgatcccctgcaaaagaattaaatccattcaaaattacaagtcattttcattccttacacagccacattgtttgactatagggagatggaaacaacaggatctaatcatgtatgtaattgatgctttggcctgggctcctggctgttacccctttttttttgtgtgttttggtaacctctgagcaagattcttgtgttcttcctcatcgtccctgcagccaacacttcgtttgttaactacagccgcaggttcttttccaatcgcattaataatgctgagaagcaagtcatg

SEQ ID NO: 215054 - DNA, 933 bp, Zea Mays
aaaggacagtttttggttataaaggaatttcacccattactaataacaagagggaatcaatgattcacagagatgggagataatttgcaagttgtctatcggcattgtgaaaggactggaccaccttcacacagcatcgcagaaaccaatcattcatggcaatctgaaaacaaataacattatgcttgacgctgatttccagcccaggatatcagacttcggcctctaccttctgctgaaccctgctgctgcgcaggagatgcttgagacatctgcaatgcagggttataaggctccagagctgatcaagattagggatggcaccagggagagtgatatctacagtttgggagtgattatgctcgagatgcttgctcagaaggaggccgcaaatgatgaatcgccaaatgcgcgtgacatccatttgccggtctctttcagagatctggttctcgagaggaagatatctgaagctttcagttccgagcttatcatacagagcaagaattctgggaaggagggcaatctgaatgcctactttgaattggcaacggcttgctgtaatccatcatcgtcattgagaccagatacaaagaaaatactaaaaaggcttgaagacatagcaagataacaatagatgcgcgcggcggtgaggctccagtctgtttagaaagtgtggtgtgttatagcagcggccagcaggatagctttgacgtcccttgtattgtttgttacttcctgcatacagcagagattgtgttgggggcatttggaaaatgatcctaacataagctaggagccccaagcatgtatagaaaagtatattttcctcgtaacaacataggaactcatccgagaacataatgtgtgtgctttcagcgtggaaatttcataaaattttcttaaattgcatttgtctttcttgtaggtttt

SEQ ID NO: 215055 - DNA, 3364 bp, Zea Mays
cccctcatttactgtgctgaaattgcttctccggtctgccgcctgcccgccactctcacacatagcttcccttctcgctcgaaatcaccactcaattcgatcgcaagctgccgaatcctgaaccctatgaagatctccgagctctctcccgagtaccggcagccgccgccgccgccgcaatccgccctccttaccgacctcaacagggtcgtcgccgacgtcgaggcgctcgacgcctccgattcctcttccccggagaagctcgcagccgatctccgctgcctcctcaccaacctcgcatccgctgcttcctcctcctcctcgggtctcaatggggcgttcaggctcaaggtatggaacctcgccttccgcctctggaacgcgtgcgtcgaccgcgccaaccacttcgctgcgaggggtgccgaggccgcggtcgcggagacggagatccgacaggcggcgccggagctcctcctcgtagctggcctcccggaaggcgtccccaacgccgctgcgaaggcggcgtcccttttccaccgcaccggcctgttctggcttgacctcggccgcgccgacctcgcttccgcctgcttcgagaaggccacgccgctggtctgcgccgctgacacggaggaggatcgggacatcctgttggacctcaacctcgcgcgtgcccgcgcggcgtcgagcgaggggaaacaagccctcgccgtcgcgttgctaagccggtccaagcccctcgccgcggcgtcttccgtgggggtgaaagccctcgccgaggggtaccttctcctcggcaaggctgctctcgccactaaatccccggatcccgccatcgacgcgtcgagcctcctaaccgaagcgcttgatctctgtgagagggccgcggcctccccctgctgcaccactccgacgagcccgagatccagtcctgcaaccccaaatctccaagtgatcaaggatcaatgcctccgctgcctcgccgcagagcgtctccaagccaacgactatgagggcaccctgcgctgtatcatggtctcgagagcctcaccagggctggggaaggagcactctagcattgcgttcatggcgctccgtgcgtgtctcagcagtgggaaattgttggaagccgagagggagctcgataggctcatggccaacgctgaagcgccggagtttgtgtgtgtgtcggcagccgagctgtacgtagccagtgtggggctggacgctgcccttaaggtgcttgttgcacttgctgcacggtgtcgcgccagtgcttcagctgttgcagtgagggtgttgaaaacggtggttcagggtgcaggcggcgaggctgggcatgcaagagcgatcgctgaactcgtgtcagatgagagggtggttgcacttttcaatggccctgctaacgcccatgagcgtggcacgatgcatgcactgctatggacatgtggcactgtgcatttccatgcaaagaattacgagattagtgcggatttgattgagaggtcgatgctttatgtttcccgtgacgaggaaagcagatcccgccgtgcaaactgcttccgagtactttgcctttgccatatggcacttcgtcatctcgatcgagcccaagagttcataattgaggctgaaaaggttgaacccagtatccactgtgcctttctgaagtttaagattcttctgcagaagaaggaggaggaggatgctatcaagctgatgaaggccatgatgggctatgttgacttcaaccctcagttcctgatactctcgattcatgaagctattggttgcaagtctttctgtgtggctgttgctttgttaaccttccttctaggcctctactctgctggaaaaccaatgccaatgagtgaggccaccgtcctccgcaacctgataactctcctccttcgtgagccaggatctgaggctgagattcttaagtactcaagacgtgccaagctacggatgggtgagcttggtttggaagcctttttcggaaaggaaactgtagggctgcgtgaactgaattggtttgctgtcagttcatggaatatggctttaaagtatgctcctggctgacgacctaaacaagtctcaattatcagattctgaccttaaaaggggcattgagatgctcagaagagctgggaagctctggtgacctctgatcaattggagaacaacttgccctttcttcatacattcagcttctaccagcttctcagtagactggacactaacgcacaccctcagcagctccaattagccaagaactttgcggcatctaaagcatgtacaccaggtcatcttctcatacttggagacatggcttctaaaggtaaccaaccaaatctcgaggctgctgagtttctcctgaaggccagcatcagtactgcccttgcctctcactcaccaaactatggggtaatcagtgctgcccttagaaagctagtatgccttgctggtctccatgatttcagtggtagcatgagtgatgcagcctatgacgtatttcgacaagcttaccagattgtggttggacttaaagatggtgaatatccatttgaggaagggaggtggcttagtataactgcatggaacaagtcatatttacctgtgcggcttggacaacattctgttgctagaaaatggatgaagatgggtctagatcttgctcggcattttgacaggatgaagctgtatatatcagggatggaggaatgctttgagaactttcggaaattaactggtaaagaacctgatgaatgtagccagcaagatggggaaccaagtactggcatgtctggtactggtagtatgtctcagcctgtcctagtttagaaatttgtgggtggtggaggttcatagctagagaaaaatagaacatctgtttgaaccatacatacctatattcttcattgattgatgtgcactcaaatgctcttccattttctgatgagaattttgcgcacgttccgtgatttgtagagaactatgtgatgattttgttggccgtataatgtcctagaatatagtatgcccatgtgcaaggagaagtcaatatttgtcttatattgggtgactcttctataagtatgatgatctttgtatcggcagtaagggtctgtttgttggttcctcggggctcaggaagagttgccttgggttggatttcaactgcttgggtttcacatctctgcctggcagggtcgcaagcaaacaaccccaagcgtccctcgattttaatatcatcatgtgcaacaaatgttcattattttcgttaaaaaacattttgacaggaaactggttttccgaggtgattttttttgttaagacaactaattgaactccgtagggagct

SEQ ID NO: 215056 - DNA, 294 bp, Zea Mays
gagggttcgaaggaagtagcagtgttttttgttcctagagggaggaagagatggcaaagggggaggtgccggcgatcgggattgacctgggaacaatgtactcgtgtgtcggcgtgtggcagcacaaccgcgtcaagatcatcaccaacgaccaggggaaccacaccacgccgtcctacgtcgccttcaccgacaccgagcggctcatcggcgatgccgccaagaaccaggtcgccatgaaccccaccaacaccgtatttgactccttgctgacagatgtcgctcttcctggat

SEQ ID NO: 215057 - DNA, 1713 bp, Zea Mays
ctttattatccctcgccgtccacacatccagcaccaaatccaaaaaccccatctcccacctctccttccttaccggaagagaaaaaaagatgaaaaccaaacgaacatacacagatacaagcacagcagcaacgatatccaaagctagcagctcatcagataggcaaacaccaagaagctaagctagcgcgccatgcagacgccgaccatgtcgacgtccatggccaccacggcgccagcgaagccccccgcgccgccgcggcaatgctgcaggtacctcctcctcccctccaccggccaccgccggagcgtggcggcatggtctgccaaaaagaagaacccgtggctggacccgttcgacgatgggcccgacgaggagttcgattaccagggcatgttctccggcgggaagcaggaggaagacccgcggccgcccgaggaccctgagaacccgtacgggttcctgaggttcccgcagggctacaacccggagctggacagcctcgcctccaagatgctcaaggaccggtaccccggcgtgctggtggacgtggtggcgtcggccaggggcaagcaggtgtacgagatgtgcaagaacgtcaggtacgctaacgtctatgaccccgacgacgactggccggagcccgccgaatacacgcacatgctcggcgtcctaaagaataggtactatgatctgatcatctccacgaggctggcggggatcgggcacgcgctcttccttttcatgtcgtcggcgcgcgacaaggtcggctacgtttaccccaacgtcaacagcgtcggcgcgggcctcttcctcaacgagatgttcaaggcgccgactaacaacctcgccgacggcgggtaccacatgtataaagacatgctggagtggatcggccggccggcgaagaacgttccccagcagccgacacagccgctgcgggtgtccatctccaagaagctacgggcgtacgtggaggacaagtatagccgcgccggcgtggagaagggcaagtacgtcgtcatccacggcatcgcctctgactccgtcgccaacatgaagtccagaggcgacgacgactgccttcttcccctcgggcactgggctcagatagccaaggaaatcagctccggcgacagggggctcaagcctctgttcgtgatccctcatgagaagcacagagatgaaatcgaggaggaggtgggggacgacacaagcatcctgttcatcaccaccccaggccagctcacctgcctcatcaacgactctgccggcgtcgtcgcgaccaataccgctgccgtgcagctcgccaacgcccgcgacaagccatgtgtggcgttgttctcgtcggcagagaaggcaaggctgttcctgccatacgtggagggcaagagcagctgcaccgtcatatcttcggcgacggggaacctgatcgacatcgacctcaacgcggtgaagaatgtggtgaaggacttggagcccgctcccagcttcgcattggcacagaagtagcagctgcgttccaacatcacccccattgctttgtacatagttcaaacagcagcaacgctagagagaatggtgcagtattacaaactacaaacagcacacatgccgtgtattccgatgttataaataacatctcatatcagctatgcaacgaataaaacttagaacaagaaaccaaaaacaagataacataaatgaattaa

SEQ ID NO: 215058 - DNA, 1704 bp, Zea Mays
ctttattatccctcgccgtccacacatccagcaccaaatccaaaaaccccatctcccacctctccttccttaccggaagagaaaaaaagatgaaaaccaaacgaacatacacagatacaagcacagcagcaacgatatccaaagctagcagctcatcagataggcaaacaccaagaagctaagctagcgcgccatgcagacgccgaccatgtcgacgtccatggccaccacggcgccagcgaagccccccgcgccgccgcggcaatgctgcaggtacctcctcctcccctccaccggccaccgccggagcgtggcggcatggtctgccaaaaagaagaacccgtggctggacccgttcgacgatgggcccgacgaggagttcgattaccagggcatgttctccggcgggaagcaggaggaagacccgcggccgcccgaggaccctgagaacccgtacgggttcctgaggttcccgcagggctacaacccggagctggacagcctcgcctccaagatgctcaaggaccggtaccccggcgtgctggtggacgtggtggcgtcggccaggggcaagcaggtgtacgagatgtgcaagaacgtcaggtacgctaacgtctatgaccccgacgacgactggccggagcccgccgaatacacgcacatgctcggcgtcctaaagaataggtactatgatctgatcatctccacgaggctggcggggatcgggcacgcgctcttccttttcatgtcgtcggcgcgcgacaaggtcggctacgtttaccccaacgtcaacagcgtcggcgcgggcctcttcctcaacgagatgttcaaggcgccgactaacaacctcgccgacggcgggtataaagacatgctggagtggatcggccggccggcgaagaacgttccccagcagccgacacagccgctgcgggtgtccatctccaagaagctacgggcgtacgtggaggacaagtatagccgcgccggcgtggagaagggcaagtacgtcgtcatccacggcatcgcctctgactccgtcgccaacatgaagtccagaggcgacgacgactgccttcttcccctcgggcactgggctcagatagccaaggaaatcagctccggcgacagggggctcaagcctctgttcgtgatccctcatgagaagcacagagatgaaatcgaggaggaggtgggggacgacacaagcatcctgttcatcaccaccccaggccagctcacctgcctcatcaacgactctgccggcgtcgtcgcgaccaataccgctgccgtgcagctcgccaacgcccgcgacaagccatgtgtggcgttgttctcgtcggcagagaaggcaaggctgttcctgccatacgtggagggcaagagcagctgcaccgtcatatcttcggcgacggggaacctgatcgacatcgacctcaacgcggtgaagaatgtggtgaaggacttggagcccgctcccagcttcgcattggcacagaagtagcagctgcgttccaacatcacccccattgctttgtacatagttcaaacagcagcaacgctagagagaatggtgcagtattacaaactacaaacagcacacatgccgtgtattccgatgttataaataacatctcatatcagctatgcaacgaataaaacttagaacaagaaaccaaaaacaagataacataaatgaattaa

SEQ ID NO: 215059 - DNA, 2320 bp, Zea Mays
atgcaaacagatgatcacggctactcacgcgtggtcttcgctcccccgtcctctcggcatgagtgacaccacccctgcggccacagcactgaaccactggaaccgctcgatccagctcgccgccgcgtcgggttcttacggccactgcctccgcctctacgcgggaccgctcctcgccgcgggcctccgcggtgacgcctccactttcccttccctcgccaaatcctgcgccgcgctgcgcctgccggggctcggccgtgccgtccacgccctcgcattcctctcgggcgctgccgtttctcgcgacgccttcgtgcgcacctctctcgtcgacatgtacgccaagtgcggcaggcttcccgacgcgcaccgcctgttcgacgaaacgccgtgctcgagccggacgctggtcgcctggaactgcatgatctcggcgtacggacggagctctcaggtcgaggaggccgtcggggtgttcaacgctatgcggcgcgcggaggtcaggcccagcgggagcacggtcgtcggcctcctgtccgggtgtgcggactcggtgtccgcgaggtaccctggggtgtccgtctatgggctcaccatcaaatcgggccttgacgcggatttgcttgtctcgaactcggtgctcaccatgcttgtccgtggtggccagctggactctgcaaggctgcttttcgatcgtgtggagaacaagtccgtggttacttggagcgccatggcatctgcttatttgcagacaggggactggatggaagtgtttgcactgttcagcagcatgcgagagacagagcaacctatggattcagtcgtgcttgccaatctaatcacggccgctatgctgttcggaaacaacttggtggctaaaggcgtgcacgcccttgcaatcaaggttggttttgatcgtcaggaggatttggcagcatccttggtaaacttgtattccaagtgtggaaatcttttggcagctagagaggtttttgattcactccagtggaagagtgtaatcatgtggacttcgatgttgaacggatatgtcgaatgtggttatccggatgaggctctggcgacatttgatgccatgttgtgtgccaaggtagagccaaacaaagcaaccgttctagcggttctttcagcaggcgctaatctgggatccgctaatgttgcccaaaaggtcgaggagcatgtgaaagcaatggagctgcagtcagacctgcaagtttgtactcgactgatagacatgtactgcaagtgtgggagcatccagcgtgctagaaaaatatttgacagtgttcctaacagggacttagctatctggagtgccatgatcaatggacatgcttgcaatggagaaggcagtgaggctgttgtccttttcaacgagatgcagagcaaaggtgtccgacctgatgccattgtcttcactcatatcctaacagcatgcagccactctggttcagtagatgaaggtcttcgctgctttcatagcatgactgcagaacatggtatcgaaccatcagtcgaacattacatgtgcatgattgatttgctttgtaaagctggtcatctcagtagcgctataaagttctttggtgagatgccagttcggttgcgaaaccaggttttggctcctctaattagtgcacacagagttaatggtgctgattcatccgtagagttcatgtcagaaggactactgaacctgggctcccaagattctggtcactgtgtcctaatttctaacatgcttagctgtttggggcagtggaagaaggccagaagttataggacgctaataagcaagcaaggattagtcaagaagcctggatggagttacatcgagctgggtggctagctgctctatgtttgtagagaacccaatccaccgaatcctacgagatggcatgagttctttcaagcgcttttggaccaggctcagtctagttaaggcaatgagatttagtatgatgctggagtttgcattgattcggtgtgacaaaatgcaaagacaatgagcacacacaatcaggaaactagtccgtattgagttgaggcttaatgaggataagctaaggtcgtgctcagcagagcgcagagcgtatagttgtgtaaaacacatttttgcgttcagtggagcacgtatatagccgtgtaaaacatatttttgcattgtaaaccgtactgattacatagtggagtttgaaataagaattgagataataaatatgatagaaaggctgtcggagatagcctaaggactttctggatgtagttgctatggttaaatgaaatgaacagggaattcttg

SEQ ID NO: 215060 - DNA, 1692 bp, Zea Mays
ggcttcacgagctatatacactcggcttcagagacgccaacaggacagatagcagccctccgcactttcggctcgtagctacactacactacaagcgcgcgcgagcaacgtcgtcgtcgtcgtcagccacattgagccatacatgcatggcgattgcagagcacacgccgtcgtcgtcgtcgcctttccggcagcatcgacccaccggatgggtcacgttcacggcggcaacgccactgctcgcgctgcagctggccctgctggccgccttggttatggcgacggacccttcaccttctccggagctcgtcgagctgacgctcctcaccggcgcgcgggagaagggcgcagtgtgcttggatggaagcccgccgggctaccacttgcagagaggcttcggctccggatcccacagctggatcgtctatcttcagggaggagcttggtgcagcagtaacaccacagacacagaaacttgttccgagcgtaagatgaccgcctatggctcgtccaagcttatgggagcagtaacctttgatgggatattcagaaaccagcagcctcagaatcctgatttctacaactggaacaaagtctacgtaaggtattgcgacggggcgtcattttctggggacgcggagggtgaagcacaggacggaactaagctgttcttcagaggatcgcgcatctgggacgcagtcgtcgatgaactcatgggaaaaggaatggacgccgctgaacaggccttgctcgcaggctgctctgctggcggtctagctacgctactgcactgcgacgatttccgcgcgaggtttccgcaggaggtcccggtcaaatgccttcctgatggcggattcttcctggacataaaggatttatcaggagaaaggcacatgcggtcggtgttcagtggagttgttcagcttcagaatgttagcggagttctgcccaagcgctgcctggcgaagaaggacccagcagagtgtttcttccccgctgaacttatcaagagcatcagcacccccacgttcatcgtgaactcggaatacgattcttggcagatcgcgaacgttgtcgcgcccgacggatcctacactggagacgcgtggacgagctgcagagacaacattcggaactgcagctccgagcagatggacgtgctgcatgggttcagggcggaactcatcagggagctgaaggttgccgaaggtgagcgggaatgggggctgttcgtcgactcgtgcttcacgcactgtcagacccagtcgagcgactggtggcattcgcccacctccccgaggctcggtaatcagactgttgcagaggctgttggggactggtactttggtagaaggcgggtagtgaagcaggtcgactgcgagtacccttgcaaccccacgtgtagcattcagtagctgtgagctggcttcttcttcgtgaccgccattgcaccgagctgagattcatgggagtccttgtttcctccactctcgtatttgatttgtcgttgttagaaaaccagttacattttaatctagagaacgatacataaatgttaccgacaatacgtacaagtgtgtgtaaacttagcatgttgaacaaagcatagggaaacataattgtttgtgttggcgccgatctgtcaccaaacactaggggtataaccgtctggcggtgtcctgtatggcggcg

SEQ ID NO: 215061 - DNA, 2256 bp, Zea Mays
ttgacttattcaattttgactctcgtcggctccggtatttcgacttccaaaatagccctaacatttaccgaagctcctcccgccggcgcgctgcgatccaactccgagatgctcgcaccgcttccgcgcctgacgagcgcgctccgcggccactacgacgctgatcaggcctacctcctccgcaagagcgccctccaggctctcaccctccccaggccgcatgacgagtggaagttcgctcggaaaatcgtgcctggctgggacgatgcttccagcgaagtgcgtcaggcgtataaacaatttatcggggccgttgtggagttgttgagcggagaggcagtgtctgaagaactctaccaagttgcgcagactgtatatactctatttggtggcgatgacacggagtatgttggtgctaaaaaagtcctttccaaaaggaatgagttggagagccttgtgggctacactgtacaagactcagttttgaaaaagctagctcagttagctcagaagctcgattcccttcaacgagcaagtgcctatgaatctgtacacagaatagcggatgatgtaaatgaaaatgatagaattgaatttggagcagacttcgatttcaagccacttgcccgtttcattgttgatgtttctcttgacgcacccttagaaagtgctgaattgggcagtggtccatttgaaaaatggcagtatgatgcttggagcacatccacaactagtcattcaactgctgttaggggttctgtgagtttgaggtggctgaaagatcagtgtgctttgataactaaaagtggtggctcaatgctctcaggagatgaacttgcaatgaccttgtgcagagtgctcctatcaaataaagcaggcgatcagatagctggtgaacttttggacctggttggcgacaccgcttttgaaatagttcaagatcttcttttgcataggaaagagctagtggatgcaattcaacatggattgtcgatactgaaatctgagaaaatgacctcaggtaatcaaccaaagatgccaacttatggtacacaggtaactgtacaaacagagtctgaacgccagcttgataagattaggaggaaagaggaaagacgtagcaagcgcagtgcagacagtggcaataatgatattggtgttgatgatttttcatcccttcttttggcaagtgaacggaaggaggcatttgatgacgtgattggtagtggagaagggtcagacagttttacagtaacttcccttcctcaaggaaccacaaggaaacacatgaagggttatgaagaagtgaagattccaccaactccaacagcatcactgaaacccaatgagaagctgattgaaataaaagaattagatgagtttgcccaagctgccttccagggatacaagtcactcaatcgtgtgcagagtcgtattttccaagctacatactacaccaatgagaatattttagtttgtgccccaacaggtgctgggaaaacaaatattgcaatgattgcagttcttcatgaggttaaacagcacttcagggatggtattttacataaaaacgagtttaagatagtctatgttgctccaatgaaggccttggccgcagaggtaacagcaacattcagtcgccgattatctccattgaacctggttgttagagaacttacaggagatatgcagttgaccaaaaatgagattgaagaaactcagatgatagtgactactcctgagaagtgggatgttattacacgcaaaagcagtgacatgtcactttcaatgctggttaagctgatcatcattgatgaagtacaccttttaaatgacgatagaggttcagtaattgaggcgctagtagctcggactctccgccaggttgagtctatgcaatcaatgattcgcattgttggcctatctgctaccctgcctacctacttagaggtcgcacattttttgcgggttaatccagacactggacttttcttttttgactcaagctatcgtccagttcctcttgctcagcagtacattgggatcagtgaaagggattacacaaagagaagtgaattattcaatactttgtgttatgagaaggttgttgagtccattaagcaaggtcaccaagcattggtttttgtccatacccgtaaggatactgggaaaaccgctagaaccctgggtgcttatgccacgtgaatggggctgtagcctatttggtcacaagagccttagtatggtaaccacctg

SEQ ID NO: 215062 - DNA, 2447 bp, Zea Mays
ttgacttattcaattttgactctcgtcggctccggtatttcgacttccaaaatagccctaacatttaccgaagctcctcccgccggcgcgctgcgatccaactccgagatgctcgcaccgcttccgcgcctgacgagcgcgctccgcggccactacgacgctgatcaggcctacctcctccgcaagagcgccctccaggctctcaccctccccaggccgcatgacgagtggaagttcgctcggaaaatcgtgcctggctgggacgatgcttccagcgaagtgcgtcaggcgtataaacaatttatcggggccgttgtggagttgttgagcggagaggcagtgtctgaagaactctaccaagttgcgcagactgtatatactctatttggtggcgatgacacggagtatgttggtgctaaaaaagtcctttccaaaaggaatgagttggagagccttgtgggctacactgtacaagactcagttttgaaaaagctagctcagttagctcagaagctcgattcccttcaacgagcaagtgcctatgaatctgtacacagaatagcggatgatgtaaatgaaaatgatagaattgaatttggagcagacttcgatttcaagccacttgcccgtttcattgttgatgtttctcttgacgcacccttagaaagtgctgaattgggcagtggtccatttgaaaaatggcagtatgatgcttggagcacatccacaactagtcattcaactgctgttaggggttctgtgagtttgaggtggctgaaagatcagtgtgctttgataactaaaagtggtggctcaatgctctcaggagatgaacttgcaatgaccttgtgcagagtgctcctatcaaataaagcaggcgatcagatagctggtgaacttttggacctggttggcgacaccgcttttgaaatagttcaagatcttcttttgcataggaaagagctagtggatgcaattcaacatggattgtcgatactgaaatctgagaaaatgacctcaggtaatcaaccaaagatgccaacttatggtacacaggtaactgtacaaacagagtctgaacgccagcttgataagattaggaggaaagaggaaagacgtagcaagcgcagtgcagacagtggcaataatgatattggtgttgatgatttttcatcccttcttttggcaagtgaacggaaggaggcatttgatgacgtgattggtagtggagaagggtcagacagttttacagtaacttcccttcctcaaggaaccacaaggaaacacatgaagggttatgaagaagtgaagattccaccaactccaacagcatcactgaaacccaatgagaagctgattgaaataaaagaattagatgagtttgcccaagctgccttccagggatacaagtcactcaatcgtgtgcagagtcgtattttccaagctacatactacaccaatgagaatattttagtttgtgccccaacaggtgctgggaaaacaaatattgcaatgattgcagttcttcatgaggttaaacagcacttcagggatggtattttacataaaaacgagtttaagatagtctatgttgctccaatgaaggccttggccgcagaggtaacagcaacattcagtcgccgattatctccattgaacctggttgttagagaacttacaggagatatgcagttgaccaaaaatgagattgaagaaactcagatgatagtgactactcctgagaagtgggatgttattacacgcaaaagcagtgacatgtcactttcaatgctggttaagctgatcatcattgatgaagtacaccttttaaatgacgatagaggttcagtaattgaggcgctagtagctcggactctccgccaggttgagtctatgcaatcaatgattcgcattgttggcctatctgctaccctgcctacctacttagaggtcgcacattttttgcgggttaatccagacactggacttttcttttttgactcaagctatcgtccagttcctcttgctcagcagtacattgggatcagtgaaagggattacacaaagagaagtgaattattcaatactttgtgttatgagaaggttgttgagtccattaagcaaggtcaccaagcattggtttttgtccatacccgtaaggatactgggaaaaccgctagaaccctgattgacctagcagcaaaagcaggggaattggaattattttcaagtgcagatcatcctcaatttccattaatcaagaaagatgttagtaaagcaaaaagtcgtgaagttgttgaattttttgaatctggatttggtatacacaatgctggaatgatgcgatctgacagaagtttgatggagcgcttgtttggtgacgggcttttgaaacaactttggcttggggagtaaacttaccagctcatacagttgttataaagggc

SEQ ID NO: 215063 - DNA, 6775 bp, Zea Mays
ttgacttattcaattttgactctcgtcggctccggtatttcgacttccaaaatagccctaacatttaccgaagctcctcccgccggcgcgctgcgatccaactccgagatgctcgcaccgcttccgcgcctgacgagcgcgctccgcggccactacgacgctgatcaggcctacctcctccgcaagagcgccctccaggctctcaccctccccaggccgcatgacgagtggaagttcgctcggaaaatcgtgcctggctgggacgatgcttccagcgaagtgcgtcaggcgtataaacaatttatcggggccgttgtggagttgttgagcggagaggcagtgtctgaagaactctaccaagttgcgcagactgtatatactctatttggtggcgatgacacggagtatgttggtgctaaaaaagtcctttccaaaaggaatgagttggagagccttgtgggctacactgtacaagactcagttttgaaaaagctagctcagttagctcagaagctcgattcccttcaacgagcaagtgcctatgaatctgtacacagaatagcggatgatgtaaatgaaaatgatagaattgaatttggagcagacttcgatttcaagccacttgcccgtttcattgttgatgtttctcttgacgcacccttagaaagtgctgaattgggcagtggtccatttgaaaaatggcagtatgatgcttggagcacatccacaactagtcattcaactgctgttaggggttctgtgagtttgaggtggctgaaagatcagtgtgctttgataactaaaagtggtggctcaatgctctcaggagatgaacttgcaatgaccttgtgcagagtgctcctatcaaataaagcaggcgatcagatagctggtgaacttttggacctggttggcgacaccgcttttgaaatagttcaagatcttcttttgcataggaaagagctagtggatgcaattcaacatggattgtcgatactgaaatctgagaaaatgacctcaggtaatcaaccaaagatgccaacttatggtacacaggtaactgtacaaacagagtctgaacgccagcttgataagattaggaggaaagaggaaagacgtagcaagcgcagtgcagacagtggcaataatgatattggtgttgatgatttttcatcccttcttttggcaagtgaacggaaggaggcatttgatgacgtgattggtagtggagaagggtcagacagttttacagtaacttcccttcctcaaggaaccacaaggaaacacatgaagggttatgaagaagtgaagattccaccaactccaacagcatcactgaaacccaatgagaagctgattgaaataaaagaattagatgagtttgcccaagctgccttccagggatacaagtcactcaatcgtgtgcagagtcgtattttccaagctacatactacaccaatgagaatattttagtttgtgccccaacaggtgctgggaaaacaaatattgcaatgattgcagttcttcatgaggttaaacagcacttcagggatggtattttacataaaaacgagtttaagatagtctatgttgctccaatgaaggccttggccgcagaggtaacagcaacattcagtcgccgattatctccattgaacctggttgttagagaacttacaggagatatgcagttgaccaaaaatgagattgaagaaactcagatgatagtgactactcctgagaagtgggatgttattacacgcaaaagcagtgacatgtcactttcaatgctggttaagctgatcatcattgatgaagtacaccttttaaatgacgatagaggttcagtaattgaggcgctagtagctcggactctccgccaggttgagtctatgcaatcaatgattcgcattgttggcctatctgctaccctgcctacctacttagaggtcgcacattttttgcgggttaatccagacactggacttttcttttttgactcaagctatcgtccagttcctcttgctcagcagtacattgggatcagtgaaagggattacacaaagagaagtgaattattcaatactttgtgttatgagaaggtcttttctctatgaatagcatggttctcttgatttctgtatctgtaccttcgtattactcttacatcaaattgataggttgttgagtccattaagcaaggtcaccaagcattggtttttgtccatacccgtaaggatactgggaaaaccgctagaaccctgattgacctagcagcaaaagcaggggaattggaattattttcaagtgcagatcatcctcaatttccattaatcaagaaagatgttagtaaagcaaaaagtcgtgaagttgttgaattttttgaatctggatttggtatacacaatgctggaatgatgcgatctgacagaagtttgatggagcgcttgtttggtgacgggcttttgaaagtccttgtttgtacagcaactttggcttggggagtaaacttaccagctcatacagttgttataaagggcacacagctatatgatcctaaagctggtgggtggcgagacttggggatgcttgatgtgatgcagatctttggacgtgctggaaggccacagtttgataaaagtggcgaaggaattattatcacaacacatgacaaattggcttattacttgaggttattgacaagtcagcttccaatagagagccagttccttggatctctgaaagataatttaaatgctgaagttgctttgggcactgtaacaaatgtcagggaggcttgtacctggcttggctatacatacttatttataaggatgaagactaatcctctggtgtatgggataacttgggaagaggttatgggagatccttctatgggtgcaaagcaaagaacatttattattgatgctgcacgagcactggacaaagctaagatgatgcgctttgatgaaaagagtggtaacttctactgcaccgaacttggtcgaattgcaagtcatttttaccttcagtactccagtgtcgagacttacaatgagatgcttcgacgtcacatgagtgaaagtgagttgattactatggtggcccattcctctgaatttgagaatatcgtagtaagagaagaagaacaggatgaattagaagcccttgcaaggaaagcatgccctttagaaattaagggtgggccgactgacaaacatgggaaaatttcaattctcatacaggtttatatttcccgtgctccaatcgatagctcctctttacattctgatgctcaatacattagtcaaagtttggcacgcataatgagggcactatttgagatttgtctgcgtcggggatggtctgagatgtcatccttattgttgcaatattgcaaggccgtggaccgcaagatatggccccatcttcatccacttaggcagtttgataaggatctttctcctcaggtattgtggaaactcgaggaaagaaatgttgatctggatcatctttatgagatggaggaaaatgaaattggagctctgatccggttttctcatcagggaaagttggtcaagcaatacgttggatacttcccgtatgtcaacctatctgcaaccgtgagcccaatcactaggacagttcttaaagtggacctgcatataactcctgaatttgtgtggaaagatcgttatcatggcatgtcagaacgatggtggatcattgttgaggattctgaaaatgataccatttatcattcagagctattcacattaacgaagaagatggcaagaggaacacctacaaagatatcttttaatgtaccaatatttgaacctcatccgccacagtactatatacatgccatctcagactcatggctacatgctgaaacactcttcactgtttcttttcataatttgacattgccacagacacaaataacacacacagaactcttggacttgaagcctcttccactgagtgctcttggcaacaaaacgtatgaggatctgtacagattttcccatttcaacccgatacaaactcaggcttttcatgttctttatcacactgataacaatgtactcttgggagctccaactgggagtggcaaaacaatttcggcagaacttgcaatgctccatcttttcagtacacaaccagacatgaaggtagtttacattgctcctctaaaggcaatagtacgagaaagaatgaatgattggagaaaacgtcttgtaattcagcttgggaagaagatggttgagatgactggtgacttcactccagatttgatggccctattgtcagctgacatcatcatttctacccctgaaaaatgggatgggattagtcgaaattggcatagcagaagttacgttatgaaggtcgggctcatgatattggatgagatacatcttctgggagctgaccgtggacccatccttgaggtcattgtatcaagaatgcgatacatatcatcacaaacagaacgttcaattcggtttgttggtttatcaacggcattagcaaatgctcgatgacggtctattcaatttcaagcctagtgtgagacctgtacctcttgaagtgcatatccagggatatcctgggaaattctattgtccaagaatgaatagcatgaacaaaccagcttatgcagccatatgcactcattcacccaataaaccagttctcatttttgtgtcatcacgtcgacagacaagacttacagctcttgatatcattcagcttgcagcatcagatgaaaaaccaaggcagttcctgagcattgaagacaactccctagacatggttctttcacaggtttctgacagtaatttgaggcatactctgcaatttggcataggtctgcatcatgctggtttaaatgacagagacagatccttggttgaggagcttttttcaaacaataagattcaggtgctggtatgtaccagcacattggcgtggggtgtcaatcttccagctcacctggtcataatcaagggcactgaatactatgatgggaaaacaaaaagatacatagattatgatatcacagatattctgcagatgatgggtcgtgcaggtcggccgcaatacgaccaacatggcaaagctgttattcttgtccatgaaccaaaaaagagcttttacaagaagttcctctacgaaccgtttcctgtggaaagtaatctgagggagcacttgcatgaccacataaatgcagaaattgtttctggcaccatcagcaacaaggaggaggcgattatttatctcacctggacttacctatatcgcagattggttgttaatccggcctattatggattggaggatactgaaacaaacacattgaattcttatctatcaaggttagtcgaaactacatttgaagatcttgaggacagtggatgcataaaagtggatgaccactctgtaaagtacttgattttggggaaaatagcttcacagtattacctgagctacctcactgtttcaatgtttgggtcaaatattggccccaacacaacgttggaagtctttctacacatactgtcagctgcatcagaatttgatgagcttcctgtacggcacaatgaggacaatttgaatcgaatactcagcggaaatgtcccgtatccagttgatcaacaccaccttgatgatccacatgttaaagccaacttactctttcaggcacatttctccagagcagaattgccaataagcgactatgtcactgacttgaaatcagttcttgatcagagcatacgcatcatacaggcaatgattgatgtatgcgcgaatagtggatggcttacgagtgcattgacttgcatgcatctcttgcagatgatcatacagggtctctggtttgagagagattatgaatccctctggatgttgccatccatgaatgatgatatattagaccatctcaagagtagaggagtctcaacagtcccctccttactagatctttcccgtgaagaattgcgtagggtacttcaaccattttctgcgtcagagttgtatcaggatctgcaacatttccctcatgttgatgtgaaagttaagcttcataatgaacaggagcgatccaaacctccaactttaaacatcaggttgcaattgaaaaattcgcgacggtcagcatcaagagcatttgcccctagatttcccaaggcaaaacaagaagcttggtggcttgtcctggggaatgctacaagttcagagctgtatggtctgaaaagaattagttttgcagatcgggtgattaatactcgcatggaattgccacagacgttcaatgtgcaggagacgaagctgatcttggtgtcggattgctacctaggttttgacttggagtattctcttgagcatctcaccaagggttgagtgctttattcagagctgtttgggctgtttcattttgtatgggttcagcaaccagctcatcctagattgatcctgtaatcacgagacatgagttcattccatgaatttttgtttgtatgactacatccctcgtgttcatggttatattatatttaatagctatatatacgagtggataggtttataactttcatgaaatatcttttccgtaagcatagtagatgtttgagctctaaggttatgaccaacaaattgtgtatatggtcgtgcaaaatactattttataatataaactatattatttacatggtgaagtttgaaatagaagatcgagatgagtaagttgctggaattagcctaagg

SEQ ID NO: 215064 - DNA, 6729 bp, Zea Mays
ttgacttattcaattttgactctcgtcggctccggtatttcgacttccaaaatagccctaacatttaccgaagctcctcccgccggcgcgctgcgatccaactccgagatgctcgcaccgcttccgcgcctgacgagcgcgctccgcggccactacgacgctgatcaggcctacctcctccgcaagagcgccctccaggctctcaccctccccaggccgcatgacgagtggaagttcgctcggaaaatcgtgcctggctgggacgatgcttccagcgaagtgcgtcaggcgtataaacaatttatcggggccgttgtggagttgttgagcggagaggcagtgtctgaagaactctaccaagttgcgcagactgtatatactctatttggtggcgatgacacggagtatgttggtgctaaaaaagtcctttccaaaaggaatgagttggagagccttgtgggctacactgtacaagactcagttttgaaaaagctagctcagttagctcagaagctcgattcccttcaacgagcaagtgcctatgaatctgtacacagaatagcggatgatgtaaatgaaaatgatagaattgaatttggagcagacttcgatttcaagccacttgcccgtttcattgttgatgtttctcttgacgcacccttagaaagtgctgaattgggcagtggtccatttgaaaaatggcagtatgatgcttggagcacatccacaactagtcattcaactgctgttaggggttctgtgagtttgaggtggctgaaagatcagtgtgctttgataactaaaagtggtggctcaatgctctcaggagatgaacttgcaatgaccttgtgcagagtgctcctatcaaataaagcaggcgatcagatagctggtgaacttttggacctggttggcgacaccgcttttgaaatagttcaagatcttcttttgcataggaaagagctagtggatgcaattcaacatggattgtcgatactgaaatctgagaaaatgacctcaggtaatcaaccaaagatgccaacttatggtacacaggtaactgtacaaacagagtctgaacgccagcttgataagattaggaggaaagaggaaagacgtagcaagcgcagtgcagacagtggcaataatgatattggtgttgatgatttttcatcccttcttttggcaagtgaacggaaggaggcatttgatgacgtgattggtagtggagaagggtcagacagttttacagtaacttcccttcctcaaggaaccacaaggaaacacatgaagggttatgaagaagtgaagattccaccaactccaacagcatcactgaaacccaatgagaagctgattgaaataaaagaattagatgagtttgcccaagctgccttccagggatacaagtcactcaatcgtgtgcagagtcgtattttccaagctacatactacaccaatgagaatattttagtttgtgccccaacaggtgctgggaaaacaaatattgcaatgattgcagttcttcatgaggttaaacagcacttcagggatggtattttacataaaaacgagtttaagatagtctatgttgctccaatgaaggccttggccgcagaggtaacagcaacattcagtcgccgattatctccattgaacctggttgttagagaacttacaggagatatgcagttgaccaaaaatgagattgaagaaactcagatgatagtgactactcctgagaagtgggatgttattacacgcaaaagcagtgacatgtcactttcaatgctggttaagctgatcatcattgatgaagtacaccttttaaatgacgatagaggttcagtaattgaggcgctagtagctcggactctccgccaggttgagtctatgcaatcaatgattcgcattgttggcctatctgctaccctgcctacctacttagaggtcgtcgcacattttttgcgggttaatccagacactggacttttcttttttgactcaagctatcgtccagttcctcttgctcagcagtacattgggatcagtgaaagggattacacaaagagaagtgaattattcaatactttgtgttatgagaaggttgttgagtccattaagcaaggtcaccaagcattggtttttgtccatacccgtaaggatactgggaaaaccgctagaaccctgattgacctagcagcaaaagcaggggaattggaattattttcaagtgcagatcatcctcaatttccattaatcaagaaagatgttagtaaagcaaaaagtcgtgaagttgttgaattttttgaatctggatttggtatacacaatgctggaatgatgcgatctgacagaagtttgatggagcgcttgtttggtgacgggcttttgaaagtccttgtttgtacagcaactttggcttggggagtaaacttaccagctcatacagttgttataaagggcacacagctatatgatcctaaagctggtgggtggcgagacttggggatgcttgatgtgatgcagatctttggacgtgctggaaggccacagtttgataaaagtggcgaaggaattattatcacaacacatgacaaattggcttattacttgaggttattgacaagtcagcttccaatagagagccagttccttggatctctgaaagataatttaaatgctgaagttgctttgggcactgtaacaaatgtcagggaggcttgtacctggcttggctatacatacttatttataaggatgaagactaatcctctggtgtatgggataacttgggaagaggttatgggagatccttctatgggtgcaaagcaaagaacatttattattgatgctgcacgagcactggacaaagctaagatgatgcgctttgatgaaaagagtggtaacttctactgcaccgaacttggtcgaattgcaagtcatttttaccttcagtactccagtgtcgagacttacaatgagatgcttcgacgtcacatgagtgaaagtgagttgattactatggtggcccattcctctgaatttgagaatatcgtagtaagagaagaagaacaggatgaattagaagcccttgcaaggaaagcatgccctttagaaattaagggtgggccgactgacaaacatgggaaaatttcaattctcatacaggtttatatttcccgtgctccaatcgatagctcctctttacattctgatgctcaatacattagtcaaagtttggcacgcataatgagggcactatttgagatttgtctgcgtcggggatggtctgagatgtcatccttattgttgcaatattgcaaggccgtggaccgcaagatatggccccatcttcatccacttaggcagtttgataaggatctttctcctcaggtattgtggaaactcgaggaaagaaatgttgatctggatcatctttatgagatggaggaaaatgaaattggagctctgatccggttttctcatcagggaaagttggtcaagcaatacgttggatacttcccgtatgtcaacctatctgcaaccgtgagcccaatcactaggacagttcttaaagtggacctgcatataactcctgaatttgtgtggaaagatcgttatcatggcatgtcagaacgatggtggatcattgttgaggattctgaaaatgataccatttatcattcagagctattcacattaacgaagaagatggcaagaggaacacctacaaagatatcttttaatgtaccaatatttgaacctcatccgccacagtactatatacatgccatctcagactcatggctacatgctgaaacactcttcactgtttcttttcataatttgacattgccacagacacaaataacacacacagaactcttggacttgaagcctcttccactgagtgctcttggcaacaaaacgtatgaggatctgtacagattttcccatttcaacccgatacaaactcaggcttttcatgttctttatcacactgataacaatgtactcttgggagctccaactgggagtggcaaaacaatttcggcagaacttgcaatgctccatcttttcagtacacaaccagacatgaaggtagtttacattgctcctctaaaggcaatagtacgagaaagaatgaatgattggagaaaacgtcttgtaattcagcttgggaagaagatggttgagatgactggtgacttcactccagatttgatggccctattgtcagctgacatcatcatttctacccctgaaaaatgggatgggattagtcgaaattggcatagcagaagttacgttatgaaggtcgggctcatgatattggatgagatacatcttctgggagctgaccgtggacccatccttgaggtcattgtatcaagaatgcgatacatatcatcacaaacagaacgttcaattcggtttgttggtttatcaacggcattagcaaatgctcgtgatttagctgattggttgggcgttacagatgacggtctattcaatttcaagcctagtgtgagacctgtacctcttgaagtgcatatccagggatatcctgggaaattctattgtccaagaatgaatagcatgaacaaaccagcttatgcagccatatgcactcattcacccaataaaccagttctcatttttgtgtcatcacgtcgacagacaagacttacagctcttgatatcattcagcttgcagcatcagatgaaaaaccaaggcagttcctgagcattgaagacaactccctagacatggttctttcacaggtttctgacagtaatttgaggcatactctgcaatttggcataggtctgcatcatgctggtttaaatgacagagacagatccttggttgaggagcttttttcaaacaataagattcaggtgctggtatgtaccagcacattggcgtggggtgtcaatcttccagctcacctggtcataatcaagggcactgaatactatgatgggaaaacaaaaagatacatagattatgatatcacagatattctgcagatgatgggtcgtgcaggtcggccgcaatacgaccaacatggcaaagctgttattcttgtccatgaaccaaaaaagagcttttacaagaagttcctctacgaaccgtttcctgtggaaagtaatctgagggagcacttgcatgaccacataaatgcagaaattgtttctggcaccatcagcaacaaggaggaggcgattatttatctcacctggacttacctatatcgcagattggttgttaatccggcctattatggattggaggatactgaaacaaacacattgaattcttatctatcaaggttagtcgaaactacatttgaagatcttgaggacagtggatgcataaaagtggatgaccactctgtaaagtacttgattttggggaaaatagcttcacagtattacctgagctacctcactgtttcaatgtttgggtcaaatattggccccaacacaacgttggaagtctttctacacatactgtcagctgcatcagaatttgatgagcttcctgtacggcacaatgaggacaatttgaatcgaatactcagcggaaatgtcccgtatccagttgatcaacaccaccttgatgatccacatgttaaagccaacttactctttcaggcacatttctccagagcagaattgccaataagcgactatgtcactgacttgaaatcagttcttgatcagagcatacgcatcatacaggcaatgattgatgtatgcgcgaatagtggatggcttacgagtgcattgacttgcatgcatctcttgcagatgatcatacagggtctctggtttgagagagattatgaatccctctggatgttgccatccatgaatgatgatatattagaccatctcaagagtagaggagtctcaacagtcccctccttactagatctttcccgtgaagaattgcgtagggtacttcaaccattttctgcgtcagagttgtatcaggatctgcaacatttccctcatgttgatgtgaaagttaagcttcataatgaacaggagcgatccaaacctccaactttaaacatcaggttgcaattgaaaaattcgcgacggtcagcatcaagagcatttgcccctagatttcccaaggcaaaacaagaagcttggtggcttgtcctggggaatgctacaagttcagagctgtatggtctgaaaagaattagttttgcagatcgggtgattaatactcgcatggaattgccacagacgttcaatgtgcaggagacgaagctgatcttggtgtcggattgctacctaggttttgacttggagtattctcttgagcatctcaccaagggttgagtgctttattcagagctgtttgggctgtttcattttgtatgggttcagcaaccagctcatcctagattgatcctgtaatcacgagacatgagttcattccatgaatttttgtttgtatgactacatccctcgtgttcatggttatattatatttaatagctatatatacgagtggataggtttataactttcatgaaatatcttttccgtaagcatagtagatgtttgagctctaaggttatgaccaacaaattgtgtatatggtcgtgcaaaatactattttataatataaactatattatttacatggtgaagtttgaaatagaagatcgagatgagtaagttgctggaattagcctaagg

SEQ ID NO: 215065 - DNA, 6712 bp, Zea Mays
ttgacttattcaattttgactctcgtcggctccggtatttcgacttccaaaatagccctaacatttaccgaagctcctcccgccggcgcgctgcgatccaactccgagatgctcgcaccgcttccgcgcctgacgagcgcgctccgcggccactacgacgctgatcaggcctacctcctccgcaagagcgccctccaggctctcaccctccccaggccgcatgacgagtggaagttcgctcggaaaatcgtgcctggctgggacgatgcttccagcgaagtgcgtcaggcgtataaacaatttatcggggccgttgtggagttgttgagcggagaggcagtgtctgaagaactctaccaagttgcgcagactgtatatactctatttggtggcgatgacacggagtatgttggtgctaaaaaagtcctttccaaaaggaatgagttggagagccttgtgggctacactgtacaagactcagttttgaaaaagctagctcagttagctcagaagctcgattcccttcaacgagcaagtgcctatgaatctgtacacagaatagcggatgatgtaaatgaaaatgatagaattgaatttggagcagacttcgatttcaagccacttgcccgtttcattgttgatgtttctcttgacgcacccttagaaagtgctgaattgggcagtggtccatttgaaaaatggcagtatgatgcttggagcacatccacaactagtcattcaactgctgttaggggttctgtgagtttgaggtggctgaaagatcagtgtgctttgataactaaaagtggtggctcaatgctctcaggagatgaacttgcaatgaccttgtgcagagtgctcctatcaaataaagcaggcgatcagatagctggtgaacttttggacctggttggcgacaccgcttttgaaatagttcaagatcttcttttgcataggaaagagctagtggatgcaattcaacatggattgtcgatactgaaatctgagaaaatgacctcaggtaatcaaccaaagatgccaacttatggtacacaggtaactgtacaaacagagtctgaacgccagcttgataagattaggaggaaagaggaaagacgtagcaagcgcagtgcagacagtggcaataatgatattggtgttgatgatttttcatcccttcttttggcaagtgaacggaaggaggcatttgatgacgtgattggtagtggagaagggtcagacagttttacagtaacttcccttcctcaaggaaccacaaggaaacacatgaagggttatgaagaagtgaagattccaccaactccaacagcatcactgaaacccaatgagaagctgattgaaataaaagaattagatgagtttgcccaagctgccttccagggatacaagtcactcaatcgtgtgcagagtcgtattttccaagctacatactacaccaatgagaatattttagtttgtgccccaacaggtgctgggaaaacaaatattgcaatgattgcagttcttcatgaggttaaacagcacttcagggatggtattttacataaaaacgagtttaagatagtctatgttgctccaatgaaggccttggccgcagaggtaacagcaacattcagtcgccgattatctccattgaacctggttgttagagaacttacaggagatatgcagttgaccaaaaatgagattgaagaaactcagatgatagtgactactcctgagaagtgggatgttattacacgcaaaagcagtgacatgtcactttcaatgctggttaagctgatcatcattgatgaagtacaccttttaaatgacgatagaggttcagtaattgaggcgctagtagctcggactctccgccaggttgagtctatgcaatcaatgattcgcattgttggcctatctgctaccctgcctacctacttagaggtcgcacattttttgcgggttaatccagacactggacttttcttttttgactcaagctatcgtccagttcctcttgctcagcagtacattgggatcagtgaaagggattacacaaagagaagtgaattattcaatactttgtgttatgagaaggttgttgagtccattaagcaaggtcaccaagcattggtttttgtccatacccgtaaggatactgggaaaaccgctagaaccctgattgacctagcagcaaaagcaggggaattggaattattttcaagtgcagatcatcctcaatttccattaatcaagaaagatgttagtaaagcaaaaagtcgtgaagttgttgaattttttgaatctggatttggtatacacaatgctggaatgatgcgatctgacagaagtttgatggagcgcttgtttggtgacgggcttttgaaagtccttgtttgtacagcaactttggcttggggagtaaacttaccagctcatacagttgttataaagggcacacagctatatgatcctaaagctggtgggtggcgagacttggggatgcttgatgtgatgcagatctttggacgtgctggaaggccacagtttgataaaagtggcgaaggaattattatcacaacacatgacaaattggcttattacttgaggttattgacaagtcagcttccaatagagagccagttccttggatctctgaaagataatttaaatgctgaagttgctttgggcactgtaacaaatgtcagggaggcttgtacctggcttggctatacatacttatttataaggatgaagactaatcctctggtgtatgggataacttgggaagaggttatgggagatccttctatgggtgcaaagcaaagaacatttattattgatgctgcacgagcactggacaaagctaagatgatgcgctttgatgaaaagagtggtaacttctactgcaccgaacttggtcgaattgcaagtcatttttaccttcagtactccagtgtcgagacttacaatgagatgcttcgacgtcacatgagtgaaagtgagttgattactatggtggcccattcctctgaatttgagaatatcgtagtaagagaagaagaacaggatgaattagaagcccttgcaaggaaagcatgccctttagaaattaagggtgggccgactgacaaacatgggaaaatttcaattctcatacaggtttatatttcccgtgctccaatcgatagctcctctttacattctgatgctcaatacattagtcaaagtttggcacgcataatgagggcactatttgagatttgtctgcgtcggggatggtctgagatgtcatccttattgttgcaatattgcaaggccgtggaccgcaagatatggccccatcttcatccacttaggcagtttgataaggatctttctcctcaggtattgtggaaactcgaggaaagaaatgttgatctggatcatctttatgagatggaggaaaatgaaattggagctctgatccggttttctcatcagggaaagttggtcaagcaatacgttggatacttcccgtatgtcaacctatctgcaaccgtgagcccaatcactaggacagttcttaaagtggacctgcatataactcctgaatttgtgtggaaagatcgttatcatggcatgtcagaacgatggtggatcattgttgaggattctgaaaatgataccatttatcattcagagctattcacattaacgaagaagatggcaagaggaacacctacaaagatatcttttaatgtaccaatatttgaacctcatccgccacagtactatatacatgccatctcagactcatggctacatgctgaaacactcttcactgtttcttttcataatttgacattgccacagacacaaataacacacacagaactcttggacttgaagcctcttccactgagtgctcttggcaacaaaacgtatgaggatctgtacagattttcccatttcaacccgatacaaactcaggcttttcatgttctttatcacactgataacaatgtactcttgggagctccaactgggagtggcaaaacaatttcggcagaacttgcaatgctccatcttttcagtacacaaccagacatgaaggtagtttacattgctcctctaaaggcaatagtacgagaaagaatgaatgattggagaaaacgtcttgtaattcagcttgggaagaagatggttgagatgactggtgacttcactccagatttgatggccctattgtcagctgacatcatcatttctacccctgaaaaatgggatgggattagtcgaaattggcatagcagaagtcgggctcatgatattggatgagatacatcttctgggagctgaccgtggacccatccttgaggtcattgtatcaagaatgcgatacatatcatcacaaacagaacgttcaattcggtttgttggtttatcaacggcattagcaaatgctcgtgatttagctgattggttgggcgttacagatgacggtctattcaatttcaagcctagtgtgagacctgtacctcttgaagtgcatatccagggatatcctgggaaattctattgtccaagaatgaatagcatgaacaaaccagcttatgcagccatatgcactcattcacccaataaaccagttctcatttttgtgtcatcacgtcgacagacaagacttacagctcttgatatcattcagcttgcagcatcagatgaaaaaccaaggcagttcctgagcattgaagacaactccctagacatggttctttcacaggtttctgacagtaatttgaggcatactctgcaatttggcataggtctgcatcatgctggtttaaatgacagagacagatccttggttgaggagcttttttcaaacaataagattcaggtgctggtatgtaccagcacattggcgtggggtgtcaatcttccagctcacctggtcataatcaagggcactgaatactatgatgggaaaacaaaaagatacatagattatgatatcacagatattctgcagatgatgggtcgtgcaggtcggccgcaatacgaccaacatggcaaagctgttattcttgtccatgaaccaaaaaagagcttttacaagaagttcctctacgaaccgtttcctgtggaaagtaatctgagggagcacttgcatgaccacataaatgcagaaattgtttctggcaccatcagcaacaaggaggaggcgattatttatctcacctggacttacctatatcgcagattggttgttaatccggcctattatggattggaggatactgaaacaaacacattgaattcttatctatcaaggttagtcgaaactacatttgaagatcttgaggacagtggatgcataaaagtggatgaccactctgtaaagtacttgattttggggaaaatagcttcacagtattacctgagctacctcactgtttcaatgtttgggtcaaatattggccccaacacaacgttggaagtctttctacacatactgtcagctgcatcagaatttgatgagcttcctgtacggcacaatgaggacaatttgaatcgaatactcagcggaaatgtcccgtatccagttgatcaacaccaccttgatgatccacatgttaaagccaacttactctttcaggcacatttctccagagcagaattgccaataagcgactatgtcactgacttgaaatcagttcttgatcagagcatacgcatcatacaggcaatgattgatgtatgcgcgaatagtggatggcttacgagtgcattgacttgcatgcatctcttgcagatgatcatacagggtctctggtttgagagagattatgaatccctctggatgttgccatccatgaatgatgatatattagaccatctcaagagtagaggagtctcaacagtcccctccttactagatctttcccgtgaagaattgcgtagggtacttcaaccattttctgcgtcagagttgtatcaggatctgcaacatttccctcatgttgatgtgaaagttaagcttcataatgaacaggagcgatccaaacctccaactttaaacatcaggttgcaattgaaaaattcgcgacggtcagcatcaagagcatttgcccctagatttcccaaggcaaaacaagaagcttggtggcttgtcctggggaatgctacaagttcagagctgtatggtctgaaaagaattagttttgcagatcgggtgattaatactcgcatggaattgccacagacgttcaatgtgcaggagacgaagctgatcttggtgtcggattgctacctaggttttgacttggagtattctcttgagcatctcaccaagggttgagtgctttattcagagctgtttgggctgtttcattttgtatgggttcagcaaccagctcatcctagattgatcctgtaatcacgagacatgagttcattccatgaatttttgtttgtatgactacatccctcgtgttcatggttatattatatttaatagctatatatacgagtggataggtttataactttcatgaaatatcttttccgtaagcatagtagatgtttgagctctaaggttatgaccaacaaattgtgtatatggtcgtgcaaaatactattttataatataaactatattatttacatggtgaagtttgaaatagaagatcgagatgagtaagttgctggaattagcctaagg

SEQ ID NO: 215066 - DNA, 7025 bp, Zea Mays
ttgacttattcaattttgactctcgtcggctccggtatttcgacttccaaaatagccctaacatttaccgaagctcctcccgccggcgcgctgcgatccaactccgagatgctcgcaccgcttccgcgcctgacgagcgcgctccgcggccactacgacgctgatcaggcctacctcctccgcaagagcgccctccaggctctcaccctccccaggccgcatgacgagtggaagttcgctcggaaaatcgtgcctggctgggacgatgcttccagcgaagtgcgtcaggcgtataaacaatttatcggggccgttgtggagttgttgagcggagaggcagtgtctgaagaactctaccaagttgcgcagactgtatatactctatttggtggcgatgacacggagtatgttggtgctaaaaaagtcctttccaaaaggaatgagttggagagccttgtgggctacactgtacaagactcagttttgaaaaagctagctcagttagctcagaagctcgattcccttcaacgagcaagtgcctatgaatctgtacacagaatagcggatgatgtaaatgaaaatgatagaattgaatttggagcagacttcgatttcaagccacttgcccgtttcattgttgatgtttctcttgacgcacccttagaaagtgctgaattgggcagtggtccatttgaaaaatggcagtatgatgcttggagcacatccacaactagtcattcaactgctgttaggggttctgtgagtttgaggtggctgaaagatcagtgtgctttgataactaaaagtggtggctcaatgctctcaggagatgaacttgcaatgaccttgtgcagagtgctcctatcaaataaagcaggcgatcagatagctggtgaacttttggacctggttggcgacaccgcttttgaaatagttcaagatcttcttttgcataggaaagagctagtggatgcaattcaacatggattgtcgatactgaaatctgagaaaatgacctcaggtaatcaaccaaagatgccaacttatggtacacaggtaactgtacaaacagagtctgaacgccagcttgataagattaggaggaaagaggaaagacgtagcaagcgcagtgcagacagtggcaataatgatattggtgttgatgatttttcatcccttcttttggcaagtgaacggaaggaggcatttgatgacgtgattggtagtggagaagggtcagacagttttacagtaacttcccttcctcaaggaaccacaaggaaacacatgaagggttatgaagaagtgaagattccaccaactccaacagcatcactgaaacccaatgagaagctgattgaaataaaagaattagatgagtttgcccaagctgccttccagggatacaagtcactcaatcgtgtgcagagtcgtattttccaagctacatactacaccaatgagaatattttagtttgtgccccaacaggtgctgggaaaacaaatattgcaatgattgcagttcttcatgaggttaaacagcacttcagggatggtattttacataaaaacgagtttaagatagtctatgttgctccaatgaaggccttggccgcagaggtaacagcaacattcagtcgccgattatctccattgaacctggttgttagagaacttacaggagatatgcagttgaccaaaaatgagattgaagaaactcagatgatagtgactactcctgagaagtgggatgttattacacgcaaaagcagtgacatgtcactttcaatgctggttaagctgatcatcattgatgaagtacaccttttaaatgacgatagaggttcagtaattgaggcgctagtagctcggactctccgccaggtaagttcttacacaaaaaaggaacaacttctctctgccttggtgttggcagaattcacagtttaatgattcgtaaagatgagatgaaatataggtgggtatacttcaaattatgcctgtagacattgatgacactatttatccttgttttacatcttatacatgtaatttcttgtgcattaacgatctcaagaatcatggcacaataattaaaaaaacggagacgtaaagacattgtctacctttacatgttttgttgcctgtggttcatatttatgaatcgatcgaatgcaacaggttgagtctatgcaatcaatgattcgcattgttggcctatctgctaccctgcctacctacttagaggtcgcacattttttgcgggttaatccagacactggacttttcttttttgactcaagctatcgtccagttcctcttgctcagcagtacattgggatcagtgaaagggattacacaaagagaagtgaattattcaatactttgtgttatgagaaggttgttgagtccattaagcaaggtcaccaagcattggtttttgtccatacccgtaaggatactgggaaaaccgctagaaccctgattgacctagcagcaaaagcaggggaattggaattattttcaagtgcagatcatcctcaatttccattaatcaagaaagatgttagtaaagcaaaaagtcgtgaagttgttgaattttttgaatctggatttggtatacacaatgctggaatgatgcgatctgacagaagtttgatggagcgcttgtttggtgacgggcttttgaaagtccttgtttgtacagcaactttggcttggggagtaaacttaccagctcatacagttgttataaagagggcacacagctatatgatcctaaagctggtgggtggcgagacttggggatgcttgatgtgatgcagatctttggacgtgctggaaggccacagtttgataaaagtggcgaaggaattattatcacaacacatgacaaattggcttattacttgaggttattgacaagtcagcttccaatagagagccagttccttggatctctgaaagataatttaaatgctgaagttgctttgggcactgtaacaaatgtcagggaggcttgtacctggcttggctatacatacttatttataaggatgaagactaatcctctggtgtatgggataacttgggaagaggttatgggagatccttctatgggtgcaaagcaaagaacatttattattgatgctgcacgagcactggacaaagctaagatgatgcgctttgatgaaaagagtggtaacttctactgcaccgaacttggtcgaattgcaagtcatttttaccttcagtactccagtgtcgagacttacaatgagatgcttcgacgtcacatgagtgaaagtgagttgattactatggtggcccattcctctgaatttgagaatatcgtagtaagagaagaagaacaggatgaattagaagcccttgcaaggaaagcatgccctttagaaattaagggtgggccgactgacaaacatgggaaaatttcaattctcatacaggtttatatttcccgtgctccaatcgatagctcctctttacattctgatgctcaatacattagtcaaagtttggcacgcataatgagggcactatttgagatttgtctgcgtcggggatggtctgagatgtcatccttattgttgcaatattgcaaggccgtggaccgcaagatatggccccatcttcatccacttaggcagtttgataaggatctttctcctcaggtattgtggaaactcgaggaaagaaatgttgatctggatcatctttatgagatggaggaaaatgaaattggagctctgatccggttttctcatcagggaaagttggtcaagcaatacgttggatacttcccgtatgtcaacctatctgcaaccgtgagcccaatcactaggacagttcttaaagtggacctgcatataactcctgaatttgtgtggaaagatcgttatcatggcatgtcagaacgatggtggatcattgttgaggattctgaaaatgataccatttatcattcagagctattcacattaacgaagaagatggcaagaggaacacctacaaagatatcttttaatgtaccaatatttgaacctcatccgccacagtactatatacatgccatctcagactcatggctacatgctgaaacactcttcactgtttcttttcataatttgacattgccacagacacaaataacacacacagaactcttggacttgaagcctcttccactgagtgctcttggcaacaaaacgtatgaggatctgtacagattttcccatttcaacccgatacaaactcaggcttttcatgttctttatcacactgataacaatgtactcttgggagctccaactgggagtggcaaaacaatttcggcagaacttgcaatgctccatcttttcagtacacaaccagacatgaaggtagtttacattgctcctctaaaggcaatagtacgagaaagaatgaatgattggagaaaacgtcttgtaattcagcttgggaagaagatggttgagatgactggtgacttcactccagatttgatggccctattgtcagctgacatcatcatttctacccctgaaaaatgggatgggattagtcgaaattggcatagcagaagttacgttatgaaggtcgggctcatgatattggatgagatacatcttctgggagctgaccgtggacccatccttgaggtcattgtatcaagaatgcgatacatatcatcacaaacagaacgttcaattcggtttgttggtttatcaacggcattagcaaatgctcgtgatttagctgattggttgggcgttacagatgacggtctattcaatttcaagcctagtgtgagacctgtacctcttgaagtgcatatccagggatatcctgggaaattctattgtccaagaatgaatagcatgaacaaaccagcttatgcagccatatgcactcattcacccaataaaccagttctcatttttgtgtcatcacgtcgacagacaagacttacagctcttgatatcattcagcttgcagcatcagatgaaaaaccaaggcagttcctgagcattgaagacaactccctagacatggttctttcacaggtttctgacagtaatttgaggcatactctgcaatttggcataggtctgcatcatgctggtttaaatgacagagacagatccttggttgaggagcttttttcaaacaataagattcaggtgctggtatgtaccagcacattggcgtggggtgtcaatcttccagctcacctggtcataatcaagggcactgaatactatgatgggaaaacaaaaagatacatagattatgatatcacagatattctgcagatgatgggtcgtgcaggtcggccgcaatacgaccaacatggcaaagctgttattcttgtccatgaaccaaaaaagagcttttacaagaagttcctctacgaaccgtttcctgtggaaagtaatctgagggagcacttgcatgaccacataaatgcagaaattgtttctggcaccatcagcaacaaggaggaggcgattatttatctcacctggacttacctatatcgcagattggttgttaatccggcctattatggattggaggatactgaaacaaacacattgaattcttatctatcaaggttagtcgaaactacatttgaagatcttgaggacagtggatgcataaaagtggatgaccactctgtaaagtacttgattttggggaaaatagcttcacagtattacctgagctacctcactgtttcaatgtttgggtcaaatattggccccaacacaacgttggaagtctttctacacatactgtcagctgcatcagaatttgatgagcttcctgtacggcacaatgaggacaatttgaatcgaatactcagcggaaatgtcccgtatccagttgatcaacaccaccttgatgatccacatgttaaagccaacttactctttcaggcacatttctccagagcagaattgccaataagcgactatgtcactgacttgaaatcagttcttgatcagagcatacgcatcatacaggcaatgattgatgtatgcgcgaatagtggatggcttacgagtgcattgacttgcatgcatctcttgcagatgatcatacagggtctctggtttgagagagattatgaatccctctggatgttgccatccatgaatgatgatatattagaccatctcaagagtagaggagtctcaacagtcccctccttactagatctttcccgtgaagaattgcgtagggtacttcaaccattttctgcgtcagagttgtatcaggatctgcaacatttccctcatgttgatgtgaaagttaagcttcataatgaacaggagcgatccaaacctccaactttaaacatcaggttgcaattgaaaaattcgcgacggtcagcatcaagagcatttgcccctagatttcccaaggcaaaacaagaagcttggtggcttgtcctggggaatgctacaagttcagagctgtatggtctgaaaagaattagttttgcagatcgggtgattaatactcgcatggaattgccacagacgttcaatgtgcaggagacgaagctgatcttggtgtcggattgctacctaggttttgacttggagtattctcttgagcatctcaccaagggttgagtgctttattcagagctgtttgggctgtttcattttgtatgggttcagcaaccagctcatcctagattgatcctgtaatcacgagacatgagttcattccatgaatttttgtttgtatgactacatccctcgtgttcatggttatattatatttaatagctatatatacgagtggataggtttataactttcatgaaatatcttttccgtaagcatagtagatgtttgagctctaaggttatgaccaacaaattgtgtatatggtcgtgcaaaatactattttataatataaactatattatttacatggtgaagtttgaaatagaagatcgagatgagtaagttgctggaattagcctaagg

SEQ ID NO: 215067 - DNA, 923 bp, Zea Mays
ccaactaaatactctgcagctctggtatagggtcggactttttgacgatgtcttctggaaaacgcaagagggatgagtatcctggtcagctcccttctggttcttttgtaccacagcaagatggaagtgctgatcagatagtagaatttgttgtgtcaaaggaaaatgcaaaccaacattggagttccatcatcaacaagcttgaaacaccaaccaagacagtcactcctgttattccgcagtgtgatgggattcaagatgactacaatgatcaatttttctttccaggagttccaactgaagattataatacccctggagaatctgctgagtatcgagctcctacacctgctgttggaacaccaaaaccaagaaatgatgctggagatgataatgatgatgacgatgatgatgaagaacctcctcttaatgaagacgacgacgacgacgatgatttagatgaccttgaggaaggggaggatgaacctaacacacaacatcttgtacttgcacaatttgacaaagtgacgaggaccaagaatcgttggaagtgcactttgaaggatggaatcatgcatttgaatggtagggatgttctatttaacaaggcgacaggtgagtttgatttttgactttttggatgaagatgagctattttagaagcagctgtatggacatatcttgtcttagacataaggacggggaggtgacgaagtgttcttggtggggtgctggcagtatgactgcgtcgtgttttcctattgagactttgtttcaccctcttgtttgtcaccgcaattgttatcgctgtaaagaagttaccgcttgtgctgtggacattttctgagatgggtgtctcacatccgcagcgtaactaatgctagttatacatttttgtctctaaagtcagttttggtgctgta

SEQ ID NO: 215068 - DNA, 2151 bp, Zea Mays
cgcgagccactgcacccatccactcgtacgccgcggtgcgccgcagcccgcagcccgcagcccgcagcccgcagcccgcgactccaggcatccacaaaaaaccatctcccccgcggccccggcaccgcacgctcccgacccggcgagtcccactcccacctaagctgagcggccatggcgcggcacctcgcgccttcgtctggaagcctccaccgtctcctcgcgtcctgccactacccgcccacctcccaggcgccgcctccccgtccgctcctcctcccgaagacccgatcggcggctatgcagctcccgcgacgcgggcggcgcgacgtcgtcgccgctgcagctgcctccgcaccgtccccctcttctccgggtaccgaggtggcagtctggggtaaggtctccgccgtgctcttcgatatggatggcgttctctgcaacagcgaggagccctcgcgacaggccggcgtcgacgtcttcgctgagatgggagtcgaggtcgccgtggatgactttgtccccttcatgggcactggtgaggccaatttccttggaggtgtcgcaagagctaaaggagtgaaagatttcaatcctgaaagtgccaagaagagattttttgagatatatcttgacaagtacgcaaagccaaattctggcatcggattccctggggctctggagctcatcttggagtgcaaaaattctggtcttaaggttgccgttgcatccagtgccgacaggattaaggtggatgccaatctggctgctgctggtttgtccgtgtttctatttgatgctattgtttctgctgatgcgtttgaaaaattgaagcccgctccggatatattcctggcagcatcaaagagcttaggtgtcgacacaaatgagtgcattgtgatagaagacgcgcttgctggtgttcaagctgctaatgctgcagaaatgagatgtatcgctgtgacaactactctagaggaaatagcgttacgacaaggcagtccctcgttcatacgaaagaatattggagacatttcaattaacgacattttgtatggtggttctaatgctcgccacaatgaaggggcaggaagtactgagaatagtagttcggtagggaatgctttgtctgagagtctaaacggagcaactgctgctggacattctgacacaaaaggttttccaatctcaaaaaataaaggaaatcctgcaggctgttgggttctcgacgcgaaatattgagatatggaagtctgggaatagccttgtcctgcctttttgttgcagtcagaaattggaaggcaatgcagttcgcatctcccaaaggcctactgaattttctcatgggtggaaatagttcagtttttgccagaaatgaaggtacacagtgcacctaggcatcaccatcctgtcttgcacctcttgcaccaatggtacctggccacccacttcgggctgccactttttaaacacagcacaatgctgttgggtaattggaaattccatcaggcataatgcatgttgatggtgccattgttggctttaggctgggcctgcaaagtaaccgtagtgacaaattctttttagcatgcctagagagattgaaacctagctaggaaacatttggatctgaagctattttgaagattggtctccagttgttatgtgtgtcttgcaggagaatctctgtcatcaagagttcaacaaataaagaagtatctagctgagtttgaatctgggggttctgccacatatgttcctgagtttccaagaaagcttgactggttgaatacagccccacttcagtttggaagagtaatttagaactcatcttaggttattatcgtagctgcaactttgctacagtattaattgcatgccctttgttctggatttaaactagaagatcttgcatgcatctctatcaccctattctatggggcagccagattgtaattaacatgatccaaaagtttcagtcttctagcatctgcaaagaaatttcagttactgttggtgcttttgtggtccggaagctccattcttgatgttaaacttctgatgcatatacatttttcatgaatatatacatgtaaatctactgatgatcccttctaaaacatcatattccctactgttcctgcatgcaaa

SEQ ID NO: 215069 - DNA, 5051 bp, Zea Mays
atggtttctttctccgcttcctaagattcctctttcttccccaaccccaccctacgccttttgccacgccgcacggccgctccctcccttcatgcgccgccgtatctcaggtcagcatcgccaaccgcagctccacctcccgatcccagccccaatctaggaggaggaggaggaggagaaggccactttcaggattctgacgaagccctccctccctcggccgcatcgcatgctaccacgactgaccaccaccagcagcagcagcagcagcagcaggaggaggagggcaggatgttcaagcttcaccgccaccgctcctccgaccgcgtcggcgagcgcttcgacttcagattctccaacttccgcgccgtccaggtccctgcagtgtcagacaggctcttcctttccatagtttcagtcgacagcggaaggacaattgcaaagtccagcaaagtagcttctcggagtgggatatgccagtggcctgacacaatcttggaacccatatggttctccaaggacgaagtctccaaagaattcgaagattgccagtacaagattattgtttccttgggatcgacaaaatctggcattcttggggagatttttctaaatctgtctaattttctgaatatagtcgatccaaccgcaatctctttgccactgaagagatgcaacgccggaacagttttacagcttaaggtccaatgtcttggcacaaagtctaagctgagtggtgtcagatcactgagggacatggctccccgtctcgatgaccgtagtccaacgccaaccaatgatgagatggacaataagtcagattgctctgatggtatgttcaacaggagtgttcgttcttcatccgaaaatcatctggttggaacttatcaagatgaatctggaaacagggaaacaagtttctctgcaccagggtcccatcggagttctaattctggagatagtactgcggatagaacaaacttctctcctagagacaactctagtggaggactttatgtgggaaggcaggattctgctagttcctatgctagttatgttagtgctggtcgtggcgatgatgggcttagatccaataattcatcttttagttctcgggcttcaggcccaaatttgctgcaagggaatactccaaaaatattttcaaatggcctttctcaattatctatgggggcatctgactcatctaaagatcttcttgaagctgctgaagaaacaattgaggagctccgtgatgaggcaaaaatgtgggaacgccactctcgtaagttgaaggctgatctagagatgctaaaaaaggagtgttctgaaaaatcaaagcaacatgctgagctagcaggcgagctatctgctgcacaagctgaacgggattcctataggcatgaaatagaagaattgaagtcatccttacaagatgtaaacacacggcaaacaattacaggaacacctaaacgttcagactggatagacctgcagaaggaacttgaaggtgaggtgaagtttcttagagaatcgaatgcggacttaaccatacaactaaacaggactcaagagtcaaatatagagcttctttctattcttcaggaactggaggaaaccattgaagaacagagagttgaaatatctaagatttcgaaggtcaagcagactgctgatcctgagaatgggcttttagtaaaagaagacaaagaatgggctaagaaactgtcaatgaaagacgatgaaatcacagttctgagggagaaattggatcgggctctcaacattggaaatgcaggtggtgctggttccaatgccatttatcttgaattggagaaagaaaatgaaattttaagggctaaaatacaagagcttgagaaggactgctctgaactaacagatgaaaatttggagcttatatataagctgaaagaaaatgggctcacaaaaggtcaggttccacgtatttcaaacaacaatgagctgcaatttgaaaagcttacatcccggattcgtcaactggaggaggaacttaggaataaggaaatgttaagagacgacagtttttctgagtcatcaacgtctaatgcagatgagttacagagaaaatgtgctgaccttgagctgaagctgctaaattttaggtctcaaacctgtgagctggaagaaaagttccaaaaaagccaagaggaactggaacaaagaaatctcgagttatccgaactgagaagaaagctaaacggtttacattctactgaactggaagtttttgaatctggtgcgacatggaagtaccaatctagaacagcagatctagaggatactgaacctgagacagatacgctaaaggctagatttgaactgcaactacaggaaaatgatgaccttcgaagttccaaggttgagatggaaaattttatttctgagattcaggcagagaagagtcagcttgaggaacgcctgtccgtgtcgcttaaagaaagcagcatcacatctaaatgcttggatgaagtgcggaaagatatccttgtgctttccagcagtatagattcccatgtttcagctaataaggttcttgagaggaacataattgagctagagagctgcaaagctgaactagagttgcatgtatcagagctggaacaggaaaacatagagttgtcagaacggatatctggactggaagcacaattgacttatctgacaaatgaaaaggagtcaagcgagctacagattcatgactccagatcgctcatcattaatctcaaagataaagtagagcggcagcaatccgagatggaaactcaaaggctcgagtttaagcagaaacaacaagaatctcaaagaagattgtcagaaacacaggatgattctgaagttctgagaagatctaattctaaactacaatctactgttgagagccttattgaagagtgcagttctcttcagaatctaactgctgatctgaaaaggcagaagttggaaatgcatggtcatcttacgcaaaaagagcaggaactggatgagtcgaaaaaaaggaactttgagtttagcaaaacagtggaattccttgaggcaaagctttcgtcactacataaggacgtttcttctaaagagcaatctttattgtcagaattggagagtatattccaggagcacatggaacaagaagaaagaattaatcgcgcgcatttcatgctcaataagatcgagaaggaaaagactcttgaagtagagaacctcaagagggaggtcgtcagcctcactgcacaggtctcctccacacatgaggagcgagaaagtgccactctggatgctattagagaggtatctgtcctacgagcagacaaggctaaacttgaggctaatcttcaagatgtcagtacacaattgagacattacgagtctcaattggaagacctccgaaaggagtctaaaaataagattaaagggttggttgattcccttaatgcctccaaacaaagcgaggaaatgttgacatcagatgctgaacatatgaaaaagttgatggaagctgctagatccaatgaagacacgttaaggaagacttctaatgaactagaattgaagcttaaatccagtgattatgagaaacaacaaatgctggaagaaatatctggcctgaaactgcaggtccagaaaataatgaatcttcaagatgaggttttcaaacttcagagttctcttgatgaggccaagttcggaaaagggaaactggaggagattctacgctcggtgaccgaggaatgtgaagaactaaaagcacagaaggctatgctaacagataaagtttctgatatgcaggagactttgagaaatggtgaagaagaaaaacgaaacagaatagctatgcaggcaaagctcgtgaggctggagagtgatctgtcagcatcagaagcatcacatgtacatgaagcagaattaaagaacgaactcagcaggatcaagagatcaaacagtgagtaccagaggaagatacaatctcttgagcaggaaaatgaggatctcactagaagagttcaaactatggaaaagggatttgagcaaatgtcccacgttaaagagaaccttggaaagcaggagcttggaggagataaccaggcagccattcagtcaaaaattgagttattggaaacgaagctcgcagaggcattggaggaaaacaagatgtacagagctcaacagaagagtccgatgcctgaggggcaaccttctgcgggagcgggagacggcaaggagggcaataccgataggattttgcaattggaaggagagctaagagatatgaaggaacggttactgaacatgagcttgcagtatgcagaggtggaggctcagagggagcggttagtgatggagctcaaagccatgaagaaaggcaggtggttttagcaatgatggagaactgttgcctgacataaaacagacacaggctgactgacagcacagatgggcatgtcatgtgagagcaagcaaagcaaatgcaagtgatgcagagcctggacctgctaactggtgctggaagatgtgtatcccaagacgacactgaaggtccctgtgaccacccagcgcccctacatgacatgatgatccaattgttattggtatttatttttaatggcgtgccttttcatcttgtatataatatacgccggtttgtgaggagcttgactggtcagttgttgatatgattactgagatcgatgactccgatctctctattttacacccttaattgtcgataaatgtagttactctattctttctttctttcttttttgagacagcagtggagtggctgggttagtgggtagcagtcattatgttgcactcatacaatattgttttagtttgggtgtagaataatgtgacgaagggagacccatttgttcatgtaagtttgtttgtttgtttgtttgtttgtttttacagcgtagatcacggataataatgaagtttccgttgtgcggttgtggtacgtgcatcgcattattgatgaaacttttaacctcaggagggcaaagtgttgccag

SEQ ID NO: 215070 - DNA, 4335 bp, Zea Mays
caacgcgcgaaatggcgaaacgattgcagtgggagggagggagaccctgattggcacggacggccaccgccgtaaccaatcattcctcggcctcccaaaccttcatcctttttatgccaaccaaaactccaccctcctctcgagcccgagcccatctgatcctccgattcagttcttctccccctaccaaaaggccgagcccccctcaggcctcagctccgcctccgcgctgccaaccatactcgtcaagccgtcacactttgtctctctcgtgccccgatactctttttctttttttttcttttcttttttttttttttttgcttccgggagcagcaaccgtcgccgtggccccgccttggatattccatcagttttcgggttcttggataggagaaagcggggcgctcaattccccccctcctgatccttgttccttgatcgccgccatgagcaacacgctgcttcgagtctacccttccgacctgaagatgccattcgagctcaggaagcagaactcagcgtgtcttgagctcgtcaacaagaccgaccggtgggtggctttcaaggtcaagacgacgaaccctaggaagtactcggtgcgctctgcctccggtgtcgtgccgcccaggggatcctgtggcatcacaataacgatgcaagcgcccaaggagatgcccccggactaccactgcaaggacaagtttcttgttcagagcattgctgtggaggaggggacgacgcagaaggacattgtccctgacatgttcagtaaagcaccaggtaagttagttgaggagttcaagctgagggtggtctatgtccctgccaatcctccctcaccagtgcctgaggaaacagaggaagaggatggatctcttgattcagatgtggaccatgaagtatccacgtccaactctgcaacaggacaagggaatacatgtagatcacaaacatcagatgatgaggatgattctacatccaagttggaactggaaagaagatatgcagaggaaaacaagaagattcagaaagagctggatctcctccggaaaacaaaggcgtctcctcggggcttctctgcgtttgtgctgcttgtcttcttgttatcctcacttcttggatacctgatgttcggaagcagagcttagcaagttagcagctaatggctgcacatcatttgcggcaccggcagcggcacggctcttttagtacagtcctttaattggcactcaaagttcaagatagcttgctgtagaccatcggctgcacagatgattgatgatgaggtcaactttggtaatatctttgatgcctcagaagaagttcaggttactgcaaagtttggtcccaagcaacggcccaaaacccgaaaaacagctctatcatccagatctgcagcgcctaatcctactgaagaaaccggagataggaaagtaggaaccttcagtcaagtcaattcttctaaagagcttaccagccaagaaaggacatccttgatgtgccctagtactgagtcagttgatattatcgctggttctcatagtattctcgatacaccattggaagatgcattgacagttccccagggttctctgtctggtgcttctgctgcagataggacttctcaatatggtgagcacaatgatgatccttctaagttagctacacaccaagaaaacttggtggtttcagatatcaacgtcccacctaacagttcatgtagcaaggctattgatgatatagttgaatttggggacatgtgtgatgtgcaaattgaagaggaaagagttacaaagttccaaccaaaggtgcaaacgaagctccttaaggaaatagccaaatctcggaagactaaccaaaaggtggaaacttccactgtagatgtggttacacaaaatggaaagggcaataatattcagacaaggctccatggcgatccggtacaggatcctaaaagtcatgaaagtgtgcagatcccagattctgaaggattattagcaactgataatagtaaaggttgcaatttagctaacctcaacaatctccttgaggagtcagtccaagaggaaacaatagctaagtttcgttctgatttgcaaccaaatctcgggaaggcttcatcccaggttgctgcgattaaaattaatgttgttgctgttgctccaatagttggagtttgtgacagcaacaatgacatgtacaaagaacctaaagatcaagaaaccatcactggtccagtggcttggtcaccacaggctgtgcatgctgatgttgatttagacaatcacaatgaaccaattaatcctcctattgatggtactcaatcaatgtttggcgaagtcccaggaagagaaaagggaaaatcaaaatctgtatcttttgctctatcggatgtttctgggatagctagccctatagataccaattctgagatgggtaacatcggcgattcctgtagtgacaaattgactgatgaaaatttaagtaactcatctcgtcatatcgctgaaaagcattctattaccaaggaccaatattcaaatgagcaggaccatgagcgggagccactagatcatgctgttcaacagcaaccaaaatcggatgttggagaaagagcatcatctatgaaacgacgttgcaggaaaaaggtgcaaaaagttgggacacctaatcacactgttgatgattattttggtgaagactgtgtcgaaccttcattagctgaagaagataacgatactggtgatcattacactactggtaataagcataaggctaggaaaaagtcaaggggtggtgtagaagagtcacagcagcagaaagctcaaaaaaataaaagcaaggtgtcttcacggggccgcaaacggaccttgaaggatgaatcgacagagaagcctgagaagaagctaacccacagaatacgtcagaggataccaaaagaggttaaggctttactggaaacacctcgtgagcagataaaacccatgaagctttgtgcatcacatctcaggttgttacaagaagctagagagcgtgttgatccaaaagggattccatccgggccatcctctaatacaagaaactttcaactagatgatatggatgatttgggctacagagatgaggaagctaggttctttgacaacgatataacagaggagcatgtacaaaatgcaacaaaattgaactaccattcctacatgaacaaaccagcccggggaaaatggtcaaaatcagataccgacttgttttatgagggtcttcgacaatttggtagcgattttgcaatgatacaacaattattccctgataagactcgccatcaggtgcggcagaaatttaaatctgaggagagaaaaaatccattgctagtccatgatgctatagttcatcgctcaggagatagtttgtatttcaaaaaggtaattaagcagctgaacattgaagatgttgtgctgccagatattaaaagtacacaaaacaagatggtgcatcaagtgaaagaggccctggaaatgagaatgtactggatgatttaaacgaggaggaaaatagttcaaattggttgaacgaagagcatgacgtacagatggccgatgtggaagaagagcatggcgaacagatggatgatgtggaagaagagcgtgatcttggaaatgatggtggtgatgatgatcttggggatgtttttgattggtactagtttatgttaaacacggatgcgagcgtgaatatgagttggtctagctctgcataacaggggtagtttttaggaaaaaaattctttgcatccggaatgcaaagaatcccttttatgactgatttggtgactaggtatcacagagagattggagtggattgagagcctctaatctctccgtgatcctcttacagcctctaacatccaccacctcgtggtccatataagggcttattcggttattcttgtcccatgtggatttgatgagattggaaaaaatatgaaggattttaacttgttcgagatttaaatctatcaaatctcatcaaatccatatggattgagaggaaagcaaacaagccctaaatagaagaaaaacaaattactattggattaagttataaattttgatctgtttttgtggaccttcaagtggtgtatgtgagtggctgtaaaagagtgtgtttgcatctgggatatacagattttttaccctagtttttagatgttgccacagttgtacggttagaattgttcggctggactatcgcttggacgatcaagatactaggtttcctccaaaaacactgcaatactcgaagagcgatgagtcactagacaacatatccaat

SEQ ID NO: 215071 - DNA, 3946 bp, Zea Mays
catctgatcctccgattcagttcttctccccctaccaaaaggccgagcccccctcaggcctcagctccgcctccgcgctgccaaccatactcgtcaagccgtcacactttgtctctctcgtgccccgatactctttttctttttttttcttttcttttttttttttttttgcttccgggagcagcaaccgtcgccgtggccccgccttggatattccatcagttttcgggttcttggataggagaaagcggggcgctcaattccccccctcctgatccttgttccttgatcgccgccatgagcaacacgctgcttcgagtctacccttccgacctgaagatgccattcgagctcaggaagcagaactcagcgtgtcttgagctcgtcaacaagaccgaccggtgggtggctttcaaggtcaagacgacgaaccctaggaagtactcggtgcgctctgcctccggtgtcgtgccgcccaggggatcctgtggcatcacaataacgatgcaagcgcccaaggagatgcccccggactaccactgcaaggacaagtttcttgttcagagcattgctgtggaggaggggacgacgcagaaggacattgtccctgacatgtaaagcaccaggtaagttagttgaggagttcaagctgagggtggtctatgtccctgccaatcctccctcaccagtgcctgaggaaacagaggaagaggatggatctcttgattcagatgtggaccatgaagtatccacgtccaactctgcaacaggacaagggaatacatgtagatcacaaacatcagatgatgaggatgattctacatccaagttggaactggaaagaagatatgcagaggaaaacaagaagattcagaaagagctggatctcctccggaaaacaaaggcgtctcctcggggcttctctgcgtttgtgctgcttgtcttcttgttatcctcacttcttggatacctgatgttcggaagcagagcttagcaagttagcagctaatggctgcacatcatttgcggcaccggcagcggcacggctcttttagtacagtgtacagatatatacattaatagcgaagtagtcagtacataacagatatatagggctttcttgggtttcaagtgtccataggaatatatcttcagttttgaaatatgtgtgagtaaccgttcatgtttatactctatcatccaaatatatgatgtttactatataataaagctataaaagtgagacaaatcagtgttggagaaagacaaattatggccttgaaactcatggagaaagacaaattatcacgttatttaagttaacacgccaaatttcctctacctaataacattgctattactgtagctgtatgcagaaagtataaacacctaggtgctaggctgagcctcatcgcctagcatttaaaaaaacattgagtatttgctgactgaggtatactttgagagttgggcttagatatgttacagatgatgctaatatatgactttctttgaggggtcctcgtaaaccaatcgggcattgccccaactatccttgattttatttgtctgttctgctgtagccatgtatccattgttgtcgttgagtacctttgccacggtttagttagttatctcactgcgagttgtcctccatcttgaactgtcgttactcacatgtgatgttgtatcatatttttcttcatctatcgctttcgatccttgtaaattattggttccattaaaggctctttgcattggggcattcatttggtagtcatgtatttagttcaaatttatattaagttccagtacgttctggttgaataccccatcttaactctacatgtttaatgatttttatttccttttttgctggtctgattctatgtttgcccccattgctgcttcctaaacctgcaatattcatttcagcctttaattggcactcaaagttcaagatagcttgctgtagaccatcggctgcacagatgattgatgatgaggtcaactttggtaatatctttgatgcctcagaagaagttcaggttactgcaaagtttggtcccaagcaacggcccaaaacccgaaaaacagctctatcatccagatctgcagcgcctaatcctactgaagaaaccggagataggaaagtaggaaccttcagtcaagtcaattcttctaaagagcttaccagccaagaaaggacatccttgatgtgccctagtactgagtcagttgatattatcgctggttctcatagtattctcgatacaccattggaagatgcattgacagttccccagggttctctgtctggtgcttctgctgcagataggacttctcaatatggtgagcacaatgatgatccttctaagttagctacacaccaagaaaacttggtggtttcagatatcaacgtcccacctaacagttcatgtagcaaggctattgatgatatagttgaatttggggacatgtgtgatgtgcaaattgaagaggaaagagttacaaagttccaaccaaaggtgcaaacgaagctccttaaggaaatagccaaatctcggaagactaaccaaaaggtggaaacttccactgtagatgtggttacacaaaatggaaagggcaataatattcagacaaggctccatggcgatccggtacaggatcctaaaagtcatgaaagtgtgcagatcccagattctgaaggattattagcaactgataatagtaaaggttgcaatttagctaacctcaacaatctccttgaggagtcagtccaagaggaaacaatagctaagtttcgttctgatttgcaaccaaatctcgggaaggcttcatcccaggttgctgcgattaaaattaatgttgttgctgttgctccaatagttggagtttgtgacagcaacaatgacatgtacaaagaacctaaagatcaagaaaccatcactggtccagtggcttggtcaccacaggctgtgcatgctgatgttgatttagacaatcacaatgaaccaattaatcctcctattgatggtactcaatcaatgtttggcgaagtcccaggaagagaaaagggaaaatcaaaatctgtatcttttgctctatcggatgtttctgggatagctagccctatagataccaattctgagatgggtaacatcggcgattcctgtagtgacaaattgactgatgaaaatttaagtaactcatctcgtcatatcgctgaaaagcattctattaccaaggaccaatattcaaatgagcaggaccatgagcgggagccactagatcatgctgttcaacagcaaccaaaatcggatgttggagaaagagcatcatctatgaaacgacgttgcaggaaaaaggtgcaaaaagttgggacacctaatcacactgttgatgattattttggtgaagactgtgtcgaaccttcattagctgaagaagataacgatactggtgatcattacactactggtaataagcataaggctaggaaaaagtcaaggggtggtgtagaagagtcacagcagcagaaagctcaaaaaaataaaagcaaggtgtcttcacggggccgcaaacggaccttgaaggatgaatcgacagagaagcctgagaagaagctaacccacagaatacgtcagaggataccaaaagaggttaaggctttactggaaacacctcgtgagcagataaaacccatgaagctttgtgcatcacatctcagccaaaagggattccatccgggccatcctctaatacaagaaactttcaactagatgatatggatgatttgggctacagagatgaggaagctaggttctttgacaacgatataacagaggagcatgtacaaaatgcaacaaaattgaactaccattcctacatgaacaaaccagcccggggaaaatggtcaaaatcagataccgacttgttttatgag

SEQ ID NO: 215072 - DNA, 5548 bp, Zea Mays
atggatcttgtgctgatcacctgctgcatagcatattatcttaaaaggacggatttaacttcggtgttcatggaaatactgtgctctaaaaattcgcagtagtagcctaatttctttcctgctctgacgtcatcctcctctgggcgacacgggcggctccccatcgaccgcacccaccgccgccggtcttcacccccgccgtcgccggagcagctcgccggaagttcgacgagcagcgaggagggcggcggcgggactgctctctcactcatttccctcccttcttccacccactccactcctccctcttcctggaggtggccggcgacctgatccgccgctgggaaggccggatcggcgggctgactggccggatctaggggctggtcgccgtccgccgctcctccctgctggcatgggcaggtggccttgtggccgcaaccatggtggctcgtgcggctagcccgtggcggtagtgcccgcgctcgcgtggccatggccgtggctggccggcgacgttggcgcccacgcacgcggccggcccgctgcggcggcggcgtggctcgcttgtgcttgtagcgtggtgcttggatcgggggcgttggtggatctgcggctgccagcggtgccttctgcaggtggtgggtcatggtcgtggggctgggggccggatcttgagcctctccggctagatttatctctccgcctctcgtttcggcctgtggtgtgggcagggccggctggctccgtgcgttgcggcgtgtggtgggaggtcctgcgacgaaagccatgctcgcttgcaggcggacagcggtgacgcccgcgggcgccacccctaccctatcgagggtgccgtctttggacctctcgccccatgcgggaaccctcgccttggccttcttaggtctctcgctggtgctcgaccggcgttggggctctgagggttggggctggtgggttggtgcgtcggtggacggcagaaggtgacaacacgcgatggcttggcggggtgacatcggcgtggctgacctttcagctttcttcttggtgctggcgatctacactgctctgctaggtcttcagaggaaactttgcttggtttgtaccaggcgggcggcgacgacttttcgacgtcgtttctccttcttgaaggtgcggcccagaagacctgcagtttgtgtgttcgttcgtgttgtggaggctcttcgtcgctccgcttggctcaatggtgtccgtgttgtggaggctcttcgtcactccgcttggctcgatggtgtccgggcctttgtcgctttaggcgtctgctcgctcccggagttcgacgttgtggatctttgctcgtggtgaagaatcggagctgcctcgtgtgggtgtgttgaggcttggcaacgatggcgcgccgcggtcttattccttgcgtcggtgtctgaatgtaagcgtcgtcgagttgctttggcagtgtgcggctcgtcttgggaagtcggagctgctcgtctcttgtgtttgagtttggcaacgatgactctagatgtgtttgtgtgtggggactgtcattgtctaagttgtttgttaggtcgttcgccggtttttctactgtgcgttctgtgtaggttttaggcccgattttccaaaaaactgggtcaattccattcttcttaattgagaggcagagctcctaccatcacgttaaaaaaaatcgcggtagttctttcttcttttttgatgctattgattacactgaatagtttagttttcatgaaattttatcataatacctgcacccctcctcgctcaaccagaaaacacacacaaaaaagaggacagaaaaaacctatcattagaagaaacatgctcctggataactgtaatgtgaacacctttctctttacaagttattgtatcagaatgacatttgacaattgacagatttgattccttacattatttctaccatgattgtcggcaccattagcctaagacgttagaatttcaaatatttgtctatgtctgccctgaatgttatccttgacatgccactgattgttttgtgactcttcaggatgattctacatccaagttggaactggaaagaagatatgcagaggaaaacaagaagattcagaaagagctggatctcctccggaaaacaaaggcgtctcctcggggcttctctgcgtttgtgctgcttgtcttcttgttatcctcacttcttggatacctgatgttcggaagcagagcttagcaagttagcagctaatggctgcacatcatttgcggcaccggcagcggcacggctcttttagtacagtgtacagatatatacattaatagcgaagtagtcagtacataacagatatatagggctttcttgggtttcaagtgtccataggaatatatcttcagttttgaaatatgtcctttaattggcactcaaagttcaagatagcttgctgtagaccatcggctgcacagatgattgatgatgaggtcaactttggtaatatctttgatgcctcagaagaagttcaggttactgcaaagtttggtcccaagcaacggcccaaaacccgaaaaacagctctatcatccagatctgcagcgcctaatcctactgaagaaaccggagataggaaagtaggaaccttcagtcaagtcaattcttctaaagagcttaccagccaagaaaggacatccttgatgtgccctagtactgagtcagttgatattatcgctggttctcatagtattctcgatacaccattggaagatgcattgacagttccccagggttctctgtctggtgcttctgctgcagataggacttctcaatatggtgagcacaatgatgatccttctaagttagctacacaccaagaaaacttggtggtttcagatatcaacgtcccacctaacagttcatgtagcaaggctattgatgatatagttgaatttggggacatgtgtgatgtgcaaattgaagaggaaagagttacaaagttccaaccaaaggtgcaaacgaagctccttaaggaaatagccaaatctcggaagactaaccaaaaggtggaaacttccactgtagatgtggttacacaaaatggaaagggcaataatattcagacaaggctccatggcgatccggtacaggatcctaaaagtcatgaaagtgtgcagatcccagattctgaaggattattagcaactgataatagtaaaggttgcaatttagctaacctcaacaatctccttgaggagtcagtccaagaggaaacaatagctaagtttcgttctgatttgcaaccaaatctcgggaaggcttcatcccaggttgctgcgattaaaattaatgttgttgctgttgctccaatagttggagtttgtgacagcaacaatgacatgtacaaagaacctaaagatcaagaaaccatcactggtccagtggcttggtcaccacaggctgtgcatgctgatgttgatttagacaatcacaatgaaccaattaatcctcctattgatggtactcaatcaatgtttggcgaagtcccaggtacagcttttacaggaagagaaaagggaaaatcaaaatctgtatcttttgctctatcggatgtttctgggatagctagccctatagataccaattctgagatgggtaacatcggcgattcctgtagtgacaaattgactgatgaaaatttaagtaactcatctcgtcatatcgctgaaaagcattctattaccaaggaccaatattcaaatgagcaggaccatgagcgggagccactagatcatgctgttcaacagcaaccaaaatcggatgttggagaaagagcatcatctatgaaacgacgttgcaggaaaaaggtgcaaaaagttgggacacctaatcacactgttgatgattattttggtgaagactgtgtcgaaccttcattagctgaagaagataacgatactggtgatcattacactactggtaataagcataaggctaggaaaaagtcaaggggtggtgtagaagagtcacagcagcagaaagctcaaaaaaataaaagcaaggtgtcttcacggggccgcaaacggaccttgaaggatgaatcgacagagaagcctgagaagaagctaacccacagaatacgtcagaggataccaaaagaggttaaggctttactggaaacacctcgtgagcagataaaacccatgaagctttgtgcatcacatctcaggttgttacaagaagctagagagcgtgttgatccaaaagggattccatccgggccatcctctaatacaagaaactttcaactagatgatatggatgatttgggctacagagatgaggaagctaggttctttgacaacgatataacagaggagcatgtacaaaatgcaacaaaattgaactaccattcctacatgaacaaaccagcccggggaaaatggtcaaaatcagataccgacttgttttatgagggtcttcgacaatttggtagcgattttgcaatgatacaacaattattccctgataagactcgccatcaggtgcggcagaaatttaaatctgaggagagaaaaaatccattgctagtccatgatgctatagttcatcgctcaggagatagtttgtatttcaaaaaggtaattaagcagctgaacattgaagatgttgtgctgccagatattaaaagtacacaaaacaagatggtgcatcaagtgaaagaggccctggaaatgagaatgtactggatgatttaaacgaggaggaaaatagttcaaattggttgaacgaagagcatgacgtacagatggccgatgtggaagaagagcatggcgaacagatggatgatgtggaagaagagcgtgatcttggaaatgatggtggtgatgatgatcttggggatgtttttgattggtactagtttatgttaaacacggatgcgagcgtgaatatgagttggtctagctctgcataacaggggtagtttttaggaaaaaaattctttgcatccggaatgcaaagaatcccttttatgactgatttggtgactaggtatcacagagagattggagtggattgagagcctctaatctctccgtgatcctcttacagcctctaacatccaccacctcgtggtccatataagggcttattcggttattcttgtcccatgtggatttgatgagattggaaaaaatatgaaggattttaacttgttcgagatttaaatctatcaaatctcatcaaatccatatggattgagaggaaagcaaacaagccctaaatagaagaaaaacaaattactattggattaagttataaattttgatctgtttttgtggaccttcaagtggtgtatgtgagtggctgtaaaagagtgtgtttgcatctgggatatacagattttttaccctagtttttagatgttgccacagttgtacggttagaattgttcggctggactatcgcttggacgatcaagatactaggtttcctccaaaaacactgcaatactcgaagagcgatgagtcactagacaacatatccaat

SEQ ID NO: 215073 - DNA, 5119 bp, Zea Mays
aaggacggatttaacttcggtgttcatggaaatactgtgctctaaaaattcgcagtagtagcctaatttctttcctgctctgacgtcatcctcctctgggcgacacgggcggctccccatcgaccgcacccaccgccgccggtcttcacccccgccgtcgccggagcagctcgccggaagttcgacgagcagcgaggagggcggcggcgggactgctctctcactcatttccctcccttcttccacccactccactcctccctcttcctggaggtggccggcgacctgatccgccgctgggaaggccggatcggcgggctgactggccggatctaggggctggtcgccgtccgccgctcctccctgctggcatgggcaggtggccttgtggccgcaaccatggtggctcgtgcggctagcccgtggcggtagtgcccgcgctcgcgtggccatggccgtggctggccggcgacgttggcgcccacgcacgcggccggcccgctgcggcggcggcgtggctcgcttgtgcttgtagcgtggtgcttggatcgggggcgttggtggatctgcggctgccagcggtgccttctgcaggtggtgggtcatggtcgtggggctgggggccggatcttgagcctctccggctagatttatctctccgcctctcgtttcggcctgtggtgtgggcagggccggctggctccgtgcgttgcggcgtgtggtgggaggtcctgcgacgaaagccatgctcgcttgcaggcggacagcggtgacgcccgcgggcgccacccctaccctatcgagggtgccgtctttggacctctcgccccatgcgggaaccctcgccttggccttcttaggtctctcgctggtgctcgaccggcgttggggctctgagggttggggctggtgggttggtgcgtcggtggacggcagaaggtgacaacacgcgatggcttggcggggtgacatcggcgtggctgacctttcagctttcttcttggtgctggcgatctacactgctctgctaggtgcggcccagaagacctgcagtttgtgtgttcgttcgtgttgtggaggctcttcgtcgctccgcttggctcaatggtgtccgtgttgtggaggctcttcgtcactccgcttggctcgatggtgtccgggcctttgtcgctttaggcgtctgctcgctcccggagttcgacgttgtggatctttgctcgtggtgaagaatcggagctgcctcgtgtgggtgtgttgaggcttggcaacgatggcgcgccgcggtcttattccttgcgtcggtgtctgaatgtaagcgtcgtcgagttgctttggcagtgtgcggctcgtcttgggaagtcggagctgctcgtctcttgtgtttgagtttggcaacgatgactctagatgtgtttgtgtgtggggactgtcattgtctaagttgtttgttaggtcgttcgccggtttttctactgtgcgttctgtgtaggttttaggcccgattttccaaaaaactgggtcaattccattcttcttaattgagaggcagagctcctaccatcacgttaaaaaaaatcgcggtagttctttcttcttttttgatgctattgattacactgaatagtttagttttcatgaaattttatcataatacctgcacccctcctcgctcaaccagaaaacacacacaaaaaagaggacagaaaaaacctatcattagaagaaacatgctcctggataactgtaatgtgaacacctttctctttacaagttattgtatcagaatgacatttgacaattgacagatttgattccttacattatttctaccatgattgtcggcaccattagcctaagacgttagaatttcaaatatttgtctatgtctgccctgaatgttatccttgacatgccactgattgttttgtgactcttcaggatgattctacatccaagttggaactggaaagaagatatgcagaggaaaacaagaagattcagaaagagctggatctcctccggaaaacaaaggcgtctcctcggggcttctctgcgtttgtgctgcttgtcttcttgttatcctcacttcttggatacctgatgttcggaagcagagcttagcaagttagcagctaatggctgcacatcatttgcggcaccggcagcggcacggctcttttagtacagtgtacagatatatacattaatagcgaagtagtcagtacataacagatatatagggctttcttgggtttcaagtgtccataggaatatatcttcagttttgaaatatgtgtgagtaaccgttcatgtttatactctatcatccaaatatatgatgtttactatataataaagctataaaagtgagacaaatcagtgttggagaaagacaaattatggccttgaaactcatggagaaagacaaattatcacgttatttaagttaacacgccaaatttcctctacctaataacattgctattactgtagctgtatgcagaaagtataaacacctaggtgctaggctgagcctcatcgcctagcatttaaaaaaacattgagtatttgctgactgaggtatactttgagagttgggcttagatatgttacagatgatgctaatatatgactttctttgaggggtcctcgtaaaccaatcgggcattgccccaactatccttgattttatttgtctgttctgctgtagccatgtatccattgttgtcgttgagtacctttgccacggtttagttagttatctcactgcgagttgtcctccatcttgaactgtcgttactcacatgtgatgttgtatcatatttttcttcatctatcgctttcgatccttgtaaattattggttccattaaaggctctttgcattggggcattcatttggtagtcatgtatttagttcaaatttatattaagttccagtacgttctggttgaataccccatcttaactctacatgtttaatgatttttatttccttttttgctggtctgattctatgtttgcccccattgctgcttcctaaacctgcaatattcatttcagcctttaattggcactcaaagttcaagatagcttgctgtagaccatcggctgcacagatgattgatgatgaggtcaactttggtaatatctttgatgcctcagaagaagttcaggttactgcaaagtttggtcccaagcaacggcccaaaacccgaaaaacagctctatcatccagatctgcagcgcctaatcctactgaagaaaccggagataggaaagtaggaaccttcagtcaagtcaattcttctaaagagcttaccagccaagaaaggacatccttgatgtgccctagtactgagtcagttgatattatcgctggttctcatagtattctcgatacaccattggaagatgcattgacagttccccagggttctctgtctggtgcttctgctgcagataggacttctcaatatggtgagcacaatgatgatccttctaagttagctacacaccaagaaaacttggtggtttcagatatcaacgtcccacctaacagttcatgtagcaaggctattgatgatatagttgaatttggggacatgtgtgatgtgcaaattgaagaggaaagagttacaaagttccaaccaaaggtgcaaacgaagctccttaaggaaatagccaaatctcggaagactaaccaaaaggtggaaacttccactgtagatgtggttacacaaaatggaaagggcaataatattcagacaaggctccatggcgatccggtacaggatcctaaaagtcatgaaagtgtgcagatcccagattctgaaggattattagcaactgataatagtaaaggttgcaatttagctaacctcaacaatctccttgaggagtcagtccaagaggaaacaatagctaagtttcgttctgatttgcaaccaaatctcgggaaggcttcatcccaggttgctgcgattaaaattaatgttgttgctgttgctccaatagttggagtttgtgacagcaacaatgacatgtacaaagaacctaaagatcaagaaaccatcactggtccagtggcttggtcaccacaggctgtgcatgctgatgttgatttagacaatcacaatgaaccaattaatcctcctattgatggtactcaatcaatgtttggcgaagtcccaggtacagcttttacaggaagagaaaagggaaaatcaaaatctgtatcttttgctctatcggatgtttctgggatagctagccctatagataccaattctgagatgggtaacatcggcgattcctgtagtgacaaattgactgatgaaaatttaagtaactcatctcgtcatatcgctgaaaagcattctattaccaaggaccaatattcaaatgagcaggaccatgagcgggagccactagatcatgctgttcaacagcaaccaaaatcggatgttggagaaagagcatcatctatgaaacgacgttgcaggaaaaaggtgcaaaaagttgggacacctaatcacactgttgatgattattttggtgaagactgtgtcgaaccttcattagctgaagaagataacgatactggtgatcattacactactggtaataagcataaggctaggaaaaagtcaaggggtggtgtagaagagtcacagcagcagaaagctcaaaaaaataaaagcaaggtgtcttcacggggccgcaaacggaccttgaaggatgaatcgacagagaagcctgagaagaagctaacccacagaatacgtcagaggataccaaaagaggttaaggctttactggaaacacctcgtgagcagataaaacccatgaagctttgtgcatcacatctcaggttgttacaagaagctagagagcgtgttgatccaaaagggattccatccgggccatcctctaatacaagaaactttcaactagatgatatggatgatttgggctacagagatgaggaagctaggttctttgacaacgatataacagaggagcatgtacaaaatgcaacaaaattgaactaccattcctacatgaacaaaccagcccggggaaaatggtcaaaatcagataccgacttgttttatgag

SEQ ID NO: 215074 - DNA, 3131 bp, Zea Mays
agctccgtagcgcacactccacgactcggcctcctcttcctcgcactattccgccgccgccgccgccgcctacaatcctccacctccccgggtcccgccgccgcgccgcgatggaggaagacgacgagttcggcgacctctacaccgacatcctcatccccactcagccccccacatccacgtccgcgttatccaaccctgttccagtcgaaaccctaccccgtccgcctccaaccctaatcctagccctgtggcggcggcggcggcggcgggggtggaggaagacgacgactggatcctaggagggagcgaccccatacccggggtcgacccgaccggcgactgggccgacgaggacgacgacgaaggcgaccctgcgccgcccgtgaagctgcccgccgctgataatgatctcgatccgctcatggggggtggtgcggaggattccgggccagccatccctgggctctcgtcgtcggcggcagctggtgcggccgggagcgaccaatgggacagcgatagcgaggacgacatccagatcgtgctcaacgagacagatggacgccgggggctcggggatgatgaaggagacgacgaagacggtgaggacctcgtcatcgtcgccgacggaccacacatcaccgggatcgacgagcaggattggggagaggacccagtagcggcaggggcagaaggagagcgaaaggacggaggtgatcctggtaagacggccgcggcacctggtggaaggatcgggtacagtggcggcggccaagggttccatcaacagcaccattccatgttcaaggtatgtacgccctggcgctcctgttgcttcagcaggtggggtacctggtggtcctggtcagttccgccctgctggaccttcaggccctttctctggtcgtggtagaggtgactggaggcctgctgctggtcgaggcatgaataaaagttttcattcaggttatggaaccgctccatggggtggttcagggcgcggttttggtggcggactagatttcacacttcctcctcacaagacaatatttgatattgatgtggaaaccacatttgaggataaaccgtggaaataccctggtgctgatatttcagacttttttaactttggccttgatgaagagaagtggaaagatttttgcaagcagctggaccaacttcgactagaatccacaatgcaatctagaatacgggtgtatgaaagtggccgctcagaacaggattatgacccagatttgccaccagagctagctgctgtgactggtcatccagacatctctgctgacaatcgcaataaaatggataacggccatacagattttagtgcccaaggaagaggtccggcaaacgtgcggacaccagtgatgacagggagacctatacaagttgaaactaattacacagaccggtttccatctattgattcacgctcacatcgaatgcgtgaatcatattctgttattgagattgtgtgccagggccgtgattcaatggatgatgagacagtggaccaaactgaaaaagattctcaaagaggttataaaggagtccatgatgttgaggagggtaagccatatccaacagataagattaataattctggtcataactcaaatttggtgataaagacagaacataagagacagccacctgtttcacctgaatgtgatatgttatccacggatgtcaatgctccctcccctcccagctacaagacaagaggttctcctcgtgaagcaaggttgaaacaaaagaagtgaatgaacaagatagcagtagaggccatgcaacattatccaagaagagccagaatcctcagccagataattcattggtgaatcaagtggaagaagacgcctcagatgatgaaaatcacgaggattctagaaagggacgctctaaattggagcgatggacaagccacaaagagatagaatatagtaatatcgatgatgataatacagagacatttccgaccatcaaagctgatgttgaagccgatgaggtgggtaaatctgaagtttctgctgcagttggcaattcagacatcaatagcaatgttgatactgggcaaacatctgataagagtgaccgacatctagacacagttgagaggctcaagagacgaagtgagcgtttcaaacttcccatgcctggcgagaaggatacgcctcaaagcaaaaaggtggataccgaagtgcagcctccccaaaatgaatctactgctgctgatatggaagtgaagcctgagcggccagctcggaagcggagatggactgggagttagttgaactagcataacgtttccacttttcagcagatttcatggcagatgcttgcgctttgccacgtttttcctcgtacagttgaaagttgaattgatgtatggttttactgtctagcatacacatgtacctgtaaacttagtttttttttgtgtggctgggaactggatactgtactaaaaccccatccattttcccactatgattctggtgacctcaatgtggcacaggagccactgtactccgggtaagttccgaggctgttatgggaagcagtggcctcggagtttcccagttgaatatctgggttcggcatgaactacattttgatgaagctggagtgcccctgctgcaaggttcttttgtttgaagttctggtggcctgaagcaccgggtcttgtaacaatcttgtgttggtgggagatacttgcaagatgtgatggttgaatgtttggcacgtgatgatgatgctgttttaggaaccaccaataggtgatagaaaccaggggctagagatttcagaactgacataatcacaaatttgtatgcttaatactatgttagtcatgtacattctgataaacgtataaatgtcgtgcatgatctaccggagtaaggtgtctaagactagtgtgtagagctccacggtgcactttttgggtcgagcaatacatatatatgtacctgtagagagtgttaggtagaaataacatgattgtttgcttgttgtaggtttgcggtgtatgtaactggttcgtgtagaattttgctaaccatagagttttgaatggcattatctaaatttattgaaatttagcatttcag

SEQ ID NO: 215075 - DNA, 3166 bp, Zea Mays
ctgactattagtaactcggaatagtacctaataagcagctccgtagcgcacactccacgactcggcctcctcttcctcgcactattccgccgccgccgccgccgcctacaatcctccacctccccgggtcccgccgccgcgccgcgatggaggaagacgacgagttcggcgacctctacaccgacatcctcatccccactcagccccccacatccacgtccgcgttatccaaccctgttccagtcgaaaccctaccccgtccgcctccaaccctaatcctagccctgtggcggcggcggcggcggcgggggtggaggaagacgacgactggatcctaggagggagcgaccccatacccggggtcgacccgaccggcgactgggccgacgaggacgacgacgaaggcgaccctgcgccgcccgtgaagctgcccgccgctgataatgatctcgatccgctcatggggggtggtgcggaggattccgggccagccatccctgggctctcgtcgtcggcggcagctggtgcggccgggagcgaccaatgggacagcgatagcgaggacgacatccagatcgtgctcaacgagacagatggacgccgggggctcggggatgatgaaggagacgacgaagacggtgaggacctcgtcatcgtcgccgacggaccacacatcaccgggatcgacgagcaggattggggagaggacccagtagcggcaggggcagaaggagagcgaaaggacggaggtgatcctggtaagacggccgcggcacctggtggaaggatcgggtacagtggcggcggccaagggttccatcaacagcaccattccatgttcaagtatgtacgccctggcgctcctgttgcttcagcaggtggggtacctggtggtcctggtcagttccgccctgctggaccttcaggccctttctctggtcgtggtagaggtgactggaggcctgctgctggtcgaggcatgaataaaagttttcattcaggttatggaaccgctccatggggtggttcagggcgcggttttggtggcggactagatttcacacttcctcctcacaagacaatatttgatattgatgtggaaaccacatttgaggataaaccgtggaaataccctggtgctgatatttcagacttttttaactttggccttgatgaagagaagtggaaagatttttgcaagcagctggaccaacttcgactagaatccacaatgcaatctagaatacgggtgtatgaaagtggccgctcagaacaggattatgacccagatttgccaccagagctagctgctgtgactggtcatccagacatctctgctgacaatcgcaataaaatggataacggccatacagattttagtgcccaaggaagaggtccggcaaacgtgcggacaccagtgatgacagggagacctatacaagttgaaactaattacacagaccggtttccatctattgattcacgctcacatcgaatgcgtgaatcatattctgttattgagattgtgtgccagggccgtgattcaatggatgatgagacagtggaccaaactgaaaaagattctcaaagaggttataaaggagtccatgatgttgaggagggtaagccatatccaacagataagattaataattctggtcataactcaaatttggtgataaagacagaacataagagacagccacctgtttcacctgaatgtgatatgttatccacggatgtcaatgctccctcccctcccagctacaagacaagaggttctcctcgtgaagcaaggttgaaacaaaagaagtgaatgaacaagatagcagtagaggccatgcaacattatccaagaagagccagaatcctcagccagataattcattggtgaatcaagtggaagaagacgcctcagatgatgaaaatcacgaggattctagaaagggacgctctaaattggagcgatggacaagccacaaagagatagaatatagtaatatcgatgatgataatacagagacatttccgaccatcaaagctgatgttgaagccgatgaggtgggtaaatctgaagtttctgctgcagttggcaattcagacatcaatagcaatgttgatactgggcaaacatctgataagagtgaccgacatctagacacagttgagaggctcaagagacgaagtgagcgtttcaaacttcccatgcctggcgagaaggatacgcctcaaagcaaaaaggtggataccgaagtgcagcctccccaaaatgaatctactgctgctgatatggaagtgaagcctgagcggccagctcggaagcggagatggactgggagttagttgaactagcataacgtttccacttttcagcagatttcatggcagatgcttgcgctttgccacgtttttcctcgtacagttgaaagttgaattgatgtatggttttactgtctagcatacacatgtacctgtaaacttagtttttttttgtgtggctgggaactggatactgtactaaaaccccatccattttcccactatgattctggtgacctcaatgtggcacaggagccactgtactccgggtaagttccgaggctgttatgggaagcagtggcctcggagtttcccagttgaatatctgggttcggcatgaactacattttgatgaagctggagtgcccctgctgcaaggttcttttgtttgaagttctggtggcctgaagcaccgggtcttgtaacaatcttgtgttggtgggagatacttgcaagatgtgatggttgaatgtttggcacgtgatgatgatgctgttttaggaaccaccaataggtgatagaaaccaggggctagagatttcagaactgacataatcacaaatttgtatgcttaatactatgttagtcatgtacattctgataaacgtataaatgtcgtgcatgatctaccggagtaaggtgtctaagactagtgtgtagagctccacggtgcactttttgggtcgagcaatacatatatatgtacctgtagagagtgttaggtagaaataacatgattgtttgcttgttgtaggtttgcggtgtatgtaactggttcgtgtagaattttgctaaccatagagttttgaatggcattatctaaatttattgaaatttagcatttcag

SEQ ID NO: 215076 - DNA, 697 bp, Zea Mays
aaaagaccaaagaaaaaccgggaaaacacccgtcgcccgcccctcatccctccgtcgccgcgccgccgtcccatcgacgccacctgccgctgccgccgtccagcacacctcctccgcctcacgcgttcctgcagaaagcctctcctagaccacggcccaaggcccttcatatccacgcggcacccgagcagcagaaccctagataaaccctctcgggggctaagcaccggcggcggcgatggtgatggtccctcccggcgagtgggtcccccacgtcgaggcctacgtcgacgtctcccgccccgccgtgcagcattctgctagcgtggatgcacttgctgccctggtgaacaaagacaagttgaccctttttgatttggtgtccaagatggatctttatttgacgacaacagaccacattgtcagatcaagagtcagattggcaagcaatacgaggagcccttgttggttgcctggctttattgcacaggaaacatggtgttggttgtattgtgattgctgatgtcaaaagactagttgagtctttcttacagaatgttccagtgcagtcacttgcagctgctgaccgcaagctgtgctttgaaattctgagctgcatattggatcggtacccggaagctgtaaaacaaatggatggtgaacagctgtatgggatctgtgaagcaattgatgaaga

SEQ ID NO: 215077 - DNA, 2484 bp, Zea Mays
ccggcttcaatagaaacacataacttcagattttcttacctgaccaacacaagtacaatcgttatgcttaaatgtaatatatattctaatagttcaatatcaatacaccttgctgctttattattatttcctatatattaaagcaggtccaaaacggcaacgacgaggctatccacctcgcgctattttctcctcgtcgtttgatcgaaaagcgaccgcataggtgcgccgccgctctagccccacgaaacattgttgaagcagcctacatttttttcatggttgtattctgacgcttatttcgcacatgcctttgtctcattcattttttaatgtgaggcttgtgtgctgttttggaattcagttctaagaaggccaccaaaggaaactcacctgacaagggaagaaacaagttctggaagaacatcaaccttggtttcaagacgtccacgtaagctattgaaactcagagtttcttttcttgtccagctgatgtttttgttagattgtcagcccattcgaagctacgaagaatccacatcacacaaccgattgacgctatctataataattaccttgttgtaattaaaaagaagaaacatgtgctttctattttgtataaaaatatcaaagttgcgtgctgaaatcataaaggagttctatattcactgttgataacatgcatttttcatgttgccatattaatagaataataactacgaataaacaacctgataaagtggtaaataaagtggcaaatgtgatggatccgatcatatcttcttcaaaagtggagtattgtgatttgaaatttgtattttttaatagctcactcatttcattttatagaagcagcataaaactctcactgatatgtaaaaagtttgagcctcttgaatcccctccaaagaggatcaaaaggattctacggaccaaagtaccccatgaatgatagatgcaaccacatgaaacccataaaaatagcccttaccggcagtgtcagcttttgctatcaatcttaccattttgtaaccaaaataccaaatacaatggatgcatagataacccttcagacgttctactaaatgcagctgatgtgctgcaacttatatttatttatttattttagacaatgacctacttaaatatggcatgaagattatgtatgtcatcgtttttatttctagattcgatacatgcatatacaattagctgctagcccttagataatgctacctactaattgaagataactgattaatataatatatatattttttgataacgaatagtatcgaactagtattaatatttatacagtctatatatttttcgataatgaacaatatcgaaccagtattaatatttaaaccttccctttgttggcataaaaagggaatattaatgttacattatacatgtaccttcatgtataacatattttctttatatacacataaaaatttgtatgaccacaaaaaaatatataaaaaataaaaataacgcgcggtgggtgcgcgtcaaacactagtatatatactgcgggtactattttcttgaaagtttgggtctgtttcataaaagttaggacctacatgcaattatctttacacctgaggggatggtgggtttatttcgaaatacttgagggtctattatgcaatatgcacgcggccgaaggggtttgaggaattctaagccatccaatctctcgtgcacggctaggattagattcaccttcacaccgaaccggtatgcaccagtggccgcaagatccaaaagctatggtctcgatttaattatggccagattccaccacacccgctcgatcgaggatccatggccaggagtcgatcgaagcaaaggggtacgtggcttctaacctcggccacacaagtcacgtcaaacggcgacgggttcgtcatcgtcaccctgaggcctgagcatgagcgcgacggcgtcgcctgcctccgcggtggagggatggccgaaatccggctactccacgcaacagatccccaaattctaatctgaggtgtgatatatgtaaggaaggacatggcgaaggcagggggttctcacctacgaggctacgattgtgctgttcagtgctctaaccacggagaatcgtggtccgtggcggactccttcgctccggtgaacgattccctggactccgatgacttatgtgcccaagcgaatgatcacacgtgaccttcgcacgctggcgaaccttcgcgacctctccccaagcaccatacgtcggtggatgcgatcaccgagcgtggcggctccctctcctttctctctcttgctttctgtcaatggtggccctctctattcggtggtctaaatgaatgggtgaggaggtgtggctgaggactatatacccgtgaggcagggttcatgagctggcgaccagatttcatgggggaatctcaacaaccggatcgagttggttgagagtttggcagtggtttgttg

SEQ ID NO: 215078 - DNA, 3213 bp, Zea Mays
cgttcgtgggcagccgaaagcgaggcccggaagcggaaaggcgaagtccagatctcgccggtcacggcgggtcgatctcgcctgcatgcgtggaatctcggtggacatagtctacaagactacaacggtgatatggatatgcaactatgcaaggtgaaatttggtcaggatcggaaggaggtgcgataaaggcatggccttgggaagcccttgctaagtgcctctcatctacaccagaagaaattcatgaggctgcctcgttggttgaaaaatcctatatcgaccttaggaaccatgctacagttggtaacatgtgctctttgcctactgctgatgtgaaacacatgctcgcagaccactgccgattgaaagtttggagtgtaactagcatgacatttgctctttgggatgctaagactagggagcttttaaaagtatttggcatcgatggccaagtcgacttagctcgtcctgaggccccagtaatgccggaacaattcatagaggaagagattaaagcaaaacccacaaaaaaggagaaactgcaaggttctttaagtttctttcggaaatctaggaatgccttgatgggcgcagctgatgctgtacgcagagttgcaacaaaagggacatttgtggaagataatcggcgaaccgaagcggtggctcaagcaatgaatgggactatttggtctggttgtacagatggttcaattattgtgtgggatggaaatgggaatagactgcaagaatttcattaccatagctcttctgttcaatgcatagaggcactcggagagaggatctgggtgggctatgcaagtggtactattcaagttatggatgttgaaggtaaccttcaggcaggatggattggtcatagctgcccagtcataagcatggcagtcggcgattcttacattttttctttggcacatcatggtggcattcgaggatggtctctaagttcccctagccctcttgatgatattctacgctatgaattggctagcagggagctgtcatacacaaggctagagaaccttaaaatactggttgggacttggaatgttgcacaagagaaagcttgtcctgaagcgctaaagtcatggttgggtggtgcatttttcgatgttgggttggtggtggttggtttgcaagaggtcgagatgggtgctggagttcttgccatggcagcagccaaagaaagtgtaggacttgagggcagtaccaatgggcaatggtggatagacagtattggcaaaacacttgatgaggggatatccttccacagggttggttcaaggcagttggcaggattacttattgctgcatgggcaaggaatgaccttaagccacatgttggtgatgttgatgctgctgcagtgccatgtggctttggacgtgctattggcaacaagggtggtgtaggattaagaataagagtctttgatcgcaggatatgttttgtaaacaatcattttgctgcacaccaagaaaatgttagccgccgtaatgctgattttgaccatatttatcggacaatgactttcaacaaaccccatggatctacagcttctgctacatctgtccaattgcataaagcagtgagtgctaatgaaaaccaagccgatgaagataggcctgagctggcagaagctgacatggttgtctttcttggtgatttcaactaccgacttgatggcatcacctatgatgaagcaagggatatggtctctcagaggagctttgactggcttagagaaagggaccaacttcgagcggaaatggaggcaggaaatgtgtttcaaggaatgcgtgaaggtcgaatcaaatttcctccgacctacaaattccaacgacaccagatgggtctctcagggtacgattcaggcgagaagaagagaatacctgcttggtgcgatagaatactatatcgtgatagccgttctgtatcaatgcctgaatgctcattagagtgtcctgttgtcgctgcaattacagcgtacgaagcttgcatggatgtcacagatagtgatcataaaccagtgagatgtacatttagcgttgatattgcgagagtagacgagctgataagaaggcaagagtatggaaaaatagtcgagtctaacaaaagggtacactctttgcttcgggagttgcattttgttccggacactatcgtcagcacaaacaacattatattggaaaaccaagaagatgtcatcctccgaataactaataactgcgaaactagtaaggctgcatttgaaatcctgtgtgaaggccaatcaatcagaaagcaagatggaactaaatctgagccagtcataagggcatcctttggctttccactttggcttgaggtccagccatcatccggcctcatcggaccaggagacacaacggaagtcgccgtgcaccacgaagacttcttcacgcaagaagagttcgtcgacggggtgcagcagagctggtggtgcgagaccaccagagacatagaggtcgtcctgtcggtgaacgtcacgggcgtcgcctcgaccgaggccgccacgcacaggatcaccgtccggcactgctgcccggcgcctccagccccgccgtccgctaacccacgcggccccattaccgactcacctagcgacgctgtgccaggtcccaagagtagccagtcgaatcacttgctgcgttctgacttcgcaaacttcggcagctccgaggtgcgcgacctgtgcggcgtgcggaagcggaacctgtagagacgagcagctcagttttgttttgcctggtgctgtggtttttttgctttctgtccgagtgtttagccggtggagtcttggatttcttgcctaagcttgggggtgggggtggggagagaagaagtggttctgctcttcatcttgttctgtacatatgcgtccctgacctctcacgtctcaccgtcctttgcatatcagatcaaaaagggaaaagaaaaaagtgtgtgtgtgcagttgttgcaaacatttttctttttacattcttacgttctagatgtggcattgaaattatgtggttagaaggtggagtacataattgtgtgtgtacttataatagaggtttacttcattgaatcaagctagtgtgaattatacacagaggcagtacatttaacttacagggcaattctcttggattaatgaggcagtgatcttttgtgcagaagaacctata

SEQ ID NO: 215079 - DNA, 3541 bp, Zea Mays
cgttcgtgggcagccgaaagcgaggcccggaagcggaaaggcgaagtccagatctcgccggtcacggcgggtcgatctcgcctgcatgcgtggaatctcggtggacatagtctacaagactacaacggtgatatggatatgcaactatgcaaggtgaaatttggtcaggatcggaaggaggtgcgataaaggcatggccttgggaagcccttgctaagtgcctctcatctacaccagaagaaattcatgaggctgcctcgttggttgaaaaatcctatatcgaccttaggaaccatgctacagttggtaacatgtgctctttgcctactgctgatgtgaaacacatgctcgcagaccactgccgattgaaagtttggagtgtaactagcatgacatttgctctttgggatgctaagactagggagcttttaaaagtatttggcatcgatggccaagtcgacttagctcgtcctgaggccccagtaatgccggaacaattcatagaggaagagattaaagcaaaacccacaaaaaaggagaaactgcaaggttctttaagtttctttcggaaatctaggaatgccttgatgggcgcagctgatgctgtacgcagagttgcaacaaaagggacatttgtggaagataatcggcgaaccgaagcggtggctcaagcaatgaatgggactatttggtctggttgtacagatggttcaattattgtgtgggatggaaatgggaatagactgcaagaatttcattaccatagctcttctgttcaatgcatagaggcactcggagagaggatctgggtgggctatgcaagtggtactattcaagttatggatgttgaaggtaaccttcaggcaggatggattggtcatagctgcccagtcataagcatggcagtcggcgattcttacattttttctttggcacatcatggtggcattcgaggatggtctctaagttcccctagccctcttgatgatattctacgctatgaattggctagcagggagctgtcatacacaaggctagagaaccttaaaatactggttgggacttggaatgttgcacaagagaaagcttgtcctgaagcgctaaagtcatggttgggtggtgcatttttcgatgttgggttggtggtggttggtttgcaagaggtcgagatgggtgctggagttcttgccatggcagcagccaaagaaagtgtaggacttgagggcagtaccaatgggcaatggtggatagacagtattggcaaaacacttgatgaggggatatccttccacagggttggttcaaggcagttggcaggattacttattgctgcatgggcaaggaatgaccttaagccacatgttggtgatgttgatgctgctgcagtgccatgtggctttggacgtgctattggcaacaaggtaagcgattgtcaaggcatcttcacttttttttgggtttctgaaggtaccaggtatcatctgtttggtctgtttattaccactaggcatcccctaggccctcccttctgcacaatataataaaaactttgtcagaaaaaaaggaaaagagaaactggtaatctgcatggcatttattggagatattgcaatatagaatcagcaaacttattaaaatgtgctgtttttttgttgctgtatcatggagaagcaatgtgctcgtctgtgctagaacaaaagaaatgaactgacagaaaaaaaaatattaacggacagctatgtttggaagattctaacttcactaatctgcagataagctcttggacaagtagttatatatttgaattcaatagttgattattaccttttcatgtctgtcaaagttgtgctcctaatttccttcaccgttctacattgtaactgtacaaatgaccgctgatacttctttcagggtggtgtaggattaagaataagagtctttgatcgcaggatatgttttgtaaacaatcattttgctgcacaccaagaaaatgttagccgccgtaatgctgattttgaccatatttatcggacaatgactttcaacaaaccccatggatctacaggctaatgaaaaccaagccgatgaagataggcctgagctggcagaagctgacatggttgtctttcttggtgatttcaactaccgacttgatggcatcacctatgatgaagcaagggatatggtctctcagaggagctttgactggcttagagaaagggaccaacttcgagcggaaatggaggcaggaaatgtgtttcaaggaatgcgtgaaggtcgaatcaaatttcctccgacctacaaattccaacgacaccagatgggtctctcaggtacgaagcttgcatggatgtcacagatagtgatcataaaccagtgagatgtacatttagcgttgatattgcgagagtagacgagctgataagaaggcaagagtatggaaaaatagtcgagtctaacaaaagggtacactctttgcttcgggagttgcattttgttccggacactatcgtcagcacaaacaacattatattggaaaaccaagaagatgtcatcctccgaataactaataactgcgaaactagtaaggctgcatttgaaatcctgtgtgaaggccaatcaatcagaaagcaagatggaactaaatctgagccagtcataagggcatcctttggctttccactttggcttgaggtccagccatcatccggcctcatcggaccaggagacacaacggaagtcgccgtgcaccacgaagacttcttcacgcaagaagagttcgtcgacggggtgcagcagagctggtggtgcgagaccaccagagacatagaggtcgtcctgtcggtgaacgtcacgggcgtcgcctcgaccgaggccgccacgcacaggatcaccgtccggcactgctgcccggcgcctccagccccgccgtccgctaacccacgcggccccattaccgactcacctagcgacgctgtgccaggtcccaagagtagccagtcgaatcacttgctgcgttctgacttcgcaaacttcggcagctccgaggtgcgcgacctgtgcggcgtgcggaagcggaacctgtagagacgagcagctcagttttgttttgcctggtgctgtggtttttttgctttctgtccgagtgtttagccggtggagtcttggatttcttgcctaagcttgggggtgggggtggggagagaagaagtggttctgctcttcatcttgttctgtacatatgcgtccctgacctctcacgtctcaccgtcctttgcatatcagatcaaaaagggaaaagaaaaaagtgtgtgtgtgcagttgttgcaaacatttttctttttacattcttacgttctagatgtggcattgaaattatgtggttagaaggtggagtacataattgtgtgtgtacttataatagaggtttacttcattgaatcaagctagtgtgaattatacacagaggcagtacatttaacttacagggcaattctcttggattaatgaggcagtgatcttttgtgcagaagaacctata

SEQ ID NO: 215080 - DNA, 4068 bp, Zea Mays
ccctgcacggcccctcccctgccccttccgctcccgcaacgggtgtgcctccgttccggccccgcccgaccttctctcacctctccagcgctcgcctcccgatcctcctgcagtcccacctccttcgccgccttctcatcgcttccaaaatcgcaaagccggatcgcggggacatggacccggacgacgagtccgcggcgcagcggaaagccgccgacttgcacctgccgcgcgtcacggagcctgcctccgcgcccgcacgcaccttctgcgccgcgcagcgcgtgctcagctacggtgacggccctgtcgcctccgcctcggcgcagcgctgcgcgtcgttcccgcagcgccacgggcacgggcacggccacggcgaggcggcgctcgcccctgctgcgtccttcgccgcctgggtcgacggcggcccgacgccgccttcggcggtggcagcggcactggagcgggccatgtcgcagtacgacggcgcgggcgacgcgctgccggagttcgtcggcgccggcgggggcgagggcatcttccgcgtgccgctccgcgcggcggtgcacccggcccgcccgccgccgctcgaggtgcgtccccacccgctgcgggagacgcaggtgggcgccttcctgcggacgctggtgtgcgacccgcggcggcggaagctgtgggccggcgccgagtccggggtccgggtgtggtgcctcgacgaggtgttccgcgggtggtggccaggcgccgggccgcggcgccgcggcgacgaggaggccgcgcccttcagggactccgtgccggtcccgcccgcgctctgcgccgcggtcgacagcgccaacgggctggtgtggacgggacacagggagggcaggatcagggcgtggcgcgtggaccacgccgcgcccgccggaggagaccccaccggcagcgcggccatgttcaaggaggccttcgcgtggcaggcgttcagccgcacgccggtgctcgccatcgtcgtcacgccgtacggtgaaatttggtcaggatcggaaggaggtgcgataaaggcatggccttgggaagcccttgctaagtgcctctcatctacaccagaagaaattcatgaggctgcctcgttggttgaaaaatcctatatcgaccttaggaaccatgctacagttggtaacatgtgctctttgcctactgctgatgtgaaacacatgctcgcagaccactgccgattgaaagtttggagtgtaactagcatgacatttgctctttgggatgctaagactagggagcttttaaaagtatttggcatcgatggccaagtcgacttagctcgtcctgaggccccagtaatgccggaacaattcatagaggaagagattaaagcaaaacccacaaaaaaggagaaactgcaaggttctttaagtttctttcggaaatctaggaatgccttgatgggcgcagctgatgctgtacgcagagttgcaacaaaagggacatttgtggaagataatcggcgaaccgaagcggtggctcaagcaatgaatgggactatttggtctggttgtacagatggttcaattattgtgtgggatggaaatgggaatagactgcaagaatttcattaccatagctcttctgttcaatgcatagaggcactcggagagaggatctgggtgggctatgcaagtggtactattcaagttatggatgttgaaggtaaccttcaggcaggatggattggtcatagctgcccagtcataagcatggcagtcggcgattcttacattttttctttggcacatcatggtggcattcgaggatggtctctaagttcccctagccctcttgatgatattctacgctatgaattggctagcagggagctgtcatacacaaggctagagaaccttaaaatactggttgggacttggaatgttgcacaagagaaagcttgtcctgaagcgctaaagtcatggttgggtggtgcatttttcgatgttgggttggtggtggttggtttgcaagaggtcgagatgggtgctggagttcttgccatggcagcagccaaagaaagtgtaggacttgagggcagtaccaatgggcaatggtggatagacagtattggcaaaacacttgatgaggggatatccttccacagggttggttcaaggcagttggcaggattacttattgctgcatgggcaaggaatgaccttaagccacatgttggtgatgttgatgctgctgcagtgccatgtggctttggacgtgctattggcaacaagggtggtgtaggattaagaataagagtctttgatcgcaggatatgttttgtaaacaatcattttgctgcacaccaagaaaatgttagccgccgtaatgctgattttgaccatatttatcggacaatgactttcaacaaaccccatggatctacagcttctgctacatctgtccaattgcataaagcagtgagtgctaatgaaaaccaagccgatgaagataggcctgagctggcagaagctgacatggttgtctttcttggtgatttcaactaccgacttgatggcatcacctatgatgaagcaagggatatggtctctcagaggagctttgactggcttagagaaagggaccaacttcgagcggaaatggaggcaggaaatgtgtttcaaggaatgcgtgaaggtcgaatcaaatttcctccgacctacaaattccaacgacaccagatgggtctctcagggtacgattcaggcgagaagaagagaatacctgcttggtgcgatagaatactatatcgtgatagccgttctgtatcaatgcctgaatgctcattagagtgtcctgttgtcgctgcaattacagcgtacgaagcttgcatggatgtcacagatagtgatcataaaccagtgagatgtacatttagcgttgatattgcgagagtagacgagctgataagaaggcaagagtatggaaaaatagtcgagtctaacaaaagggtacactctttgcttcgggagttgcattttgttccggacactatcgtcagcacaaacaacattatattggaaaaccaagaagatgtcatcctccgaataactaataactgcgaaactagtaaggctgcatttgaaatcctgtgtgaaggccaatcaatcagaaagcaagatggaactaaatctgagccagtcataagggcatcctttggctttccactttggcttgaggtccagccatcatccggcctcatcggaccaggagacacaacggaagtcgccgtgcaccacgaagacttcttcacgcaagaagagttcgtcgacggggtgcagcagagctggtggtgcgagaccaccagagacatagaggtcgtcctgtcggtgaacgtcacgggcgtcgcctcgaccgaggccgccacgcacaggatcaccgtccggcactgctgcccggcgcctccagccccgccgtccgctaacccacgcggccccattaccgactcacctagcgacgctgtgccaggtcccaagagtagccagtcgaatcacttgctgcgttctgacttcgcaaacttcggcagctccgaggtgcgcgacctgtgcggcgtgcggaagcggaacctgtagagacgagcagctcagttttgttttgcctggtgctgtggtttttttgctttctgtccgagtgtttagccggtggagtcttggatttcttgcctaagcttgggggtgggggtggggagagaagaagtggttctgctcttcatcttgttctgtacatatgcgtccctgacctctcacgtctcaccgtcctttgcatatcagatcaaaaagggaaaagaaaaaagtgtgtgtgtgcagttgttgcaaacatttttctttttacattcttacgttctagatgtggcattgaaattatgtggttagaaggtggagtacataattgtgtgtgtacttataatagaggtttacttcattgaatcaagctagtgtgaattatacacagaggcagtacatttaacttacagggcaattctcttggattaatgaggcagtgatcttttgtgcagaagaacctata

SEQ ID NO: 215081 - DNA, 1418 bp, Zea Mays
ggggaatccgggaatccaaagcagacggccagacgccgtgccgagccgagcagtccaactcccgggcagaggcagaggcagaggcggagggcggggcgagagagccgtgcggctgtccaactccccttccctatccggtagcagctgctcctatatgacccccgcaccccagcaaaaaccttcccctttttccccttcacagccccgtactactatccccgctaccgctagccgccgcgctgctcatctggtggcggctcgcctccctccccccatccgccgccgccggctcctcctctagctccctccttaccccgagctttaagctcgtgctacctgcctacctatccgtagggagagagagagagaggggagaaggttcggtcggtcggtcgggggctctcggatctcgccgctgcctccccgtttcttcgttgggatctcgctcgcttcgcgccatggccgccgtcgcgacgccaccggcccccgcgcccgccgcgccggcaccggcaccggcaccggctgctgctccggctcccgtcaccgtcgcccctgccgcggaccaaaccacggatctgctgcagaagttgtcgctggattcgcagcccaaggcggcgggtgcgacagagcctgctgctgctgccgccaaggagggtgctgtgacaagccagccgctgagtgtggccatcccgccggagcggtctatcacgccggtgcttcaggactttatggatcccaacctgttctatctaccagcgtattactatggaggctacgacagttccatgagcgagtgggatgattatccaagatatctaaattcagatggagtggagattgccccagcagtgtatggagatatttatggatatgggtatgctccttacggggcatactctccggccacttccccagttccaacggttgatggtcagatgtttggcgcacagcattaccagtatccaaccacgtattttcagcctcctacaccaattccttctaccactcaaagcaacctccagtcttccaacaatcctgaaaagccagcagctaaagcagatcctgccaaggcaaccgctaatggtgttccaaatggtactggtcacactcacagttacagtggaactgtaccaagccaacaaagttcagcactgacgcctgatggaacttatagggcgcccttgctaggtggagttccttctgctggttacctagacacgacatattatgggtatgacagcacaggggcacaatttgcatggtatgatggctctgcttatgcaaatggacagcaaagaacaaccacaactaatcgttttccatcctcgtcattcagtggtaatggttcatctgcaatatatcagaacaagagctccaccacgcagcagatgtttaaactcggctggggagggaaagac

SEQ ID NO: 215082 - DNA, 1594 bp, Zea Mays
aaccaaaccggagatggaagaaaagctccaatctaacccactttcattcagatccattcaatgtaacgacgaacacagcagggtatactcggatcccagttacgcaacacacccacagggacagaccctggcattccgacactacgggagaaaagagtcttcggggctataagcaaactgaaacggggaacacaagaggaagagaaactagggaaaccgctaacaactagccaactgctctccatccagtagcgatgaggagatcgagcaacgcttatggggccatgctgccagttccacagcctgccttggttggtcaccagttcccttgcaccgcatcctggctatggagctctggttgcacgatcgagttaaccggtcttggcgactccgttggagaggacgggtttctctggtgctgtctgggccacctttgctgcataggaaacaacaggagcagtgatgccgttctctgcgggagccttcaccgccttcacctctgccgtgacaccatctggtacggacggattgggcttcccattagcaggttcctgcggtcgctcaccggtgacagaaacgggggtcctagtgtcccagacctggacgattcaagacagtcgaacccacaggtattatagacagggcaaggtgatgaaatctgcagttgacaaatataagccatgtatttggggctccaaacctacctgcttttggagctgctgctgtttcgacctcttatcctgcatcaacttctggcggctctcgtagaaggcaaagtcgtcgaggatggaagtcttgctgacatgatccttgaatatcttgagcatctgaaggcttgttctcattgttctccaggatgatgtgcttgagaatattgttgggcacgtccttcacaatgtgccacttaacagagaaggagccgttccacttgtcctgttgccaatactctagggttttctcaaaatcaacggcgccagtcatttcagcaacaccaacaaactgcccacttatccttactgagaagaacaagaatatagggcatgcagatccctttgactgagcttcttggtaagcagcatcaagcttcttgtttccgttggttgtgcttgcccacacattgtattttacgctcttgtggatgtcatcctcgctgtacgatttaatgacaaagaactttgcagcatcgtactgaacagggaagtcatctctattgtactttgctctatcaggcacagcactatcattcttgctttcactagaagggagagactgccctttcacagcaatagtgacagtatgaccgtacaatttctggttcttgaaccggccagatctaggacctctgtttaactcaattgttccatcctgactctcattgccataaccatagtatccactacatgccctgggcctgtacctgttatccataccattaccaagaccacatcgaccatatatcctggaatcataaccgttactcccgtagggaagaccagtttttactgaattcccatactgggtgtacggtcgggggctagggtacatcctattgggataggtaggagctgctgatgtagttgtaggtcttctattc

SEQ ID NO: 215083 - DNA, 1597 bp, Zea Mays
agctccaatctaacccactttcattcagatccattcaatgtaacgacgaacacagcagggtatactcggatcccagttacgcaacacacccacagggacagaccctggcattccgacactacgggagaaaagagtcttcggggctataagcaaactgaaacggggaacacaagaggaagagaaactagggaaaccgctaacaactagccaactgctctccatccagtagcgatgaggagatcgagcaacgcttatggggccatgctgccagttccacagcctgccttggttggtcaccagttcccttgcaccgcatcctggctatggagctctggttgcacgatcgagttaaccggtcttggcgactccgttggagaggacgggtttctctggtgctgtctgggccacctttgctgcataggaaacaacaggagcagtgatgccgttctctgcgggagccttcaccgccttcacctctgccgtgacaccatctggtacggacggattgggcttcccattagcaggttcctgcggtcgctcaccggtgacagaaacgggggtcctagtgtcccagacctggacgattcaagacagtcgaacccacaggtattatagacagggcaaggtgatgaaatctgcagttgacaaatataagccatgtatttggggctccaaacctacctgcttttggagctgctgctgtttcgacctcttatcctgcatcaacttctggcggctctcgtagaaggcaaagtcgtcgaggatggaagtcttgctgacatgatccttgaatatcttgagcatctgaaggccttgttcgaggcgtatctacattgttgtagaagaggatgatgtgcttgagaatattgttgggcacgtccttcacaatgtgccacttaacagagaaggagccgttccacttgtcctgttgccaatactctagggttttctcaaaatcaacggcgccagtcatttcagcaacaccaacaaactgcccacttatccttactgagaagaacaagaatatagggcatgcagatccctttgactgagcttcttggtaagcagcatcaagcttcttgtttccgttggttgtgcttgcccacacattgtattttacgctcttgtggatgtcatcctcgctgtacgatttaatgacaaagaactttgcagcatcgtactgaacagggaagtcatctctattgtactttgctctatcaggcacagcactatcattcttgctttcactagaagggagagactgccctttcacagcaatagtgacagtatgaccgtacaatttctggttcttgaaccggccagatctaggacctctgtttaactcaattgttccatcctgactctcattgccataaccatagtatccactacatgccctgggcctgtacctgttatccataccattaccaagaccacatcgaccatatatcctggaatcataaccgttactcccgtagggaagaccagtttttactgaattcccatactgggtgtacggtcgggggctagggtacatcctattgggataggtaggagctgctgatgtagttgtaggtcttctattctgcataccctg

SEQ ID NO: 215084 - DNA, 3877 bp, Zea Mays
ttcctcagaggagagagagagagagcaaaagagagaggcagtaggcaacgcccccacagaggcagagagaaagccagaggcagtagtaggcagagcacataaccaaacaacacccatccaaaaaccccaaaaggaagagagaaaggagtgagaaaaccacgcagtcgtttgtccagacaaaacaagaacaagaacccagcagcagtaatttctcgcgagcgcattcagcacagcaggttactattggctgctcgtccacttaagcaggttgaggtatccatttggttcgacacagtgaagaactgaagatacgcattgtgcttgcttgtcttgcggggctcacaaacatcctgctggtgtgctgtgctgggaaggtcacataatccacttggctatatgccggggtgggaatgtgaatcggggcttcattagtgcaggcagcaggcttgttaacttgttttgcaacaagcatgggggcaaaagttgaaggggaaagctatatgcctggatattatgccacaggggatctcaacgtggaagcaagtggtaggtggtctccatactatgaggagatgacatcaaatggccagttatgcaatggcttcgcaacaaaaccaacaagtggttattcagaatttgacaaagaaatactcaagcatcaaattcttgaacatgaagctgtgttcagacaacaggtgtatgaactgcaccgagtttacaaaatacagaaggatatgatgaaacaacatcaaagaaaagaggtatattcatacccaactttggcaggtgcatcacatactaattcaccatcacaagtgccaccaaacggtgcaaagatgatgtggcagatgccagttcctcctgtgtctacaacatacaggaaagctattggagagcataatgatacaaaccagtcctgcatgaagttccttagagaaggcagtgtgcagtcttctccaaatggatttctatcaagtgatgctgctccaagaaccagacaaggcacttttgaccttcaacttccagccgatcattatatagatgacgatgacacatcagataacaagcccatagatttccttggtttggcatcagatgcaaaaccccagaatgatgctgagcttacattagttagtgcagaacgcttgggcaagttcagtgataatagttcatcctcaggtttgcggactacaaataatcttggaagccgacaagttaccaacctgaatgaatcaaatactggcttctttatgggtagagcaaatggatctgtttccagaggccttccgcataccctcgagaactcgtggcaccaaccgatattgagatcaagcacaactactttcaatttcagtaaagaatactccaaagaaaagcacacaaatgaaggtacaagctcaaatttttttgacacaagtgcgaaactaacacatgacgacaagccaacaatcaataaaggtaaacaagtcagcagtataacttttttagcacccagatataatgatgctgatcccccaaaatacttcaaagctgctgatgggaggcctgccagttataaccaatttctttaccaaggtcagaatagttcagctggatggattgcacgaagtcctctggaaccttctgttatcaataattttgctagagttgaccgtccacatcattcgaatctgggtacatttactgtccccatctctattcctcaaatagacaatccttcaattgtctccccgatgggttcttgcacagcagacccaaggagcagcattgtcaacaatcctgctttaattccaagattcaatgggtcgtcaaccgtgaattcgtacgccagtcttagtgctgtgacacagagcattggaacttcaatcccaaagctgaaaaatgtggataacttagataaacgctatcctggttttccacttgattcgttttctgtgtcccactcacgacatcaggtagcaatttcaagtaacctggagcaaaagaactcccagaagtttgaagattcagatcaacagtcccatggcaagggtatgaagaacttcaatttgaatgagacactgtcagattgtcaggaagatggtcttgtagaacaagatgggagatgtgctgccagttttcagcatggtaaagacggagggtcagtattcgggatctcttggctcaaaaataaagctgtgtctgctgatccaacagctttggagaaggcagggaagatttttggccattcgtttggaactacaatggagctgaaaaatgctaaagaccagaacgaaccagctgtgactattcgaaatttgtcagactctgcttcgacatctcttggctgtggaattaagaaggatgggccttcagaagacattgccactggaactttgctggtttgtaataaagcccaagaggacgctacatgtttacccctttcatgccagaaacatgtgcctaaagatggacaagatgctgatggagtcatcaagataagtggtgcctccatcaggaatttcatcgatctcaatgatgctgtgccaaacgatgacaattctgaagaatcagtagtgtcacatgaatgccaggcggaaccttcacggaacaaccatcctaaacgagcatttgtgattgatctagaggtgccggcttgtgaagaggatgctgcttgggattttgatcaagaatgtgcacagcctaaacctgatgcacaccaggaagttgacggcagatctgatacatctgctctagctgcagctgagaacatcgtagcgttgtcaaggattattccaacagctctagaggcatctgatgatatgttgcagtggtttgcagatctcgctgtattgaacatcaaggaccttgctgagcaagctgaactccaagcttgtaccaatgattccagtaacgacgagtcagattcattcgaatccttgacactgaagctggaagagaccaagattgatgagtactggagcaggccactggaacctgaaatcacaaccgatgaacaattaatttcaactgctcaccttctcaccaagcccagaaggggccagcaaaggaggcgacggcagaagcgggatttccagaaagatatcttgcctggcctttcgtcactttcccggcctgaaatcatagaggatgtccagttgcttgaggggttagtccaggcttctggtggatcctgggagtcgagtttaactaggcgaggacgttatggtgggcggactcgaggtaggaaacctcggaaaactgtagtaactgtaattgtagaagaggaggtcgaggttagcccaccgccgaaacctgttggcactggcgacctcgaagccgatggtaggggtatggttggatggggcagaacaacaaggcggtgtcgcagagcgagatgtccgtcaggtaacaacttggctgctgcgtcttgagaaagggtattgccagcaagcattggacctgattaggtacttggtggttcacaattgttatagactccgatggatggactggtataaggtgatcacagtcatgagtgtacatactctgtcggcgtattggcctcaccccaactttcatgcttttgggttgaaacatggtttacgttcttataataagttccgtaaattagctggtaagacatttctgcgacagcattgtattaagctgttccaggttatgaggtccggtataaattcattgtgagaaaaaaaactgcaatgcctgtaaaccaccttgatctctgaagattagctcatcgcatgcgcaacaaagggtgtgaaagacttcgggtctgtattcttttttagcttatatatgctctgcctaattggctagtacatattcagtatccgaaatgcccatttatttttgtttagatactgattggaagcac

SEQ ID NO: 215085 - DNA, 4090 bp, Zea Mays
ggcagagcacataaccaaacaacacccatccaaaaaccccaaaaggaagagagaaaggagtgagaaaaccacgcagtcgtttgtccagacaaaacaagaacaagaacccagcagcagtacgcacttcctcctcctcctcctcctctctctctcgctctctctcctcttgctctcgctccctctcgctcccccagtccgcctccctggcccatcagatccaattccttccccgacccccatcccggatccgccgcaattcctccgtgcgtcgagctcgattgctccccgcccgtggaatttgctcctttctcccgcaagaatcccacctcggccggcgacttggggggacctgccaaggtttgggcgcgcgctcctgcttggcgtagcgggccatgggcgtgctgttgccagctaggctgttcgtgcgccggatgctcagggttgtcaggctcaacccgttgcagcgcagcgccaagagtggatgaggtaatttctcgcgagcgcattcagcacagcaggttactattggctgctcgtccacttaagcaggttgaggtatccatttggttcgacacagtgaagaactgaagatacgcattgtgcttgcttgtcttgcggggctcacaaacatcctgctggtgtgctgtgctgggaaggtcacataatccacttggctatatgccggggtgggaatgtgaatcggggcttcattagtgcaggcagcaggcttgttaacttgttttgcaacaagcatgggggcaaaagttgaaggggaaagctatatgcctggatattatgccacaggggatctcaacgtggaagcaagtggtaggtggtctccatactatgaggagatgacatcaaatggccagttatgcaatggcttcgcaacaaaaccaacaagtggttattcagaatttgacaaagaaatactcaagcatcaaattcttgaacatgaagctgtgttcagacaacaggtgtatgaactgcaccgagtttacaaaatacagaaggatatgatgaaacaacatcaaagaaaagaggtatattcatacccaactttggcaggtgcatcacatactaattcaccatcacaagtgccaccaaacggtgcaaagatgatgtggcagatgccagttcctcctgtgtctacaacatacaggaaagctattggagagcataatgatacaaaccagtcctgcatgaagttccttagagaaggcagtgtgcagtcttctccaaatggatttctatcaagtgatgctgctccaagaaccagacaaggcacttttgaccttcaacttccagccgatcattatatagatgacgatgacacatcagataacaagcccatagatttccttggtttggcatcagatgcaaaaccccagaatgatgctgagcttacattagttagtgcagaacgcttgggcaagttcagtgataatagttcatcctcaggtttgcggactacaaataatcttggaagccgacaagttaccaacctgaatgaatcaaatactggcttctttatgggtagagcaaatggatctgtttccagaggccttccgcataccctcgagaactcgtggcaccaaccgatattgagatcaagcacaactactttcaatttcagtaaagaatactccaaagaaaagcacacaaatgaaggtaaacaagtcagcagtataacttttttagcacccagatataatgatgctgatcccccaaaatacttcaaagctgctgatgggaggcctgccagttataaccaatttctttaccaaggtcagaatagttcagctggatggattgcacgaagtcctctggaaccttctgttatcaataattttgctagagttgaccgtccacatcattcgaatctgggtacatttactgtccccatctctattcctcaaatagacaatccttcaattgtctccccgatgggttcttgcacagcagacccaaggagcagcattgtcaacaatcctgctttaattccaagattcaatgggtcgtcaaccgtgaattcgtacgccagtcttagtgctgtgacacagagcattggaacttcaatcccaaagctgaaaaatgtggataacttagataaacgctatcctggttttccacttgattcgttttctgtgtcccactcacgacatcaggtagcaatttcaagtaacctggagcaaaagaactcccagaagtttgaagattcagatcaacagtcccatggcaagggtatgaagaacttcaatttgaatgagacactgtcagattgtcaggaagatggtcttgtagaacaagatgggagatgtgctgccagttttcagcatggtaaagacggagggtcagtattcgggatctcttggctcaaaaataaagctgtgtctgctgatccaacagctttggagaaggcagggaagatttttggccattcgtttggaactacaatggagctgaaaaatgctaaagaccagaacgaaccagctgtgactattcgaaatttgtcagactctgcttcgacatctcttggctgtggaattaagaaggatgggccttcagaagacattgccactggaactttgctggtttgtaataaagcccaagaggacgctacatgtttacccctttcatgccagaaacatgtgcctaaagatggacaagatgctgatggagtcatcaagataagtggtgcctccatcaggaatttcatcgatctcaatgatgctgtgccaaacgatgacaattctgaagaatcagtagtgtcacatgaatgccaggcggaaccttcacggaacaaccatcctaaacgagcatttgtgattgatctagaggtgccggcttgtgaagaggatgctgcttgggattttgatcaagaatgtgcacagcctaaacctgatgcacaccaggaagttgacggcagatctgatacatctgctctagctgcagctgagaacatcgtagcgttgtcaaggattattccaacagctctagaggcatctgatgatatgttgcagtggtttgcagatctcgctgtattgaacatcaaggaccttgctgagcaagctgaactccaagcttgtaccaatgattccagtaacgacgagtcagattcattcgaatccttgacactgaagctggaagagaccaagattgatgagtactggagcaggccactggaacctgaaatcacaaccgatgaacaattaatttcaactgctcaccttctcaccaagcccagaaggggccagcaaaggaggcgacggcagaagcgggatttccagaaagatatcttgcctggcctttcgtcactttcccggcctgaaatcatagaggatgtccagttgcttgaggggttagtccaggcttctggtggatcctgggagtcgagtttaactaggcgaggacgttatggtgggcggactcgaggtaggaaacctcggaaaactgtagtaactgtaattgtagaagaggaggtcgaggttagcccaccgccgaaacctgttggcactggcgacctcgaagccgatggtaggggtatggttggatggggcagaacaacaaggcggtgtcgcagagcgagatgtccgtcaggtaacaacttggctgctgcgtcttgagaaagggtattgccagcaagcattggacctgattaggtacttggtggttcacaattgttatagactccgatggatggactggtataaggtgatcacagtcatgagtgtacatactctgtcggcgtattggcctcaccccaactttcatgcttttgggttgaaacatggtttacgttcttataataagttccgtaaattagctggtaagacatttctgcgacagcattgtattaagctgttccaggttatgaggtccggtataaattcattgtgagaaaaaaaactgcaatgcctgtaaaccaccttgatctctgaagattagctcatcgcatgcgcaacaaagggtgtgaaagacttcgggtctgtattcttttttagcttatatatgctctgcctaattggctagtacatattcagtatccgaaatgcccatttatttttgtttagatactgattggaagcac

SEQ ID NO: 215086 - DNA, 3803 bp, Zea Mays
gtcgtttgtccagacaaaacaagaacaagaacccagcagcagtacgcacttcctcctcctcctcctcctctctctctcgctctctctcctcttgctctcgctccctctcgctcccccagtccgcctccctggcccatcagatccaattccttccccgacccccatcccggatccgccgcaattcctccgtgcgtcgagctcgattgctccccgcccgtggaatttgctcctttctcccgcaagaatcccacctcggccggcgacttggggggacctgccaaggtttgggcgcgcgctcctgcttggcgtagcgggccatgggcgtgctgttgccagctaggctgttcgtgcgccggatgctcagggttgtcaggctcaacccgttgcagcgcagcgccaagagtggatgaggtaatttctcgcgagcgcattcagcacagcaggttactattggctgctcgtccacttaagcaggttgaggtatccatttggttcgacacagtgaagaactgaagatacgcattgtgcttgcttgtcttgcggggctcacaaacatcctgctggtgtgctgtgctgggaaggtcacataatccacttggctatatgccggggtgggaatgtgaatcggggcttcattagtgcaggcagcaggcttgttaacttgttttgcaacaagcatgggggcaaaagttgaaggggaaagctatatgcctggatattatgccacaggggatctcaacgtggaagcaagtggtaggtggtctccatactatgaggagatgacatcaaatggccagttatgcaatggcttcgcaacaaaaccaacaagtggttattcagaatttgacaaagaaatactcaagcatcaaattcttgaacatgaagctgtgttcagacaacaggtgtatgaactgcaccgagtttacaaaatacagaaggatatgatgaaacaacatcaaagaaaagaggtatattcatacccaactttggcaggtgcatcacatactaattcaccatcacaagtgccaccaaacggtgcaaagatgatgtggcagatgccagttcctcctgtgtctacaacatacaggaaagctattggagagcataatgatacaaaccagtcctgcatgaagttccttagagaaggcagtgtgcagtcttctccaaatggatttctatcaagtgatgctgctccaagaaccagacaaggcacttttgaccttcaacttccagccgatcattatatagatgacgatgacacatcagataacaagcccatagatttccttggtttggcatcagatgcaaaaccccagaatgatgctgagcttacattagttagtgcagaacgcttgggcaagttcagtgataatagttcatcctcaggtttgcggactacaaataatcttggaagccgacaagttaccaacctgaatgaatcaaatactggcttctttatgggtagagcaaatggatctgtttccagaggccttccgcataccctcgagaactcgtggcaccaaccgatattgagatcaagcacaactactttcaatttcagtaaagaatactccaaagaaaagcacacaaatgaaggtacaagctcaaatttttttgacacaagtgcgaaactaacacatgacgacaagccaacaatcaataaaggtaaacaagtcagcagtataacttttttagcacccagatataatgatgctgatcccccaaaatacttcaaagctgctgatgggaggcctgccagttataaccaatttctttaccaaggtcagaatagttcagctggatggattgcacgaagtcctctggaaccttctgttatcaataattttgctagagttgaccgtccacatcattcgaatctgggtagcaatttcaagtaacctggagcaaaagaactcccagaagtttgaagattcagatcaacagtcccatggcaagggtatgaagaacttcaatttgaatgagacactgtcagattgtcaggaagatggtcttgtagaacaagatgggagatgtgctgccagttttcagcatggtaaagacggagggtcagtattcgggatctcttggctcaaaaataaagctgtgtctgctgatccaacagctttggagaaggcagggaagatttttggccattcgtttggaactacaatggagctgaaaaatgctaaagaccagaacgaaccagctgtgactattcgaaatttgtcagactctgcttcgacatctcttggctgtggaattaagaaggatgggccttcagaagacattgccactggaactttgctggtttgtaataaagcccaagaggacgctacatgtttacccctttcatgccagaaacatgtgcctaaagatggacaagatgctgatggagtcatcaagataagtggtgcctccatcaggaatttcatcgatctcaatgatgctgtgccaaacgatgacaattctgaagaatcagtagtgtcacatgaatgccaggcggaaccttcacggaacaaccatcctaaacgagcatttgtgattgatctagaggtgccggcttgtgaagaggatgctgcttgggattttgatcaagaatgtgcacagcctaaacctgatgcacaccaggaagttgacggcagatctgatacatctgctctagctgcagctgagaacatcgtagcgttgtcaaggattattccaacagctctagaggcatctgatgatatgttgcagtggtttgcagatctcgctgtattgaacatcaaggaccttgctgagcaagctgaactccaagcttgtaccaatgattccagtaacgacgagtcagattcattcgaatccttgacactgaagctggaagagaccaagattgatgagtactggagcaggccactggaacctgaaatcacaaccgatgaacaattaatttcaactgctcaccttctcaccaagcccagaaggggccagcaaaggaggcgacggcagaagcgggatttccagaaagatatcttgcctggcctttcgtcactttcccggcctgaaatcatagaggatgtccagttgcttgaggggttagtccaggcttctggtggatcctgggagtcgagtttaactaggcgaggacgttatggtgggcggactcgaggtaggaaacctcggaaaactgtagtaactgtaattgtagaagaggaggtcgaggttagcccaccgccgaaacctgttggcactggcgacctcgaagccgatggtaggggtatggttggatggggcagaacaacaaggcggtgtcgcagagcgagatgtccgtcaggtaacaacttggctgctgcgtcttgagaaagggtattgccagcaagcattggacctgattaggtacttggtggttcacaattgttatagactccgatggatggactggtataaggtgatcacagtcatgagtgtacatactctgtcggcgtattggcctcaccccaactttcatgcttttgggttgaaacatggtttacgttcttataataagttccgtaaattagctggtaagacatttctgcgacagcattgtattaagctgttccaggttatgaggtccggtataaattcattgtgagaaaaaaaactgcaatgcctgtaaaccaccttgatctctgaagattagctcatcgcatgcgcaacaaagggtgtgaaagacttcgggtctgtattcttttttagcttatatatgctctgcctaattggctagtacatattcagtatccgaaatgcccatttatttttgtttagatactgattggaagcac

SEQ ID NO: 215087 - DNA, 3999 bp, Zea Mays
cgcacttcctcctcctcctcctcctctctctctcgctctctctcctcttgctctcgctccctctcgctcccccagtccgcctccctggcccatcagatccaattccttccccgacccccatcccggatccgccgcaattcctccgtgcgtcgagctcgattgctccccgcccgtggaatttgctcctttctcccgcaagaatcccacctcggccggcgacttggggggacctgccaaggtttgggcgcgcgctcctgcttggcgtagcgggccatgggcgtgctgttgccagctaggctgttcgtgcgccggatgctcagggttgtcaggctcaacccgttgcagcgcagcgccaagagtggatgaggtaatttctcgcgagcgcattcagcacagcaggttactattggctgctcgtccacttaagcaggttgaggtatccatttggttcgacacagtgaagaactgaagatacgcattgtgcttgcttgtcttgcggggctcacaaacatcctgctggtgtgctgtgctgggaaggtcacataatccacttggctatatgccggggtgggaatgtgaatcggggcttcattagtgcaggcagcaggcttgttaacttggggatctcaacgtggaagcaagtggtaggtggtctccatactatgaggagatgacatcaaatggccagttatgcaatggcttcgcaacaaaaccaacaagtggttattcagaatttgacaaagaaatactcaagcatcaaattcttgaacatgaagctgtgttcagacaacagcctcacaacccactcgctatccaggtgtatgaactgcaccgagtttacaaaatacagaaggatatgatgaaacaacatcaaagaaaagaggtatattcatacccaactttggcaggtgcatcacatactaattcaccatcacaagtgccaccaaacggtgcaaagatgatgtggcagatgccagttcctcctgtgtctacaacatacaggaaagctattggagagcataatgatacaaaccagtcctgcatgaagttccttagagaaggcagtgtgcagtcttctccaaatggatttctatcaagtgatgctgctccaagaaccagacaaggcacttttgaccttcaacttccagccgatcattatatagatgacgatgacacatcagataacaagcccatagatttccttggtttggcatcagatgcaaaaccccagaatgatgctgagcttacattagttagtgcagaacgcttgggcaagttcagtgataatagttcatcctcaggtttgcggactacaaataatcttggaagccgacaagttaccaacctgaatgaatcaaatactggcttctttatgggtagagcaaatggatctgtttccagaggccttccgcataccctcgagaactcgtggcaccaaccgatattgagatcaagcacaactactttcaatttcagtaaagaatactccaaagaaaagcacacaaatgaaggtacaagctcaaatttttttgacacaagtgcgaaactaacacatgacgacaagccaacaatcaataaaggtaaacaagtcagcagtataacttttttagcacccagatataatgatgctgatcccccaaaatacttcaaagctgctgatgggaggcctgccagttataaccaatttctttaccaaggtcagaatagttcagctggatggattgcacgaagtcctctggaaccttctgttatcaataattttgctagagttgaccgtccacatcattcgaatctgggtacatttactgtccccatctctattcctcaaatagacaatccttcaattgtctccccgatgggttcttgcacagcagacccaaggagcagcattgtcaacaatcctgctttaattccaagattcaatgggtcgtcaaccgtgaattcgtacgccagtcttagtgctgtgacacagagcattggaacttcaatcccaaagctgaaaaatgtggataacttagataaacgctatcctggttttccacttgattcgttttctgtgtcccactcacgacatcaggtagcaatttcaagtaacctggagcaaaagaactcccagaagtttgaagattcagatcaacagtcccatggcaagggtatgaagaacttcaatttgaatgagacactgtcagattgtcaggaagatggtcttgtagaacaagatgggagatgtgctgccagttttcagcatggtaaagacggagggtcagtattcgggatctcttggctcaaaaataaagctgtgtctgctgatccaacagctttggagaaggcagggaagatttttggccattcgtttggaactacaatggagctgaaaaatgctaaagaccagaacgaaccagctgtgactattcgaaatttgtcagactctgcttcgacatctcttggctgtggaattaagaaggatgggccttcagaagacattgccactggaactttgctggtttgtaataaagcccaagaggacgctacatgtttacccctttcatgccagaaacatgtgcctaaagatggacaagatgctgatggagtcatcaagataagtggtgcctccatcaggaatttcatcgatctcaatgatgctgtgccaaacgatgacaattctgaagaatcagtagtgtcacatgaatgccaggcggaaccttcacggaacaaccatcctaaacgagcatttgtgattgatctagaggtgccggcttgtgaagaggatgctgcttgggattttgatcaagaatgtgcacagcctaaacctgatgcacaccaggaagttgacggcagatctgatacatctgctctagctgcagctgagaacatcgtagcgttgtcaaggattattccaacagctctagaggcatctgatgatatgttgcagtggtttgcagatctcgctgtattgaacatcaaggaccttgctgagcaagctgaactccaagcttgtaccaatgattccagtaacgacgagtcagattcattcgaatccttgacactgaagctggaagagaccaagattgatgagtactggagcaggccactggaacctgaaatcacaaccgatgaacaattaatttcaactgctcaccttctcaccaagcccagaaggggccagcaaaggaggcgacggcagaagcgggatttccagaaagatatcttgcctggcctttcgtcactttcccggcctgaaatcatagaggatgtccagttgcttgaggggttagtccaggcttctggtggatcctgggagtcgagtttaactaggcgaggacgttatggtgggcggactcgaggtaggaaacctcggaaaactgtagtaactgtaattgtagaagaggaggtcgaggttagcccaccgccgaaacctgttggcactggcgacctcgaagccgatggtaggggtatggttggatggggcagaacaacaaggcggtgtcgcagagcgagatgtccgtcaggtaacaacttggctgctgcgtcttgagaaagggtattgccagcaagcattggacctgattaggtacttggtggttcacaattgttatagactccgatggatggactggtataaggtgatcacagtcatgagtgtacatactctgtcggcgtattggcctcaccccaactttcatgcttttgggttgaaacatggtttacgttcttataataagttccgtaaattagctggtaagacatttctgcgacagcattgtattaagctgttccaggttatgaggtccggtataaattcattgtgagaaaaaaaactgcaatgcctgtaaaccaccttgatctctgaagattagctcatcgcatgcgcaacaaagggtgtgaaagacttcgggtctgtattcttttttagcttatatatgctctgcctaattggctagtacatattcagtatccgaaatgcccatttatttttgtttagatactgattggaagcac

SEQ ID NO: 215088 - DNA, 3216 bp, Zea Mays
cggcaaaacccagcgggtttgtacccgttgccatctctactcctcgatgtcctacagctgaaaaaacaccttttggtgcaaaggttgttgttttaggaggtgatgctagacaaatactcccagttattgaaggtggtacacggtcgcagattatagatgctgcaataactagctctcctctatggaattctattattgtcttatacttgactgaaaatatgagattaaactcatcccatttggatcctacaagtaagaatgagattgcttcctttagcaaatggttgttggacataggtgacggcaaagtacccgcaagagcaagagacagtgaaaccgaaagatattggataaaaattccgcatgacattttactaacatctcaaaataatagtcttcaatgcattgttgactccgcgtatccagatataagagataggtatgcagagatacaatacttaaaagaacatgcaatactttctccaacaaatgaaattattgacacggtcaacgactttgttgtcactctaatacatggtgatccaaaggaatatcttagctgtgatagcatagtaaaaggaccagacaacaatgattcatatgacttattatatcctgttgaattcctcaattaagttactggcaacaatttcccgcaacatcaattaatactgaaaaaaggagtaccaattatgcttttgcgtaacattaaccaatctgaaggtctttgcaatcgaacgaggttaattattgttactctaggagatctgattattgaagccaagatcatgaccggaaaatataaagacaaaattgtgctgattccacgtgtatgtttaactttaaaaacaccaaggctaccattcactctagaaagaagacaatatcccattaaagtttgttacgccatgacaaataacaggagccaaggacaaactctgtccaatgttactgtgttcttgaaaaaacctattttcacacatggacaactatatgttgctttctctagagttacttcaaaaaaggactcagagtgctgattgaagatgatgatggaaaatcaatagatgaaacgaagaatattgtttaccaggaaatctttactcgatttccttcacattaaggaagttctataattgccgcccatgtatagaataatgtctatataagtgagttttatattccattttatatccaagacaagcctattatgtataatatatgcatctactgaagatggtttctatggcttacaacattcctacttcctttattacaggtacatttcattactctctcccccccttttccctccaattacatacaattttacactcttttaactcacttgaaaaaaatagtaaacctatctacatatacaaaattccatttgttttcatcgttttgtataatactatatattaactcatacatatatctcataaataaatttattataggatacttataaacaaaatgctaactacattttttatctgttccatgttacacagaatgcctaataaaccactttcagcattgactctacaagatcgagacatagaaattcaaatagaggtccacaggaaatgggaatttcgaggtgctattgacaatggacccatattacacatagacatgatcctgacggattgcataggcaatgctatccattgtcaaataccatcattcccagcagctaaaagaggtgatgaatttcaagtgggaaaaatatacaagatgtcccgctttccagtagctcgtgcaaaatcttcctacaaacctgttgatggtgatctcatgtttctaacaagttacgacaagattgatccaaatgaaccaaatgcaaggaacttccatgatgtcattagcattattacagaaatctctgcgattaaacctgtgggaaatgcacgcataccctcatcttacaatcgacatgttctaataaaaaacctcagtgatagcattctgaaaattactctatgggggaaacgtgcacaagaattttatttgaccaacacttatgacccacagaaacaaactcttgtcattgtcttatttgttggttgtttaccaaaagaattccaaggattgaatctgagaagataaacatagaattacccagccttgacggacaagaaattacacctccacaacttccacaacgagaacatcatgaccttaaatacatattacctctaaacccacatgatgtaccggatgaaggatatgaatgcacagtaaccattacaagtattcctgaaggcaagacttggtattatattgcttgcaatacttgcccaaacaaaccaagcattgatcctatcatccgtcaatgctccacatgtggatcaacaaaatactgcttcaggtacaagctcactttcaaggcatcagatggaactgcagaagctgaaatgtttgctttcgacactgttgcaaggacaattattgggaaaccatgtccaatggttgttgcatcattttccagatgcatcagctatcccacctgaaattacagcaatcgtttcacggaaatacacattcattgtagtgttcaacaaccaatcatacagatttctagaaaaagcattgctcataaaaggaattgtagcatcatatggaagaatgacatcactaccaagagttcaagaaaaacttgatgtgcaccttcctcccaatccagccaaaaacaaactgataacaacagctgctcaatctccctctacagtcatgtctagactttccacggcggactcaccaagtgtgagtcgaaagctaacctattctccagcaaaggataaacctgagacaaaccctcttgatgctgataaaaatagagctcctgcaacaacacttgaatcacctacaaaaaggatcaaacaagaccctaagaatcaacaagagtagacgttgtgtgcaacacagtaaggaatacttctgaacatcacgcccaaacttcaacaaacgaagcatattcctcactattttgtctataaatattatgtgtgccttcttctatgaagcaaaccttaccctcgatatgctatatataatatctatgtattgtcatgtaatataaccatctataaactcatcagttgctacaatatattctaagcaaaccttaccctcgatatgctatatataatatctatgtattgccatgtaatataaccatctataaactcatcagttgctacaacatattct

SEQ ID NO: 215089 - DNA, 3067 bp, Zea Mays
cggcaaaacccagcgggtttgtacccgttgccatctctactcctcgatgtcctacagctgaaaaaacaccttttggtgcaaaggttgttgttttaggaggtgatgctagacaaatactcccagttattgaaggtggtacacggtcgcagattatagatgctgcaataactagctctcctctatggaattctattattgtcttatacttgactgaaaatatgagattaaactcatcccatttggatcctacaagtaagaatgagattgcttcctttagcaaatggttgttggacataggtgacggcaaagtacccgcaagagcaagagacagtgaaaccgaaagatattggataaaaattccgcatgacattttactaacatctcaaaataatagtcttcaatgcattgttgactccgcgtatccagatataagagataggtatgcagagatacaatacttaaaagaacatgcaatactttctccaacaaatgaaattattgacacggtcaacgactttgttgtcactctaatacatggtgatccaaaggaatatcttagctgtgatagcatagtaaaaggaccagacaacaatgattcatatgacttattatatcctgttgaattcctcaattaagttactggcaacaatttcccgcaacatcaattaatactgaaaaaaggagtaccaattatgcttttgcgtaacattaaccaatctgaaggtctttgcaatcgaacgaggttaattattgttactctaggagatctgattattgaagccaagatcatgaccggaaaatataaagacaaaattgtgctgattccacgtgtatgtttaactttaaaaacaccaaggctaccattcactctagaaagaagacaatatcccattaaagtttgttacgccatgacaaataacaggagccaaggacaaactctgtccaatgttactgtgttcttgaaaaaacctattttcacacatggacaactatatgttgctttctctagagttacttcaaaaaaggactcagagtgctgattgaagatgatgatggaaaatcaatagatgaaacgaagaatattgtttaccaggaaatctttactcgatttccttcacattaaggaagttctataattgccgcccatgtatagaataatgtctatataagtgagttttatattccattttatatccaagacaagcctattatgtataatatatgcatctactgaagatggtttctatggcttacaacattcctacttcctttattacaggtacatttcattactctctcccccccttttccctccaattacatacaattttacactcttttaactcacttgaaaaaaatagtaaacctatctacatatacaaaattccatttgttttcatcgttttgtataatactatatattaactcatacatatatctcataaataaatttattataggatacttataaacaaaatgctaactacattttttatctgttccatgttacacagaatgcctaataaaccactttcagcattgactctacaagatcgagacatagaaattcaaatagaggtccacaggaaatgggaatttcgaggtgctattgacaatggacccatattacacatagacatgatcctgacggattgcataggcaatgctatccattgtcaaataccatcattcccagcagctaaaagaggtgatgaatttcaagtgggaaaaatatacaagatgtcccgctttccagtagctcgtgcaaaatcttcctacaaacctgttgatggtgatctcatgtttctaacaagttacgacaagattgatccaaatgaaccaaatgcaaggaacttccatggggaagtacttttaagtggtggtgcagcctaccattggtacttcaacccatcaattgaagaagctactgctttttacaacaagattgaatctgagaagataaacatagaattacccagccttgacggacaagaaattacacctccacaacttccacaacgagaacatcatgaccttaaatacatattacctctaaacccacatgatgtaccggatgaaggatatgaatgcacagtaaccattacaagtattcctgaaggcaagacttggtattatattgcttgcaatacttgcccaaacaaaccaagcattgatcctatcatccgtcaatgctccacatgtggatcaacaaaatactgcttcaggtacaagctcactttcaaggcatcagatggaactgcagaagctgaaatgtttgctttcgacactgttgcaaggacaattattgggaaaccatgtccaatggttgttgcatcattttccagatgcatcagctatcccacctgaaattacagcaatcgtttcacggaaatacacattcattgtagtgttcaacaaccaatcatacagatttctagaaaaagcattgctcataaaaggaattgtagcatcatatggaagaatgacatcactaccaagagttcaagaaaaacttgatgtgcaccttcctcccaatccagccaaaaacaaactgataacaacagctgctcaatctccctctacagtcatgtctagactttccacggcggactcaccaagtgtgagtcgaaagctaacctattctccagcaaaggataaacctgagacaaaccctcttgatgctgataaaaatagagctcctgcaacaacacttgaatcacctacaaaaaggatcaaacaagaccctaagaatcaacaagagtagacgttgtgtgcaacacagtaaggaatacttctgaacatcacgcccaaacttcaacaaacgaagcatattcctcactattttgtctataaatattatgtgtgccttcttctatgaagcaaaccttaccctcgatatgctatatataatatctatgtattgtcatgtaatataaccatctataaactcatcagttgctacaatatattctaagcaaaccttaccctcgatatgctatatataatatctatgtattgccatgtaatataaccatctataaactcatcagttgctacaacatattct

SEQ ID NO: 215090 - DNA, 3054 bp, Zea Mays
cggcaaaacccagcgggtttgtacccgttgccatctctactcctcgatgtcctacagctgaaaaaacaccttttggtgcaaaggttgttgttttaggaggtgatgctagacaaatactcccagttattgaaggtggtacacggtcgcagattatagatgctgcaataactagctctcctctatggaattctattattgtcttatacttgactgaaaatatgagattaaactcatcccatttggatcctacaagtaagaatgagattgcttcctttagcaaatggttgttggacataggtgacggcaaagtacccgcaagagcaagagacagtgaaaccgaaagatattggataaaaattccgcatgacattttactaacatctcaaaataatagtcttcaatgcattgttgactccgcgtatccagatataagagataggtatgcagagatacaatacttaaaagaacatgcaatactttctccaacaaatgaaattattgacacggtcaacgactttgttgtcactctaatacatggtgatccaaaggaatatcttagctgtgatagcatagtaaaaggaccagacaacaatgattcatatgacttattatatcctgttgaattcctcaattaagttactggcaacaatttcccgcaacatcaattaatactgaaaaaaggagtaccaattatgcttttgcgtaacattaaccaatctgaaggtctttgcaatcgaacgaggttaattattgttactctaggagatctgattattgaagccaagatcatgaccggaaaatataaagacaaaattgtgctgattccacgtgtatgtttaactttaaaaacaccaaggctaccattcactctagaaagaagacaatatcccattaaagtttgttacgccatgacaaataacaggagccaaggacaaactctgtccaatgttactgtgttcttgaaaaaacctattttcacacatggacaactatatgttgctttctctagagttacttcaaaaaaggactcagagtgctgattgaagatgatgatggaaaatcaatagatgaaacgaagaatattgtttaccaggaaatctttactcgatttccttcacattaaggaagttctataattgccgcccatgtatagaataatgtctatataagtgagttttatattccattttatatccaagacaagcctattatgtataatatatgcatctactgaagatggtttctatggcttacaacattcctacttcctttattacaggtacatttcattactctctcccccccttttccctccaattacatacaattttacactcttttaactcacttgaaaaaaatagtaaacctatctacatatacaaaattccatttgttttcatcgttttgtataatactatatattaactcatacatatatctcataaataaatttattataggatacttataaacaaaatgctaactacattttttatctgttccatgttacacagaatgcctaataaaccactttcagcattgactctacaagatcgagacatagaaattcaaatagaggtccacaggaaatgggaatttcgaggtgctattgacaatggacccatattacacatagacatgatcctgacggattgcataggcaatgctatccattgtcaaataccatcattcccagcagctaaaagaggtgatgaatttcaagtgggaaaaatatacaagatgtcccgctttccagtagctcgtgcaaaatcttcctacaaacctgttgatgtctaacaagttacgacaagattgatccaaatgaaccaaatgcaaggaacttccatggggaagtacttttaagtggtggtgcagcctaccattggtacttcaacccatcaattgaagaagctactgctttttacaacaagattgaatctgagaagataaacatagaattacccagccttgacggacaagaaattacacctccacaacttccacaacgagaacatcatgaccttaaatacatattacctctaaacccacatgatgtaccggatgaaggatatgaatgcacagtaaccattacaagtattcctgaaggcaagacttggtattatattgcttgcaatacttgcccaaacaaaccaagcattgatcctatcatccgtcaatgctccacatgtggatcaacaaaatactgcttcaggtacaagctcactttcaaggcatcagatggaactgcagaagctgaaatgtttgctttcgacactgttgcaaggacaattattgggaaaccatgtccaatggttgttgcatcattttccagatgcatcagctatcccacctgaaattacagcaatcgtttcacggaaatacacattcattgtagtgttcaacaaccaatcatacagatttctagaaaaagcattgctcataaaaggaattgtagcatcatatggaagaatgacatcactaccaagagttcaagaaaaacttgatgtgcaccttcctcccaatccagccaaaaacaaactgataacaacagctgctcaatctccctctacagtcatgtctagactttccacggcggactcaccaagtgtgagtcgaaagctaacctattctccagcaaaggataaacctgagacaaaccctcttgatgctgataaaaatagagctcctgcaacaacacttgaatcacctacaaaaaggatcaaacaagaccctaagaatcaacaagagtagacgttgtgtgcaacacagtaaggaatacttctgaacatcacgcccaaacttcaacaaacgaagcatattcctcactattttgtctataaatattatgtgtgccttcttctatgaagcaaaccttaccctcgatatgctatatataatatctatgtattgtcatgtaatataaccatctataaactcatcagttgctacaatatattctaagcaaaccttaccctcgatatgctatatataatatctatgtattgccatgtaatataaccatctataaactcatcagttgctacaacatattct

SEQ ID NO: 215091 - DNA, 3135 bp, Zea Mays
cggcaaaacccagcgggtttgtacccgttgccatctctactcctcgatgtcctacagctgaaaaaacaccttttggtgcaaaggttgttgttttaggaggtgatgctagacaaatactcccagttattgaaggtggtacacggtcgcagattatagatgctgcaataactagctctcctctatggaattctattattgtcttatacttgactgaaaatatgagattaaactcatcccatttggatcctacaagtaagaatgagattgcttcctttagcaaatggttgttggacataggtgacggcaaagtacccgcaagagcaagagacagtgaaaccgaaagatattggataaaaattccgcatgacattttactaacatctcaaaataatagtcttcaatgcattgttgactccgcgtatccagatataagagataggtatgcagagatacaatacttaaaagaacatgcaatactttctccaacaaatgaaattattgacacggtcaacgactttgttgtcactctaatacatggtgatccaaaggaatatcttagctgtgatagcatagtaaaaggaccagacaacaatgattcatatgacttattatatcctgttgaattcctcaattaagttactggcaacaatttcccgcaacatcaattaatactgaaaaaaggagtaccaattatgcttttgcgtaacattaaccaatctgaaggtctttgcaatcgaacgaggttaattattgttactctaggagatctgattattgaagccaagatcatgaccggaaaatataaagacaaaattgtgctgattccacgtgtatgtttaactttaaaaacaccaaggctaccattcactctagaaagaagacaatatcccattaaagtttgttacgccatgacaaataacaggagccaaggacaaactctgtccaatgttactgtgttcttgaaaaaacctattttcacacatggacaactatatgttgctttctctagagttacttcaaaaaaggactcagagtgctgattgaagatgatgatggaaaatcaatagatgaaacgaagaatattgtttaccaggaaatctttactcgatttccttcacattaaggaagttctataattgccgcccatgtatagaataatgtctatataagtgagttttatattccattttatatccaagacaagcctattatgtataatatatgcatctactgaagatggtttctatggcttacaacattcctacttcctttattacagaatgcctaataaaccactttcagcattgactctacaagatcgagacatagaaattcaaatagaggtccacaggaaatgggaatttcgaggtgctattgacaatggacccatattacacatagacatgatcctgacggattgcataggcaatgctatccattgtcaaataccatcattcccagcagctaaaagaggtgatgaatttcaagtgggaaaaatatacaagatgtcccgctttccagtagctcgtgcaaaatcttcctacaaacctgttgatggtgatctcatgttgtatgtgacaccatacacaacccttgaactttgtcataattcaccctcaagttttcctctctatgtttatagtctaacaagttacgacaagattgatccaaatgaaccaaatgcaaggaacttccatgatgtcattagcattattacagaaatctctgcgattaaacctgtgggaaatgcacgcataccctcatcttacaatcgacatgttctaataaaaaacctcagtgatagcattctgaaaattactctatgggggaaacgtgcacaagaattttatttgaccaacacttatgacccacagaaacaaactcttgtcattgtcttatttgttggttgtttaccaaaagaattccaaggggaagtacttttaagtggtggtgcagcctaccattggtacttcaacccatcaattgaagaagctactgctttttacaacaagattgaatctgagaagataaacatagaattacccagccttgacggacaagaaattacacctccacaacttccacaacgagaacatcatgaccttaaatacatattacctctaaacccacatgatgtaccggatgaaggatatgaatgcacagtaaccattacaagtattcctgaaggcaagacttggtattatattgcttgcaatacttgcccaaacaaaccaagcattgatcctatcatccgtcaatgctccacatgtggatcaacaaaatactgcttcaggtacaagctcactttcaaggcatcagatggaactgcagaagctgaaatgtttgctttcgacactgttgcaaggacaattattgggaaaccatgtccaatggttgttgcatcattttccagatgcatcagctatcccacctgaaattacagcaatcgtttcacggaaatacacattcattgtagtgttcaacaaccaatcatacagatttctagaaaaagcattgctcataaaaggaattgtagcatcatatggaagaatgacatcactaccaagagttcaagaaaaacttgatgtgcaccttcctcccaatccagccaaaaacaaactgataacaacagctgctcaatctccctctacagtcatgtctagactttccacggcggactcaccaagtgtgagtcgaaagctaacctattctccagcaaaggataaacctgagacaaaccctcttgatgctgataaaaatagagctcctgcaacaacacttgaatcacctacaaaaaggatcaaacaagaccctaagaatcaacaagagtagacgttgtgtgcaacacagtaaggaatacttctgaacatcacgcccaaacttcaacaaacgaagcatattcctcactattttgtctataaatattatgtgtgccttcttctatgaagcaaaccttaccctcgatatgctatatataatatctatgtattgtcatgtaatataaccatctataaactcatcagttgctacaatatattctaagcaaaccttaccctcgatatgctatatataatatctatgtattgccatgtaatataaccatctataaactcatcagttgctacaacatattct

SEQ ID NO: 215092 - DNA, 3116 bp, Zea Mays
cggcaaaacccagcgggtttgtacccgttgccatctctactcctcgatgtcctacagctgaaaaaacaccttttggtgcaaaggttgttgttttaggaggtgatgctagacaaatactcccagttattgaaggtggtacacggtcgcagattatagatgctgcaataactagctctcctctatggaattctattattgtcttatacttgactgaaaatatgagattaaactcatcccatttggatcctacaagtaagaatgagattgcttcctttagcaaatggttgttggacataggtgacggcaaagtacccgcaagagcaagagacagtgaaaccgaaagatattggataaaaattccgcatgacattttactaacatctcaaaataatagtcttcaatgcattgttgactccgcgtatccagatataagagataggtatgcagagatacaatacttaaaagaacatgcaatactttctccaacaaatgaaattattgacacggtcaacgactttgttgtcactctaatacatggtgatccaaaggaatatcttagctgtgatagcatagtaaaaggaccagacaacaatgattcatatgacttattatatcctgttgaattcctcaattaagttactggcaacaatttcccgcaacatcaattaatactgaaaaaaggagtaccaattatgcttttgcgtaacattaaccaatctgaaggtctttgcaatcgaacgaggttaattattgttactctaggagatctgattattgaagccaagatcatgaccggaaaatataaagacaaaattgtgctgattccacgtgtatgtttaactttaaaaacaccaaggctaccattcactctagaaagaagacaatatcccattaaagtttgttacgccatgacaaataacaggagccaaggacaaactctgtccaatgttactgtgttcttgaaaaaacctattttcacacatggacaactatatgttgctttctctagagttacttcaaaaaaggactcagagtgctgattgaagatgatgatggaaaatcaatagatgaaacgaagaatattgtttaccaggaaatctttactcgatttccttcacattaaggaagttctataattgccgcccatgtatagaataatgtctatataagtgagttttatattccattttatatccaagacaagcctattatgtataatatatgcatctactgaagatggtttctatggcttacaacattcctacttcctttattacaggtacatttcattactctctcccccccttttccctccaattacatacaattttacactcttttaactcacttgaaaaaaatagtaaacctatctacatatacaaaattccatttgttttcatcgttttgtataatactatatattaactcatacatatatctcataaataaatttattataggatacttataaacaaaatgctaactacattttttatctgttccatgttacacagaatgcctaataaaccactttcagcattgactctacaagatcgagacatagaaattcaaatagaggtccacaggaaatgggaatttcgaggtgctattgacaatggacccatattacacatagacatgatcctgacggattgcataggcaatgctatccattgtcaaataccatcattcccagcagctaaaagaggtgatgaatttcaagtgggaaaaatatacaagatgtcccgctttccagtagctcgtgcaaaatcttcctacaaacctgttgatggtgatctcatgtttctaacaagttacgacaagattgatccaaatgaaccaaatgcaaggaacttccatggtatagcattctgaaaattactctatgggggaaacgtgcacaagaattttatttgaccaacacttatgacccacagaaacaaactcttgtcattgtcttatttgttggttgtttaccaaaagaattccaaggattgaatctgagaagataaacatagaattacccagccttgacggacaagaaattacacctccacaacttccacaacgagaacatcatgaccttaaatacatattacctctaaacccacatgatgtaccggatgaaggatatgaatgcacagtaaccattacaagtattcctgaaggcaagacttggtattatattgcttgcaatacttgcccaaacaaaccaagcattgatcctatcatccgtcaatgctccacatgtggatcaacaaaatactgcttcaggtacaagctcactttcaaggcatcagatggaactgcagaagctgaaatgtttgctttcgacactgttgcaaggacaattattgggaaaccatgtccaatggttgttgcatcattttccagatgcatcagctatcccacctgaaattacagcaatcgtttcacggaaatacacattcattgtagtgttcaacaaccaatcatacagatttctagaaaaagcattgctcataaaaggaattgtagcatcatatggaagaatgacatcactaccaagagttcaagaaaaacttgatgtgcaccttcctcccaatccagccaaaaacaaactgataacaacagctgctcaatctccctctacagtcatgtctagactttccacggcggactcaccaagtgtgagtcgaaagctaacctattctccagcaaaggataaacctgagacaaaccctcttgatgctgataaaaatagagctcctgcaacaacacttgaatcacctacaaaaaggatcaaacaagaccctaagaatcaacaagagtagacgttgtgtgcaacacagtaaggaatacttctgaacatcacgcccaaacttcaacaaacgaagcatattcctcactattttgtctataaatattatgtgtgccttcttctatgaagcaaaccttaccctcgatatgctatatataatatctatgtattgtcatgtaatataaccatctataaactcatcagttgctacaatatattctaagcaaaccttaccctcgatatgctatatataatatctatgtattgccatgtaatataaccatctataaactcatcagttgctacaacatattct

SEQ ID NO: 215093 - DNA, 3011 bp, Zea Mays
cggcaaaacccagcgggtttgtacccgttgccatctctactcctcgatgtcctacagctgaaaaaacaccttttggtgcaaaggttgttgttttaggaggtgatgctagacaaatactcccagttattgaaggtggtacacggtcgcagattatagatgctgcaataactagctctcctctatggaattctattattgtcttatacttgactgaaaatatgagattaaactcatcccatttggatcctacaagtaagaatgagattgcttcctttagcaaatggttgttggacataggtgacggcaaagtacccgcaagagcaagagacagtgaaaccgaaagatattggataaaaattccgcatgacattttactaacatctcaaaataatagtcttcaatgcattgttgactccgcgtatccagatataagagataggtatgcagagatacaatacttaaaagaacatgcaatactttctccaacaaatgaaattattgacacggtcaacgactttgttgtcactctaatacatggtgatccaaaggaatatcttagctgtgatagcatagtaaaaggaccagacaacaatgattcatatgacttattatatcctgttgaattcctcaattaagttactggcaacaatttcccgcaacatcaattaatactgaaaaaaggagtaccaattatgcttttgcgtaacattaaccaatctgaaggtctttgcaatcgaacgaggttaattattgttactctaggagatctgattattgaagccaagatcatgaccggaaaatataaagacaaaattgtgctgattccacgtgtatgtttaactttaaaaacaccaaggctaccattcactctagaaagaagacaatatcccattaaagtttgttacgccatgacaaataacaggagccaaggacaaactctgtccaatgttactgtgttcttgaaaaaacctattttcacacatggacaactatatgttgctttctctagagttacttcaaaaaaggactcagagtgctgattgaagatgatgatggaaaatcaatagatgaaacgaagaatattgtttaccaggaaatctttactcgatttccttcacattaaggaagttctataattgccgcccatgtatagaataatgtctatataagtgagttttatattccattttatatccaagacaagcctattatgtataatatatgcatctactgaagatggtttctatggcttacaacattcctacttcctttattacaggtacatttcattactctctcccccccttttccctccaattacatacaattttacactcttttaactcacttgaaaaaaatagtaaacctatctacatatacaaaattccatttgttttcatcgttttgtataatactatatattaactcatacatatatctcataaataaatttattataggatacttataaacaaaatgctaactacattttttatctgttccatgttacacagaatgcctaataaaccactttcagcattgactctacaagatcgagacatagaaattcaaatagaggtccacaggaaatgggaatttcgaggtgctattgacaatggacccatattacacatagacatgatcctgacggattgcataggcaatgctatccattgtcaaataccatcattcccagcagctaaaagaggtgatgaatttcaagtgggaaaaatatacaagatgtcccgctttccagtagctcgtgcaaaatcttcctacaaacctgttgatggtgatctcatgttgggaagtacttttaagtggtggtgcagcctaccattggtacttcaacccatcaattgaagaagctactgctttttacaacaagattgaatctgagaagataaacatagaattacccagccttgacggacaagaaattacacctccacaacttccacaacgagaacatcatgaccttaaatacatattacctctaaacccacatgatgtaccggatgaaggatatgaatgcacagtaaccattacaagtattcctgaaggcaagacttggtattatattgcttgcaatacttgcccaaacaaaccaagcattgatcctatcatccgtcaatgctccacatgtggatcaacaaaatactgcttcaggtacaagctcactttcaaggcatcagatggaactgcagaagctgaaatgtttgctttcgacactgttgcaaggacaattattgggaaaccatgtccaatggttgttgcatcattttccagatgcatcagctatcccacctgaaattacagcaatcgtttcacggaaatacacattcattgtagtgttcaacaaccaatcatacagatttctagaaaaagcattgctcataaaaggaattgtagcatcatatggaagaatgacatcactaccaagagttcaagaaaaacttgatgtgcaccttcctcccaatccagccaaaaacaaactgataacaacagctgctcaatctccctctacagtcatgtctagactttccacggcggactcaccaagtgtgagtcgaaagctaacctattctccagcaaaggataaacctgagacaaaccctcttgatgctgataaaaatagagctcctgcaacaacacttgaatcacctacaaaaaggatcaaacaagaccctaagaatcaacaagagtagacgttgtgtgcaacacagtaaggaatacttctgaacatcacgcccaaacttcaacaaacgaagcatattcctcactattttgtctataaatattatgtgtgccttcttctatgaagcaaaccttaccctcgatatgctatatataatatctatgtattgtcatgtaatataaccatctataaactcatcagttgctacaatatattctaagcaaaccttaccctcgatatgctatatataatatctatgtattgccatgtaatataaccatctataaactcatcagttgctacaacatattct

SEQ ID NO: 215094 - DNA, 2519 bp, Zea Mays
agagaagtagacgtcacattcaacgagtactccgcagtcatcggacgccatcggctccccaagtcccccaccgtccgctgttcttcagggataacactttcattgaaagccaggttcagggagctaatatttgcgagttcatccataaaaagaagagctcagacggttgaatatcgaccatcaacaaaggtaatgtattatctgcttattccccactgtactaacgtcttcctggtctaatcaatgcaataaatgttttgctcactattatcatgaatttagattcattcacataatttataatgatatttagatctccccatctttttttgttgattatgctttccccatatgtctacatttttcaatcgcatagtgtttcatccatgcgcaaactaacatataatacctcgactaaatgttataggacgagtaattgtccagtcatataaaacttaatttaccaaatgagtgattcttcagcaacaaaggaaatggatgtcaatgatgaagcagatcctcctacttctattgtggcttctcatgtaactgatacttgggctttaactcctcggagaaagatttcttatgtgaccacgtaaatgctgcacttgcacgacaacaacgtaaaagagcgttggaacaacatcaattagtcactcaaggtaccaaagaatacatgataattacaatgcctaacaacgttaatacttggtctgctgtctctgacaatacaataacctaggtcctaccaaaagtatcagaacatcaatgacatgtggttattttcctgaagaatacatagctgcgcttaaagaatgcctaataaaccactttcagcattgactctacaagatcgagacatagaaattcaaatagaggtccacaggaaatgggaatttcgaggtgctattgacaatggacccatattacacatagacatgatcctgacggattgcataggcaatgctatccattgtcaaataccatcattcccagcagctaaaagaggtgatgaatttcaagtgggaaaaatatacaagatgtcccgctttccagtagctcgtgcaaaatcttcctacaaacctgttgatggtgatctcatgtttctaacaagttacgacaagattgatccaaatgaaccaaatgcaaggaacttccatgatgtcattagcattattacagaaatctctgcgattaaacctgtgggaaatgcacgcataccctcatcttacaatcgacatgttctaataaaaaacctcagtgatagcattctgaaaattactctatgggggaaacgtgcacaagaattttatttgaccaacacttatgacccacagaaacaaactcttgtcattgtcttatttgttggttgtttaccaaaagaattccaaggattgaatctgagaagataaacatagaattacccagccttgacggacaagaaattacacctccacaacttccacaacgagaacatcatgaccttaaatacatattacctctaaacccacatgatgtaccggatgaaggatatgaatgcacagtaaccattacaagtattcctgaaggcaagacttggtattatattgcttgcaatacttgcccaaacaaaccaagcattgatcctatcatccgtcaatgctccacatgtggatcaacaaaatactgcttcaggtacaagctcactttcaaggcatcagatggaactgcagaagctgaaatgtttgctttcgacactgttgcaaggacaattattgggaaaccatgtccaatggttgttgcatcattttccagatgcatcagctatcccacctgaaattacagcaatcgtttcacggaaatacacattcattgtagtgttcaacaaccaatcatacagatttctagaaaaagcattgctcataaaaggaattgtagcatcatatggaagaatgacatcactaccaagagttcaagaaaaacttgatgtgcaccttcctcccaatccagccaaaaacaaactgataacaacagctgctcaatctccctctacagtcatgtctagactttccacggcggactcaccaagtgtgagtcgaaagctaacctattctccagcaaaggataaacctgagacaaaccctcttgatgctgataaaaatagagctcctgcaacaacacttgaatcacctacaaaaaggatcaaacaagaccctaagaatcaacaagagtagacgttgtgtgcaacacagtaaggaatacttctgaacatcacgcccaaacttcaacaaacgaagcatattcctcactattttgtctataaatattatgtgtgccttcttctatgaagcaaaccttaccctcgatatgctatatataatatctatgtattgtcatgtaatataaccatctataaactcatcagttgctacaatatattctaagcaaaccttaccctcgatatgctatatataatatctatgtattgccatgtaatataaccatctataaactcatcagttgctacaacatattct

SEQ ID NO: 215095 - DNA, 2558 bp, Zea Mays
ggtacatccagagtcttctacggagtgaataaaataaagagaagtagacgtcacattcaacgagtactccgcagtcatcggacgccatcggctccccaagtcccccaccgtccgctgttcttcagggataacactttcattgaaagccaggttcagggagctaatatttgcgagttcatccataaaaagaagagctcagacggttgaatatcgaccatcaacaaaggtaatgtattatctgcttattccccactgtactaacgtcttcctggtctaatcaatgcaataaatgttttgctcactattatcatgaatttagattcattcacataatttataatgatatttagatctccccatctttttttgttgattatgctttccccatatgtctacatttttcaatcgcatagtgtttcatccatgcgcaaactaacatataatacctcgactaaatgttataggacgagtaattgtccagtcatataaaacttaatttaccaaatgagtgattcttcagcaacaaaggaaatggatgtcaatgatgaagcagatcctcctacttctattgtggcttctcatgtaactgatacttgggctttaactcctcggagaaagatttcttatgtgaccacgtaaatgctgcacttgcacgacaacaacgtaaaagagcgttggaacaacatcaattagtcactcaaggtcctaccaaaagtatcagaacatcaatgacatgtggttattttcctgaagaatacatagctgcgcttaaagaatgcctaataaaccactttcagcattgactctacaagatcgagacatagaaattcaaatagaggtccacaggaaatgggaatttcgaggtgctattgacaatggacccatattacacatagacatgatcctgacggattgcataggcaatgctatccattgtcaaataccatcattcccagcagctaaaagaggtgatgaatttcaagtgggaaaaatatacaagatgtcccgctttccagtagctcgtgcaaaatcttcctacaaacctgttgatggtgatctcatgtttctaacaagttacgacaagattgatccaaatgaaccaaatgcaaggaacttccatgatgtcattagcattattacagaaatctctgcgattaaacctgtgggaaatgcacgcataccctcatcttacaatcgacatgttctaataaaaaacctcagtgatagcattctgaaaattactctatgggggaaacgtgcacaagaattttatttgaccaacacttatgacccacagaaacaaactcttgtcattgtcttatttgttggttgtttaccaaaagaattccaaggggaagtacttttaagtggtggtgcagcctaccattggtacttcaacccatcaattgaagaagctactgctttttacaacaagattgaatctgagaagataaacatagaattacccagccttgacggacaagaaattacacctccacaacttccacaacgagaacatcatgaccttaaatacatattacctctaaacccacatgatgtaccggatgaaggatatgaatgcacagtaaccattacaagtattcctgaaggcaagacttggtattatattgcttgcaatacttgcccaaacaaaccaagcattgatcctatcatccgtcaatgctccacatgtggatcaacaaaatactgcttcaggtacaagctcactttcaaggcatcagatggaactgcagaagctgaaatgtttgctttcgacactgttgcaaggacaattattgggaaaccatgtccaatggttgttgcatcattttccagatgcatcagctatcccacctgaaattacagcaatcgtttcacggaaatacacattcattgtagtgttcaacaaccaatcatacagatttctagaaaaagcattgctcataaaaggaattgtagcatcatatggaagaatgacatcactaccaagagttcaagaaaaacttgatgtgcaccttcctcccaatccagccaaaaacaaactgataacaacagctgctcaatctccctctacagtcatgtctagactttccacggcggactcaccaagtgtgagtcgaaagctaacctattctccagcaaaggataaacctgagacaaaccctcttgatgctgataaaaatagagctcctgcaacaacacttgaatcacctacaaaaaggatcaaacaagaccctaagaatcaacaagagtagacgttgtgtgcaacacagtaaggaatacttctgaacatcacgcccaaacttcaacaaacgaagcatattcctcactattttgtctataaatattatgtgtgccttcttctatgaagcaaaccttaccctcgatatgctatatataatatctatgtattgtcatgtaatataaccatctataaactcatcagttgctacaatatattctaagcaaaccttaccctcgatatgctatatataatatctatgtattgccatgtaatataaccatctataaactcatcagttgctacaacatattct

SEQ ID NO: 215096 - DNA, 2315 bp, Zea Mays
aattgggtacatccagagtcttctacggagtgaataaaataaagagaagtagacgtcacattcaacgagtactccgcagtcatcggacgccatcggctccccaagtcccccaccgtccgctgttcttcagggataacactttcattgaaagccaggttcagggagctaatatttgcgagttcatccataaaaagaagagctcagacggttgaatatcgaccatcaacaaagaatgcctaataaaccactttcagcattgactctacaagatcgagacatagaaattcaaatagaggtccacaggaaatgggaatttcgaggtgctattgacaatggacccatattacacatagacatgatcctgacggattgcataggcaatgctatccattgtcaaataccatcattcccagcagctaaaagaggtgatgaatttcaagtgggaaaaatatacaagatgtcccgctttccagtagctcgtgcaaaatcttcctacaaacctgttgatggtgatctcatgttgtatgtgacaccatacacaacccttgaactttgtcataattcaccctcaagttttcctctctatgtttatagtctaacaagttacgacaagattgatccaaatgaaccaaatgcaaggaacttccatggtatgtttcctaaatatgacataaaatcctattctcataattatccaagcgctcacgtgatctaatcctggttttgctattgtatgaaacattagatgtcattagcattattacagaaatctctgcgattaaacctgtgggaaatgcacgcataccctcatcttacaatcgacatgttctaataaaaaacctcaggtcactgctatgcaacatactacatatttattatcttattttaccgtttttatattaatacttgatccaccattgttgaaaaatgcattaacacatatttagtacttattttgaaactgtctaacagtgatagcattctgaaaattactctatgggggaaacgtgcacaagaattttatttgaccaacacttatgacccacagaaacaaactcttgtcattgtcttatttgttggttgtttaccaaaagaattccaagatataggggaagtacttttaagtggtggtgcagcctaccattggtacttcaacccatcaattgaagaagctactgctttttacaacaagattgaatctgagaagataaacatagaattacccagccttgacggacaagaaattacacctccacaacttccacaacgagaacatcatgaccttaaatacatattacctctaaacccacatgatgtaccggatgaaggatatgaatgcacagtaaccattacaagtattcctgaaggcaagacttggtattatattgcttgcaatacttgcccaaacaaaccaagcattgatcctatcatccgtcaatgctccacatgtggatcaacaaaatactgcttcaggtacaagctcactttcaaggcatcagatggaactgcagaagctgaaatgtttgctttcgacactgttgcaaggacaattattgggaaaccatgtccaatggttgttgcatcattttccagatgcatcagctatcccacctgaaattacagcaatcgtttcacggaaatacacattcattgtagtgttcaacaaccaatcatacagatttctagaaaaagcattgctcataaaaggaattgtagcatcatatggaagaatgacatcactaccaagagttcaagaaaaacttgatgtgcaccttcctcccaatccagccaaaaacaaactgataacaacagctgctcaatctccctctacagtcatgtctagactttccacggcggactcaccaagtgtgagtcgaaagctaacctattctccagcaaaggataaacctgagacaaaccctcttgatgctgataaaaatagagctcctgcaacaacacttgaatcacctacaaaaaggatcaaacaagaccctaagaatcaacaagagtagacgttgtgtgcaacacagtaaggaatacttctgaacatcacgcccaaacttcaacaaacgaagcatattcctcactattttgtctataaatattatgtgtgccttcttctatgaagcaaaccttaccctcgatatgctatatataatatctatgtattgtcatgtaatataaccatctataaactcatcagttgctacaatatattctaagcaaaccttaccctcgatatgctatatataatatctatgtattgccatgtaatataaccatctataaactcatcagttgctacaacatattct

SEQ ID NO: 215097 - DNA, 2155 bp, Zea Mays
ctcagtaaagtgatgtttgatgcaggttcccctcgtcctgctccacataaaagtaacagtacttctgcaccaagccatggatatcctggtagtactgcacctgcacctgtacgtttgcctccgccaaaaggaaagggagaaggaaattttgctcatgctccaaaccatcccaatcaataccattcaacgtcatattctccaggtcatcataaatcataatcattttggaaagtatgacgtgttgtatgttctctaccaaggccttcctccgtcaccaccggcagcaagcatgaacaatggtcttagcaatgtaaatggtccaagtttgcatccgcttgctgctgatgtgggaaattatagagaaagaaaaggcaggcacgttattataataattattctatcaagtgtgtgtgcttttattttatgtgctggagctgcactagtgctttatttcaagcttcgaaaccacatccatttaactgaagcgtcacttgtgccaacaaaacctacaggtcctgtttctgcaatggttgggaacaggctagaaagcagacctatttcggcatcaccatccttcagctcaagtttggtggcatataaaggatctgccaaaacatttaacctggttgagatggagagagctacactaggatttgatgagtccagaattattggtgagggtggttttgggcgtgtctatgaaggtattcttgaggatggagaacgggttgctatcaaggttttaaagcgggacgatcaacaaggtacccgggagtttttggctgaggtcgagatgcttagccgattgcatcataggaacttggttaagctgataggtatatgcacagaggggcatagccgatgtttggtttatgagcttgttccgaatggcagtgtggaatctcacttgcatggatcagataagggagctgctcagtttgattggaacgctaggctcaaaattgcacttggtgcagcacgcgcacttgcatatttgcatgaggattcaagtccacgtgtcatacaccgtgatttcaagtccagtaacatcttattggaacatgacttcaccccaaaggtgtcagactttggcttagcaaggacagctttgggtgagggaaacgagcatatttcaactcgtgtcatgggaacttttgggtatcttgctcctgaatatgcaatgactggccatcttctagtaaagagtgatgtttacagctacggtgttgttcttcttgagcttcttacagggaggaaaccggtagatatgttaagacctcctggacaggaaaacttagtggcatgggctggttctcttctgacaagcagggatggtctggaatcaatcatagatcattcacttgggcgcagcattccatttgacagcatcgcaaaagtagcagccattgcttctatgtgtgttcagcctgaggtggaccagcgcccattcatgggtgaagtagttcaagctctaaagctggtatgcaatgaaggcggcgagttcaatgagtcaacctttagccaagatttgcatatccaagatgtcgaggttatgagtagagcaagtacggatgtagacgttgacccaacgctatctgctgagctgttcacttcatcagcgcgttatgatgctatagatgcccctggttctttccgaagatactcaagttcaggtcctctaagagtagggagaactggactgaacaaagagaggggcctgtcaacaggcagctcaagtgaacacgttgggctacagaggtttaggattgatggagaatagtcagcctgcaagcagctcatgatgatgtgcgcatggaagaaatacacattggattattttcttccaagccagatttcatactcatcgtgaatagtatgtggaaaattgagaaaggcgtaaaaatcagtgtgccactgttcggtgctcccgtcgccttctttggaaagctcaaacaagacttcacacgaatttttgtacagttctagagatgatagatgcttttaggaaagaaggggtgtacacgagtttttcagctgtaattccccacgaaccgtattacgtttcgccgtagcatcagtgcaaatcaattaaagggcgtgcacgcagtcaccattttgagttcaatgaaaaaaaattcatcctgattgaccgcaa

SEQ ID NO: 215098 - DNA, 1721 bp, Zea Mays
caggctgtcattaacaaggagaggagaggcgactacctagggaagaccgtccaggtagtgccgcacatcacggatgagatacaggactggatcgaacgcgtcgcggtggtcccagtggacggcaaggaagggcctcctgacgtctgcgtcatcgagctcgggggcactataggggacaaaatcttttcgccgcataacgacagtggcattcttgatgcaggggatatcgagtcaatgcctttcattgaagcgttaggtcaattctcgtaccgtgttggacctggaaacttctgtctcgttcatgtcagtcttgttccggttctaaatgtagtcggtgaacagaaaactaagcctacacagcacagtgttcgagggcttagagggcttgggttagcgccggatgttttagcatgtcgcagtactgagccattggaggaacatgtgaaggccaagctttcacagttttgccatgtcccggaccagaaggcccatgaagcgattctgaagggcgcagatggcgtactcgtccctggagggtttggggacaggggagtccagggcaaaatcctcgccgcgaaatacgcacgcgagaacaacgttccttatcttggcatctgcctgggaatgcaaatcgcggtgatcgagtttgcccgctcggtgatgaagctacgaggtgccaatagcacggagttcgatccagctacgacgtcaccctgtgtcatcttcatgccagagggctcaaaaacccaaatgggagccacgatgaggcttgggtcgaggaggacctatttccatgtcagtggctgcaaatctgcgaagctgtacggcaacgccagctctgtagatgaaagacatcgccacagatacgaggtgaaccctgacatggtcccagactttgagaaggccgggcttcagttcgtgggcaaagatgagagtgggaaacgcatggggatcgttgagcttccctctcacaagttcttcatcggtgcacagttccatcctgaattcaagtcgagaccagggaagccatctccgcttttcttagggctgatagccgcggcgtctgggcagctagaaccattgcttcagcgcagcaatccgacaacgaaagcatgttcgatcagtaaagtcccgaaactgaaactgtaccccactgggcctgtgaataatccactgaacagcttggtgaacgggtactacccaaatggcactgggatccacacctagaagcgtagcgcttagcgatggtttggttggtatttgctgctatggtttttttgcttgtacccctcctttttcatgtgttcctttttttcagtttgttatttgtctctgatcaactgagagaagagaaggctaagattcagcaagcccccagctccagcgacacatggttccgacatttttaacgaggaacgccttccagtccgttgaagcgagctagccatagggtggtgaggtctagtgtgatgttgttgttgtttttttctctttcctttttttttggcctggaactaaggcgcgaagtgttttgagtagcgctagtagagcctggaagaagttatctaaactatttgtacattatggaagaacttatctaaggactgaatacacaaatgcttggccatgattgctttgttgccacaatatgaacaaccacgctcagatgaagagtattggtgttgttaaaaaatgccagtgaaattgttgttgttaatgtt

SEQ ID NO: 215099 - DNA, 1803 bp, Zea Mays
cctcaacaccgatgctggaaccatgtcgccgttcgagcacggggaggttttcgttttggacgatggcggagaggtggacttggaccttggaaactacgaacgttttctggacatcaaattgacccgcgacaacaatataaccacgggaaagatcttccaggctgtcattaacaaggagaggagaggcgactacctagggaagaccgtccaggtagtgccgcacatcacggatgagatacaggactggatcgaacgcgtcgcggtggtcccagtggacggcaaggaagggcctcctgacgtctgcgtcatcgagctcgggggcactataggggacaaaatcttttcgccgcataacgacagtggcattcttgatgcaggggatatcgagtcaatgcctttcattgaagcgttaggtcaattctcgtaccgtgttggacctggaaacttctgtctcgttcatgtcagtcttgttccggttctaaatgtagtcggtgaacagaaaactaagcctacacagcacagtgttcgagggcttagagggcttgggttagcgccggatgttttagcatgtcgcagtactgagccattggaggaacatgtgaaggccaagctttcacagttttgccatgtcccggtctcaaatatagtgaacctccatgacgtgacaaacatctggcacatccccttgctgctaagggaccagaaggcccatgaagcgattctgaagggcgcagatggcgtactcgtccctggagggtttggggacaggggagtccagggcaaaatcctcgccgcgaaatacgcacgcgagaacaacgttccttatcttggcatctgcctgggaatgcaaatcgcggtgatcgagtttgcccgctcggtgatgaagctacgaggtgccaatagcacggagttcgatccagctacgacgtcaccctgtgtcatcttcatgccagagggctcaaaaacccaaatgggagccacgatgaggcttgggtcgaggaggacctatttccatgtcagtggctgcaaatctgcgaagctgtacggcaacgccagctctgtagatgaaagacatcgccacagatacgaggtgaaccctgacatggtcccagactttgagaaggccgggcttcagttcgtgggcaaagatgagagtgggaaacgcatggggatcgttgagcttccctctcacaagttcttcatcggtgcacagttccatcctgaattcaagtcgagaccagggaagccatctccgcttttcttagggctgatagccgcggcgtctgggcagctagaaccattgcttcagcgcagcaatccgacaacgaaagcatgttcgatcagtaaagtcccgaaactgaaactgtaccccactgggcctgtgaataatccactgaacagcttggtgaacgggtactacccaaatgagaagagaaggctaagattcagcaagcccccagctccagcgacacatggttccgacatttttaacgaggaacgccttccagtccgttgaagcgagctagccatagggtggtgaggtctagtgtgatgttgttgttgtttttttctctttcctttttttttggcctggaactaaggcgcgaagtgttttgagtagcgctagtagagcctggaagaagttatctaaactatttgtacattatggaagaacttatctaaggactgaatacacaaatgcttggccatgattgctttgttgccacaatatgaacaaccacgctcagatgaagagtattggtgttgttaaaaaatgccagtgaaattgttgttgttaatgtt

SEQ ID NO: 215100 - DNA, 2423 bp, Zea Mays
gggaggaagcgctgccgccaggcccgcccctgcctgccctgagggttctatttaacccccctcgtctccccctccgtttccagcctcaaactcttgccctccccccggcaccacactagcctagtgagaagtgcagcagcagcaccagcggcagaagtgttacttagttgctcctcctacctgtgctgctgcgcaggagcagagcctgaaaggacgacggccgtcggcgtaaggggagcgagcgagcgagcggccatgaagtacgtgctggtgaccggaggggtggtgagcgggctcggcaagggcgtgacggccagcagcatcggcgtcgtgctcaaggcctgcggcctccgcgtcaccaccatcaagatcgatccatacctcaacaccgatgctggaaccatgtcgccgttcgagcacggggaggttttcgttttggacgatggcggagaggtggacttggaccttggaaactacgaacgttttctggacatcaaattgacccgcgacaacaatataaccacgggaaagatcttccaggctgtcattaacaaggagaggagaggcgactacctagggaagaccgtccaggtagtgccgcacatcacggatgagatacaggactggatcgaacgcgtcgcggtggtcccagtggacggcaaggaagggcctcctgacgtctgcgtcatcgagctcgggggcactataggggatatcgagtcaatgcctttcattgaagcgttaggtcaattctcgtaccgtgttggacctggaaacttctgtctcgttcatgtcagtcttgttccggttctaaatgtagtcggtgaacagaaaactaagcctacacagcacagtgttcgagggcttagagggcttgggttagcgccggatgttttagcatgtcgcagtactgagccattggaggaacatgtgaaggccaagctttcacagttttgccatgtcccggtctcaaatatagtgaacctccatgacgtgacaaacatctggcacatccccttgctgctaagggaccagaaggcccatgaagcgattctgaaggttttagacctccagtatgatggaaaggtgcctcgggaacctgagctaacaaagtggactaaaagagccaccaagtttgacaagttgaagactccggtcaagattgccatggttggaaaatacactggcctgtcggattcctacctgtctgtcataaaggctcttttgcatgcatcggttgctatggaaagaaaacttgtagtcgagtgggttccttcctgcgacctggaagattcttcagctaaagagacccctgaagcccataaaaaagcatggaaattgctgaagggcgcagatggcgtactcgtccctggagggtttggggacaggggagtccagggcaaaatcctcgccgcgaaatacgcacgcgagaacaacgttccttatcttggcatctgcctgggaatgcaaatcgcggtgatcgagtttgcccgctcggtgatgaagctacgaggtgccaatagcacggagttcgatccagctacgacgtcaccctgtgtcatcttcatgccagagggctcaaaaacccaaatgggagccacgatgaggcttgggtcgaggaggacctatttccatgtcagtggctgcaaatctgcgaagctgtacggcaacgccagctctgtagatgaaagacatcgccacagatacgaggtgaaccctgacatggtcccagactttgagaaggccgggcttcagttcgtgggcaaagatgagagtgggaaacgcatggggatcgttgagcttccctctcacaagttcttcatcggtgcacagttccatcctgaattcaagtcgagaccagggaagccatctccgcttttcttagggctgatagccgcggcgtctgggcagctagaaccattgcttcagcgcagcaatccgacaacgaaagcatgttcgatcagtaaagtcccgaaactgaaactgtaccccactgggcctgtgaataatccactgaacagcttggtgaacgggtactacccaaatgagaagagaaggctaagattcagcaagcccccagctccagcgacacatggttccgacatttttaacgaggaacgccttccagtccgttgaagcgagctagccatagggtggtgaggtctagtgtgatgttgttgttgtttttttctctttcctttttttttggcctggaactaaggcgcgaagtgttttgagtagcgctagtagagcctggaagaagttatctaaactatttgtacattatggaagaacttatctaaggactgaatacacaaatgcttggccatgattgctttgttgccacaatatgaacaaccacgctcagatgaagagtattggtgttgttaaaaaatgccagtgaaattgttgttgttaatgtt

SEQ ID NO: 215101 - DNA, 2609 bp, Zea Mays
gggaggaagcgctgccgccaggcccgcccctgcctgccctgagggttctatttaacccccctcgtctccccctccgtttccagcctcaaactcttgccctccccccggcaccacactagcctagtgagaagtgcagcagcagcaccagcggcagaagtgttacttagttgctcctcctacctgtgctgctgcgcaggagcagagcctgaaaggacgacggccgtcggcgtaaggggagcgagcgagcgagcggccatgaagtacgtgctggtgaccggaggggtggtgagcgggctcggcaagggcgtgacggccagcagcatcggcgtcgtgctcaaggcctgcggcctccgcgtcaccaccatcaagatcgatccatacctcaacaccgatgctggaaccatgtcgccgttcgagcacggggaggttttcgttttggacgatggcggagaggtggacttggaccttggaaactacgaacgttttctggacatcaaattgacccgcgacaacaatataaccacgggaaagatcttccaggctgtcattaacaaggagaggagaggcgactacctagggaagaccgtccaggtagtgccgcacatcacggatgagatacaggactggatcgaacgcgtcgcggtggtcccagtggacggcaaggaagggcctcctgacgtctgcgtcatcgagctcgggggcactataggggacaaaatcttttcgccgcataacgacagtggcattcttgatgcaggggatatcgagtcaatgcctttcattgaagcgttaggtcaattctcgtaccgtgttggacctggaaacttctgtctcgttcatgtcagtcttgttccggttctaaatgtagtcggtgaacagaaaactaagcctacacagcacagtgttcgagggcttagagggcttgggttagcgccggatgttttagcatgtcgcagtactgagccattggaggaacatgtgaaggccaagctttcacagttttgccatgtcccggtctcaaatatagtgaacctccatgacgtgacaaacatctggcacatccccttgctgctaagggaccagaaggcccatgaagcgattctgaaggttttagacctccagtatgatggaaaggtgcctcgggaacctgagctaacaaagtggactaaaagagccaccaagtttgacaagttgaagactccggtcaagattgccatggttggaaaatacactggcctgtcggattcctacctgtctgtcataaaggctcttttgcatgcatcggttgctatggaaagaaaacttgtagtcgagtgggttccttcctgcgacctggaagattcttcagctaaagagacccctgaagcccataaaaaagcatggaaattgctgaagggcgcagatggcgtactcgtccctggagggtttggggacaggggagtccagggcaaaatcctcgccgcgaaatacgcacgcgagaacaacgttccttatcttggcatctgcctgggaatgcaaatcgcggtgatcgagtttgcccgctcggtgatgaagctacgaggtgccaatagcacggagttcgatccagctacgacgtcaccctgtgtcatcttcatgccagagggctcaaaaacccaaatgggagccacgatgaggcttgggtcgaggaggacctatttccatgtcagtggctgcaaatctgcgaagctgtacggcaacgccagctctgtagatgaaagacatcgccacagatacgaggtgaaccctgacatggtcccagactttgagaaggccgggcttcagttcgtgggcaaagatgagagtgggaaacgcatggggatcgttgagcttccctctcacaagttcttcatcggtgcacagttccatcctgaattcaagtcgagaccagggaagccatctccgcttttcttagggctgatagccgcggcgtctgggcagctagaaccattgcttcagcgcagcaatccgacaacgaaagcatgttcgatcagtaaagtcccgaaactgaaactgtaccccactgggcctgtgaataatccactgaacagcttggtgaacgggtactacccaaatggcactgggatccacacctagaagcgtagcgcttagcgatggtttggttggtatttgctgctatggtttttttgcttgtacccctcctttttcatgtgttcctttttttcagtttgttatttgtctctgatcaactgagagaagagaaggctaagattcagcaagcccccagctccagcgacacatggttccgacatttttaacgaggaacgccttccagtccgttgaagcgagctagccatagggtggtgaggtctagtgtgatgttgttgttgtttttttctctttcctttttttttggcctggaactaaggcgcgaagtgttttgagtagcgctagtagagcctggaagaagttatctaaactatttgtacattatggaagaacttatctaaggactgaatacacaaatgcttggccatgattgctttgttgccacaatatgaacaaccacgctcagatgaagagtattggtgttgttaaaaaatgccagtgaaattgttgttgttaatgtt

SEQ ID NO: 215102 - DNA, 2498 bp, Zea Mays
gggaggaagcgctgccgccaggcccgcccctgcctgccctgagggttctatttaacccccctcgtctccccctccgtttccagcctcaaactcttgccctccccccggcaccacactagcctagtgagaagtgcagcagcagcaccagcggcagaagtgttacttagttgctcctcctacctgtgctgctgcgcaggagcagagcctgaaaggacgacggccgtcggcgtaaggggagcgagcgagcgagcggccatgaagtacgtgctggtgaccggaggggtggtgagcgggctcggcaagggcgtgacggccagcagcatcggcgtcgtgctcaaggcctgcggcctccgcgtcaccaccatcaagatcgatccatacctcaacaccgatgctggaaccatgtcgccgttcgagcacggggaggttttcgttttggacgatggcggagaggtggacttggaccttggaaactacgaacgttttctggacatcaaattgacccgcgacaacaatataaccacgggaaagatcttccaggctgtcattaacaaggagaggagaggcgactacctagggaagaccgtccaggtagtgccgcacatcacggatgagatacaggactggatcgaacgcgtcgcggtggtcccagtggacggcaaggaagggcctcctgacgtctgcgtcatcgagctcgggggcactataggggatatcgagtcaatgcctttcattgaagcgttaggtcaattctcgtaccgtgttggacctggaaacttctgtctcgttcatgtcagtcttgttccggttctaaatgtagtcggtgaacagaaaactaagcctacacagcacagtgttcgagggcttagagggcttgggttagcgccggatgttttagcatgtcgcagtactgagccattggaggaacatgtgaaggccaagctttcacagttttgccatgtcccggaccagaaggcccatgaagcgattctgaaggttttagacctccagtatgatggaaaggtgcctcgggaacctgagctaacaaagtggactaaaagagccaccaagtttgacaagttgaagactccggtcaagattgccatggttggaaaatacactggcctgtcggattcctacctgtctgtcataaaggctcttttgcatgcatcggttgctatggaaagaaaacttgtagtcgagtgggttccttcctgcgacctggaagattcttcagctaaagagacccctgaagcccataaaaaagcatggaaattgctgaagggcgcagatggcgtactcgtccctggagggtttggggacaggggagtccagggcaaaatcctcgccgcgaaatacgcacgcgagaacaacgttccttatcttggcatctgcctgggaatgcaaatcgcggtgatcgagtttgcccgctcggtgatgaagctacgaggtgccaatagcacggagttcgatccagctacgacgtcaccctgtgtcatcttcatgccagagggctcaaaaacccaaatgggagccacgatgaggcttgggtcgaggaggacctatttccatgtcagtggctgcaaatctgcgaagctgtacggcaacgccagctctgtagatgaaagacatcgccacagatacgaggtgaaccctgacatggtcccagactttgagaaggccgggcttcagttcgtgggcaaagatgagagtgggaaacgcatggggatcgttgagcttccctctcacaagttcttcatcggtgcacagttccatcctgaattcaagtcgagaccagggaagccatctccgcttttcttagggctgatagccgcggcgtctgggcagctagaaccattgcttcagcgcagcaatccgacaacgaaagcatgttcgatcagtaaagtcccgaaactgaaactgtaccccactgggcctgtgaataatccactgaacagcttggtgaacgggtactacccaaatggcactgggatccacacctagaagcgtagcgcttagcgatggtttggttggtatttgctgctatggtttttttgcttgtacccctcctttttcatgtgttcctttttttcagtttgttatttgtctctgatcaactgagagaagagaaggctaagattcagcaagcccccagctccagcgacacatggttccgacatttttaacgaggaacgccttccagtccgttgaagcgagctagccatagggtggtgaggtctagtgtgatgttgttgttgtttttttctctttcctttttttttggcctggaactaaggcgcgaagtgttttgagtagcgctagtagagcctggaagaagttatctaaactatttgtacattatggaagaacttatctaaggactgaatacacaaatgcttggccatgattgctttgttgccacaatatgaacaaccacgctcagatgaagagtattggtgttgttaaaaaatgccagtgaaattgttgttgttaatgtt

SEQ ID NO: 215103 - DNA, 1060 bp, Zea Mays
gaaggaacaagaacaaaccgcccccaaattagctgtcaacccgtcgcttccttcacgtaatcacgtctcctccgccgcccttgctaagcaaacgcaacctgcaactgcaaacccctcctccgattcctcccccgcacgcggaagccccccgcagctcttcgtccccggaggaccaagaccaccaccggagatgtcgtacgcctacctcttcaagtacatcatcatcggcgacacaggcgtcggtaagtcgtgcctgctgctgcagttcaccgacaagcgcttccagcccgtccacgacctcaccatcggcgtcgagttcggggcccggatgatcaacatcgacaacaagcccatcaagctccagatttgggatacggctggtcaagagtcattcagatccataactagatcatactacagaggagctgctggtgctcttttggtctatgatatcactaggagggagactttcaatcaccttgcaagctggctggaggatgcaaggcagcacgcgaatgctaacatgacgataatgcttgttgggaataagtgtgatctgtctcacaggcgtgcagtgagctatgaggaaggcgagcagttcgcaaaggaacatggtcttatcttcatggaggcctctgcaaagaccgcgcagaatgtcgaggaggcatttgttaagactgctggagcaatctacaagaaaatccaagatggcgttttcgatgtatctaatgagtcttatgggatcaaagttggatatgtagtccctggccaatctggaggtgctggtagctcttctcaaggtggtggctgctgcagctaatctgctaacgcccttatgtacaaaggcatatctgcggtgtagctgcgttatctctatgttgctgagcgtaaaatagttactgctccagggtgctttgttatttgatgcaccaacgggtggcagtgcctgaacgatttgagacattcagttttatttatgtcaggtgttcataaacattctgtaaatcactagattcttcaccgtcattcgtcattaagcgctcacaaattctgtcaaaag

SEQ ID NO: 215104 - DNA, 6557 bp, Zea Mays
ggtggaacaaaagatgaaaacagaccaggatttcggcagaatggccacataaagcacgagcatgctgatcgcagatccttagctgtagaagctgtgacttaattttgtagagaagaagaaacaagacgaccggtacagcgttagtagatacgcatgtgccttagggctactttgggagcccagatccctggggggcccgcaaattccctgggccaagaaacccggtgccaatctcccatgggccaattttttgtgccatttggacggaagcccacaaactcagggatcgaaactcgcttccattccttttccacgcggaagaaaactgcgagtcaagaggcgggagggcttccctaacccccgtcgacttgttcatgctcacacggcatgtgagtcgcaaggctgctgccactgtcaccctagtatcccgtggtcagcgcatacccagtggctggtgactagcggcgcaccttttcctatggtaggtgacacatctcctagtcctagcgctcggcttgttcatgctcatgcagcttgtgaatcgcaaggctgctgccgctgtcaccctagtatcctgtggtcagcgcatacccagtggctggtgactagcggcgcgcctttcccgacggtcggtgacacatctcccagcgctcggcgatcacgttgctcccgaaatccactgctccatgtcgatctctagaaatcacataggcaactcaccccgaccactgccaccttgctcctccactgtcatcgcttcaccatccgtctctggaggtcaatcctcctccgcctgcattcccttccccaacagtaatttctcgatacgctagggtttcacccagatttccattgtttcttgaagatcttggagctatcggtacgtgagtcaagacaccgcttctgctcccattgtcccgttcggggtaacacaacgctgtggagctacaggttagttctctgcctgctacggattcgttgcattctgtttcagtggtcggacatgggttcatggcagtctgatgtgctgctgtagttttctgtgttgtagcttcatgtgcagtgtaggaggtggtcaatttgtttgtgattctttattttgttaacaaaaaaattggagcaagtccagggtagttcgagccaaatttattgctatacttgtgatcttttattttgttgatatattggatcagtacaactgtccttgttgaaggaatgagagaattggtataatgtgtgggatgtattgcattgagcctctagggagaatatataggagtacatgacttggagggcaagaagcgtattctagagataagaaaggttatcctagatataaggaaggttatctcgagattacaatcaatcctaaaccaaccatatcaggagttgcctaatatactctaacatacctaatatactctaacatccccccgcactcgtagcgttagcaaaacgaacggacagactggagaataatggagatatccccccatagtcagaatgccggtgcgaatgctgctactggagtagcccatgcagatgatagccctttgtgccgataatgttgaggtagctaagtgcaagggcgtcgagccgtcgtcgaggtgccatgcgtagggttgctgtggtcgaggaagctgtcgaggacatcatagaagacaagccgcacaagtcgcaggcgctggtgcggcacgcgggaaggcccgcagcgcaccagagtacgccgtggtgacagtggcgctgagaaaaatctccagcatccttggttttggtcgcagatggtgtaatctgatcagtttgttgttgttcacatcctctaccagaattttaatcaatggtgaacctaggaattgcatctcccaccatcgaggccttcatcaagggaaccccctatcacccatgctatttattctggtcatggaagtcctgaattccatttttacttttgcaactcaagagcatctcttgcagcccattgctcatcagcaggccaaacatcgcatttctttttatgcggatggcgtagtattgttcctccggccactaaaatctgatctccttatggtcactcggctccttgatatttcggggcattctacaggcctcaagacaaacatttccaaaagttcagtcacacctatccagtgtggggatgaagagctggtcattatctctgagttgttgccttgtgagttaaaggagtttccatgtaattacctgggacttcccctgtcaattcgaaaaccaacaaatgccgagttgcagccccttgtcgataaggtatccaataaattgtccgattgtcgggctagaaaacatcgctcatgagtcaagcaggccgccctgtgatgatgagagtggttttatctttcatccctatgtactctatgctagcacctccctaaatgggtgctcaaataaatcgataaaagaagtgggttcatgtggaaagggcaggaaaaagcaaatgggggtagctgtcttgtttcctgggagtgtgttcaacgacctttgctgtttggaggcctagccgcctaggtatacttaacatggagctgttcagtggggccttgcgtattcgttggttgtggttgcagaagacggatgcatctcgcccttgggctggcctccccttcaaactacctcctcatgcgcaagctttgtttgacattgttgttgttactgttgtgggcaatggagaatcaactaaatcttggaccgatggctgcaaggaaaatctgtttcggactgggcccccaatttgttcctgttgatgcccaaaagggctaagaggcaaagaacagtggcacaagggttgcaaaaccatagttgggtctctgatttaaggggtgccttgtcagtgcaagtgcttgtggaatatttacagctctggaacctcgttgataacctggagctccaacaggacatccctgatcagcacttatggtggctaaccaatcatggggactacaccatccagaggggacataataacaaagtctgtggatgcatcaagtgaagttcatgatgcatttatgctagctgatttattagggaagaaaattgaagagattgggaaagaaaaagtggttcaggttatcactgataatggggctaactacaaggcagcaggtaggatacttatggagaggtttccttcacttttttggagcccatgcgctgcacattgcttagatcttatgctagaagacataggaaacttgaaggaatttaagaagcccactgtacgtgcaagacgtgtcacaactttcatctataggcacggtagaattcttagtttaatgagagagaagacaggtggggcagatcttgtgagagctgcagccactagatttgccactgctttccttactttgaaaagtttgtacaagcacaaggatcctttgaaggccctatttcttagtgaagaatggaatggaaacaagttggcaaaaactgctgcaggtaaggaggcttgtgatattgtgctctctgtggagttttggaataaagttgaagattgtcttagagcttcagcccctctcctcattgtacttagagtggttgatggtgatgagaaacttaagagaatcatagacatcattgagaaacgatggatgaaacaaatggaccatcctttgtatggggctgctctttatttgaatccaggaaaattgcatcctctcattcgagatgatgatgatgcaactgttggccaactaagaggttgtttccttgatgtgcttgcaagaatgcaagtttatacattaacatctaaatttatgttgtatttcacatttggcaatcaagttgattggtggcgttcatatggtgggcgtgctattgagattcaaaggtttgctaggcgtattgttggtctttgtgcttcatcatcgggttgtgagagaaactggagtagatttgagtttcctcaaggtgctcgtgggtgtgattgtggtgaggatgagaatggccttacatgggaacttgttgatcaagctgtgggtgcatcaagctcgctgcgaggccgaaatcttccaaggaatgccaacaagcgtgcaagagtttcacactcaaggtttgactttgaagaagattttggttcagccaatgaagaagaggaggaccaagatccacatgatgatgttgatgtgactgattctgaagatgcacatgatgatgttggtggagaaaacactgaggctgctccagatgagttcgaagatggatattgactcactaagagttggctgatttcagatttgcagcttacctaattttgtgcagtgcttcaatgcttcactgcttgtgctcttaatcaactagtcttttaatcttttgattgatctatgtcgctaagtcattatggggctggactggaactaatttaattatgccactaagactagcagtctagcatatgttgctgctgctattttattcccaccaatgtattgtgggtttaatttgatatacatgtctgctgcttactgttttaatatgtcaatattcaaaggttaatgtagcttgcagcttgaaagaaaagaagaggggttggatcttcgataagagagatggatcatggatgctacaagaacaacaaagagaagggcagagtacataccaaagcatggacaacaaaaaagcttgtattgtattctctaaccttaccaattttgttattgcaagtgttagattgttaggattttttttgcatatcctcgcctaggcgatcctcatatggcgtcgcctcgccgcacgcctaactcgcctaggcgtttggaagggggtcggtcgccatgtctcgccttaacgccttaataaccttggttgtgtgttcgtgtgggaggttcccaacatgtcatgattagttgtgtgttcgcgtgggaggtttggacttcaatcctcaatattttggggttgattgccctcgcacctcagcttggatgttgtcgttttttggctgtggtgtacagctaccaaggcagttcccaaagagttgaaaaagggttttaatcccctcatcatttcggtcaccggggagatttggaagcatcagaatgcctgcgtgttcgaaggaaaaaagccatgtgttcggtctgtccttgcaaactgtggccattgaatgtgctctttggagtgtggcgggtgcctctcgcctttgagagctgctcacccgccaattcatcccaggggattagcctaggcccagggtggctagtagtgttgtggtcgtgtgtgtgtgtgtgtgtgtgtgtgtgtgtgtgtggcgagttagtgtaggaaggaaggattgcgtataatgtgttggatgtattgcattaagcctctagggagaatatataggagtacatgacttggagggcaagaaggctatcctagagataaggtaggttatcctagatacaaggaaggttatcccgggattacaatcaatcctaaaccaaccataccaggagttatctaatatactctaacatgcctaatatactctaacagttagttcctaacctgccttgtacacggcgttatctttccagtcgcgccgtttgtttttgttttctcctcttaatgaaatgactagcagctctcctgcgacgttcaaaaaaaaattcgacctgaataatataatttggttctcggtgccgtaagatgcccatagtcctcattatcttaccttgtgtttacttgtagagagagctcttgctggaagcattgtatgatttgagaagaaaaacgcagctgcagttcctatctgagaagcttatgcaaaggatttttttcttggacactgactatgaaaaggagttaaaccatttttatttttgattatgccttggatatctggatggagatgatctgtaacttggtgacgaatgggttagctaggttgaatttgccacttgaattaattttttctttgcactggactatgtcaaataattattattccaaattcttatgtgagcttctaatgttactcaattatttgcattatttaggtcttgtgattttccatgcattgttttcatgaaaatgttgtggttgacattgatatgtggtgacttccttatattattatttctttatttttctaagacattgttttcaatttactaagacgtacccaggttcaaacctgctgccaaactctggacagcctcagcgcaatcaaagtttcaaaaaaaatccacatgtagggttatcttcccagggtttccctctcctgccaaagtgagagaaagagagaaggaaagtgcattacaatcttgttagctctttgaatgagcagtccatcctctatgcatgctttgccgtgcctcttgaacccctggacgcactccaactcgccgtccacacatcgcccgttcggagggcaaggttgacacgaatctgcgcatgccttgccttagctttgctatacttttgatacaaatagtgagcaaggagagcatgcagaggagttaaaaaagctgtagaaggagatggccgtaccgtcggcgtagtcatcgggccactggggagagtcgcagaagggctcagggcggcggttg

SEQ ID NO: 215105 - DNA, 2846 bp, Zea Mays
atgtgaacaacaacaaactgatcagattacaccatctgcgaccaaaaccaaggatgctggagatttttctcagcgccactgtcaccacggcgtactctggtgcgctgcgggccttcccgcgtgccgcaccagcgcctgcgacttgtgcggcttgtcttctatgatgtcctcgacagcttcctcgaccacagcaaccctacgcatggcacctcgacgacggctcgacgcccttgcacttagctacctcaacattatcggcacaaagggctatcatctgcatgggctactccagtagcagcattcgcaccggcattctgactatggggggatatctccattattctccagtctgtccgttcgttttgctaacgctacgagtgcggggggatgttagagtatattaggtatgttagagtatattaggcaactcctgatatggttggtttaggattgattgtaatctcgagataaccttccttatatctaggataacctttcttatctctagaatacgcttcttgccctccaagtcatgtactcctatatattctccctagaggctcaatgcaatacatcccacacattataccaattctctcattccttcaacaaggacagttgtactgatccaatatatcaacaaaataaaagatcacaagtatagcaataaatttggctcgaactaccctggacttgctccaatttttttgttaacaaaataaagaatcacaaacaaattgaccacctcctacactgcacatgaagctacaacacagaaaactacagcagcacatcagactgccatgaacccatgtccgaccactgaaacagaatgcaacgaatccgtagcaggcagagaactaacctgtagctccacagcgttgtgttaccccgaacgggacaatgggagcagaagcggtgtcttgactcacgtaccgatagctccaagatcttcaagaaacaatggaaatctgggtgaaaccctagcgtatcgagaaattactgttggggaagggaatgcaggcggaggaggattgacctccagagacggatggtgaagcgatgacagtggaggagcaaggtggcagtggtcggggtgagttgcctatgtgatttctagagatcgacatggagcagtggatttcgggagcaacgtgatcgccgagcgctgggagatgtgtcaccgaccgtcgggaaaggcgcgccgctagtcaccagccactgggtatgcgctgaccacaggatactagggtgacagcggcagcagccttgcgattcacaagctgcatgagcatgaacaagccgagcgctaggactaggagatgtgtcacctaccataggaaaaggtgcgccgctagtcaccagccactgggtatgcgctgaccacgggatactagggtgacagtggcagcagccttgcgactcacatgccgtgtgagcatgaacaagtcgacgggggttagggaagccctcccgcctcttgactcgcagttttcttccgcgtggaaaaggaatggaagcgagtttcgatccctgagtttgtgggcttccgtccaaatggcacaaaaaattggcccatgggagattggcaccgggtttcttggcccagggaatttgcgggccccccagggatctgggctcccaaagtagccctaaggcacatgcgtatctactaacgctgtaccggtcgtcttgtttcttcttctctacaaaattaagtcacagcttctacagctaaggatctgcgatcagcatgctcgtgctttatgtggccattctgccgaaatcctgtttcaggagcatgaggtctcaaatgcaattgatgaactcttgtcaaagattcccgctggtctaactgaggatgggcttcaacttgtgaaaactagggtgctggagagtgccgggggcttcttcgatacaacatttacttccagcaaagtcaaagtatataaatgccctgagctggttgcggagcttcatatgccaatgggttgtcgagttcgccaatggatctttagaaataccacatctgtggcaatcttttgtatcctgtttgcagcactgctttggatactgtggatcatttacaagaggcggacattatctaatagagctgagcaaatatacgagcaggtatgtgaaatccttgaagataatgctgtaaacgccgagattgacaactccaattctgaggtttgggtggttacctcctggctcagggatcacctgttggttcctcaagagagaaagaatgctttcctgtggaagaaggtcgaagaactcatacgagaagattctcgaatagatcaatatccaaaggtgattaaaggggagtcgaaagttgtttacgagtggcaagcaagtggctcgcttagtgcaaagattaaaaaggtgcaaggtgcaagggccaagtcaaggactggtgtaggtgtcataaaatttggggaagaaatgagtgcttcctccttgggtgaggtgagggagcagggctcgtgtgatttaacacgcgaagaaagaagtaaggacaaggtcacgtgcagtgattaggttatcaatcaatctatctacatgtatgcctctggtctttagaggaaccagcacgtgagcttggcaagagttactgatcttttgtaaattttgatgataggagccgagccgtcacagtgtgttgttgctgttacagttgagtttgttggcatgtcatgagattgtctggtacagtttcaacaactgatgaatgaacatggtcactggaagatgctgctgacggagcagtcgtcgtgcacacgccagatggtctcaccgaggaggttagcgacggagagcacggtgagctgtgcaccggc

SEQ ID NO: 215106 - DNA, 3214 bp, Zea Mays
ggctgcaactcggcatttgttggttttcgaattgacaggggaagtcccaggtaattacatggaaactcctttaactcacaaggcaacaactcagagataatgaccagctcttcatccccacactggataggtgtgactgaacttttggaaatgtttgtcttgaggcctgtagaatgccccgaaatatcaaggagccgagtgaccataaggagatcagattttagtggccggaggaacaatactacgccatccgcataaaaagaaatgcgatgtttggcctgctgatgagcaatgggctgcaagagatgctcttgagttgcaaaagtaaaaatggaattcaggacttccatgaccagaataaatagcatgggtgatagggggttcccttgatgaaggcctcgatggtgggagatgcaattcctaggttcaccattgattaaaattctggtagaggatgtgaacaacaacaaactgatcagattacaccatctgcgaccaaaaccaaggatgctggagatttttctcagcgccactgtcaccacggcgtactctggtgcgctgcgggccttcccgcgtgccgcaccagcgcctgcgacttgtgcggcttgtcttctatgatgtcctcgacagcttcctcgaccacagcaaccctacgcatggcacctcgacgacggctcgacgcccttgcacttagctacctcaacattatcggcacaaagggctatcatctgcatgggctactccagtagcagcattcgcaccggcattctgactatggggggatatctccattattctccagtctgtccgttcgttttgctaacgctacgagtgcggggggatgttagagtatattaggtatgttagagtatattaggcaactcctgatatggttggtttaggattgattgtaatctcgagataaccttccttatatctaggataacctttcttatctctagaatacgcttcttgccctccaagtcatgtactcctatatattctccctagaggctcaatgcaatacatcccacacattataccaattctctcattccttcaacaaggacagttgtactgatccaatatatcaacaaaataaaagatcacaagtatagcaataaatttggctcgaactaccctggacttgctccaatttttttgttaacaaaataaagaatcacaaacaaattgaccacctcctacactgcacatgaagctacaacacagaaaactacagcagcacatcagactgccatgaacccatgtccgaccactgaaacagaatgcaacgaatccgtagcaggcagagaactaacctgtagctccacagcgttgtgttaccccgaacgggacaatgggagcagaagcggtgtcttgactcacgtaccgatagctccaagatcttcaagaaacaatggaaatctgggtgaaaccctagcgtatcgagaaattactgttggggaagggaatgcaggcggaggaggattgacctccagagacggatggtgaagcgatgacagtggaggagcaaggtggcagtggtcggggtgagttgcctatgtgatttctagagatcgacatggagcagtggatttcgggagcaacgtgatcgccgagcgctgggagatgtgtcaccgaccgtcgggaaaggcgcgccgctagtcaccagccactgggtatgcgctgaccacaggatactagggtgacagcggcagcagccttgcgattcacaagctgcatgagcatgaacaagccgagcgctaggactaggagatgtgtcacctaccataggaaaaggtgcgccgctagtcaccagccactgggtatgcgctgaccacgggatactagggtgacagtggcagcagccttgcgactcacatgccgtgtgagcatgaacaagtcgacgggggttagggaagccctcccgcctcttgactcgcagttttcttccgcgtggaaaaggaatggaagcgagtttcgatccctgagtttgtgggcttccgtccaaatggcacaaaaaattggcccatgggagattggcaccgggtttcttggcccagggaatttgcgggccccccagggatctgggctcccaaagtagccctaaggcacatgcgtatctactaacgctgtaccggtcgtcttgtttcttcttctctacaaaattaagtcacagcttctacagctaaggatctgcgatcagcatgctcgtgctttatgtggccattctgccgaaatcctgtttcaggagcatgaggtctcaaatgcaattgatgaactcttgtcaaagattcccgctggtctaactgaggatgggcttcaacttgtgaaaactagggtgctggagagtgccgggggcttcttcgatacaacatttacttccagcaaagtcaaagtatataaatgccctgagctggttgcggagcttcatatgccaatgggttgtcgagttcgccaatggatctttagaaataccacatctgtggcaatcttttgtatcctgtttgcagcactgctttggatactgtggatcatttacaagaggcggacattatctaatagagctgagcaaatatacgagcagggatcacctgttggttcctcaagagagaaagaatgctttcctgtggaagaaggtcgaagaactcatacgagaagattctcgaatagatcaatatccaaaggtgattaaaggggagtcgaaagttgtttacgagtggcaagcaagtggctcgcttagtgcaaagattaaaaaggtgcaaggtgcaagggccaagtcaaggactggtgtaggtgtcataaaatttggggaagaaatgagtgcttcctccttgggtgaggtgagggagcagggctcgtgtgatttaacacgcgaagaaagaagtaaggacaaggtcacgtgcagtgattaggttatcaatcaatctatctacatgtatgcctctggtctttagaggaaccagcacgtgagcttggcaagagttactgatcttttgtaaattttgatgataggagccgagccgtcacagtgtgttgttgctgttacagttgagtttgttggcatgtcatgagattgtctggtacagtttcaacaactgatgaatgaacatggtcactggaagatgctgctgacggagcagtcgtcgtgcacacgccagatggtctcaccgaggaggttagcgacggagagcacggtgagctgtgcaccggc

SEQ ID NO: 215107 - DNA, 1334 bp, Zea Mays
aaaggaagttcgtcctctctctcacggtctcacctctcacgtccagagagagagagagaggatgccgtcgcgttcgccgcggcagtcggcccgaccccccctcccgaccgccgccgagccccctcccggcctcttcccggccagggaggacctcgtccgcttgctcgccgtcatattcatcgcagcggccgccgccgcggcctgtagcgtcctcaaccgccgccctgagcccttctgcgactctccccagtggcccgatgactacgccgacgattcgtgtcaaccttgccctccgaacgggcgatgtgtggacggcgagttggagtgcgtccaggggttcaagaggcacggcaaagcatgcatagaggatggactgctcattcaaagagctaacaagatttcacagcttctacagctaaggatctgcgatcagcatgctcgtgctttatgtggccattctgccgaaatcctgtttcaggagcatgaggtctcaaatgcaattgatgaactcttgtcaaagattcccgctggtctaactgaggatgggcttcaacttgtgaaaactagggtgctggagagtgccgggggcttcttcgatacaacatttacttccagcaaagtcaaagtatataaatgccctgagctggttgcggagcttcatatgccaatgggttgtcgagttcgccaatggatctttagaaataccacatctgtggcaatcttttgtatcctgcactgctttggatactgtggatcatttacaagaggcggacattatctaatagagctgagcaaatatacgagcagggatcacctgttggttcctcaagagagaaagaatgctttcctgtggaagaaggtcgaagaactcatacgagaagattctcgaatagatcaatatccaaaggtgattaaaggggagtcgaaagttgtttacgagtggcaagcaagtggctcgcttagtgcaaagattaaaaaggtgcaaggtgcaagggccaagtcaaggactggtgtaggtgtcataaaatttggggaagaaatgagtgcttcctccttgggtgaggtgagggagcagggctcgtgtgatttaacacgcgaagaaagaagtaaggacaaggtcacgtgcagtgattaggagccgagccgtcacagtgtgttgttgctgttacagttgagtttgttggcatgtcatgagattgtctggtacagtttcaacaactgatgaatgaacatggtcactggaagatgctgctgacggagcagtcgtcgtgcacacgccagatggtctcaccgaggaggttagcgacggagagcacggtgagctgtgcaccggc

SEQ ID NO: 215108 - DNA, 736 bp, Zea Mays
gtttgtgcctctcttatatctcgattaagaacaccaaagaagcaacggacctgtccaccatattttacatgcccatgtcctaccaggcatatcaagaatcggagaacatggaagtcatattataagaaacatcgtataatgataatcaaaaggatattggggtaacataagtatgtatcaagaacaagagcacctatgatggctggaatccgtccccttcccgtcctgacctgtgctctcctcgtctccccggtggtttcttcgttgagattttcggttttttccaagggcgtgggttttcatatctacaattcaaagtctattgatcgcgcagagttcagagccttcttcaatatctggaatcatggtggcccaaactggattcatgaatacatgaactttattaatgaagagaaggctaattggtggactattcgtggcaagaagagtatttcttacgctgacattgttaagctactgctatctggtgctaatacggttccgattctcaacaagaagttctcatatattattgggaatcctgttcaggaaagaatttctgttttcagacgcttgggatcttcaattcgttattcaggatctcagggatatcggtattcgtcatatcctcggaattcaggatctcggggctttcggaatccgatgactgcgaagaacaaggaattccccatgaatgttcttcatcacagggcgccttcctcgattgcaatctcgc

SEQ ID NO: 215109 - DNA, 524 bp, Zea Mays
catgcctccgcctcggcttcccctccgtgcaaccgcccgacccgccaggaccccgcctctccttcccctccgcgctcaagcaaccaatccgaggaaatgcacccacaaatttggaagccgcggcaatggcgcccgatttggctatggtgtgcacgatttggaaaccgcacaatctacgttgccaatttggaaagcacgatctcggtactgcaatcacaacaactatcccccaaatgtcgcgcccatcgacgaccaggacccccagatttggcaatgcaccattccccccaacaatcgtgctcgatctggcaattgtgtgcatcatcttcgtcgccgatttggaaagcgcacgatctacgacgctgatttggaaagtgccttgccaaacgattccagcacaaatcccccaaatcgtgcacccaccatcgttaaaaaggtcacaattgtcatcctgctccaaccttcctacaatgacggaaatcccgcgctcacactcctccagatgatttttgtgtatttgcata

SEQ ID NO: 215110 - DNA, 1301 bp, Zea Mays
ggcaaaggtatggagaatggaactatgcaatcctgtcttcgagtagagtaagatttatgttttaaagtgatactttttaatcgcctattcacccccctctaggcgacatccagatcatgttcccgggccaaagggaactttcactcacacaacaggaacgagcgatgcacagttttatgcagaaatggattccaaaagatggataagattaaagattcaaataggcaagctaagcaattggaagatcttactgtgaaaatgaaggagtgcaagcgcttgatcaaagagtttgatcgcattctcaaagatgaggagtcaaataatccacctgagatcaacaagcagctaaatgacagaaaacagttcatgatcaaagagttgaattcctatgtcaccttgaggaaaacataccaaagtagccttggtaacaacaataagagggttgagctctttgatatgggtgctggaagtagtgagcctgctgctgaggacaatattcaaatggcatcagccatgacaaatcaacaactcattgatacgggaaggaaccaaatggaccaaacagatcaagctattgaacgttcaaaaatggtcgtagcacaaactgttgagactggagctcaaactgctgcgacattaacacagcaaacagagcaaatgaagagaattggtaatgagctagatactgtccacttctcactgaagaaagctagccaactagtgaaggagattggtcgccaggttgcgactgacaaatgtatcatggcattcctcttcctgatcgttttgggtgtgattgctatcattgttgtcaagatcgtccatccgaataacaaaaacattcgagacattccagggctggccccgcctgctcaaaactatcagattcacaacaggagattgttgtgggcagaagcttccataggcatgtgatggctctgaatgtaggcttcatgtggacgcactgcctgcgaagcagcagctatccatagggcgaaagatacatagtaacaattctttgtgcctgtatatctattttgtcttgttaactccgagccctaggtctgtattcctgcgtctggtgtttgtacaccgctggccgtttggctgtgtatatggtacagagatgagatcttaaaaccaaaccagtaattatgacaaatacttgaaagagctacagtaccgaaatactccagttggtactcgctgcacttcatgggcgaatatataaagggtgccggttgggccgtgtaacacattctgaattccgaagacccatgaaaagaatgtgaacgtttaag

SEQ ID NO: 215111 - DNA, 1651 bp, Zea Mays
cccgtctcgtcctccttcctctcaagagtcgagacccaggcagccaggcttccagttccagccccacctcgcctctaccctcctcaaaccctacaccacgccccccggcccccagcccccggccttcgcccaacccgatagcgtagcgccggcgcagaaccggaccctgccgtgcggttgtccaccccgctcggcgccgcccgccgccgccgccgcctttgatgtctcctacctgcgacctcggcttcctctgcccccggtcgcagaagagctcccaagaggtcccccgagccaccgcttccggcgcccagcgattggcttccccaccgcagccgagatgagcagcggcggcgagaagatgttgttgtttgggtcctttacggaggacgagactaagttgttacagggtcagcccctcaaaagtccaactaaaagtgtcagcaaagaatgtgaacggacggagatccagtttggcaccctgaacttgtcagtgctgaatttagagaaaatatctacttcaagtgttgttcttcctgcaaaatcagcaaaaggggaaaccagtgccatcacgaaggagaatgcatgcaataatgaaaagaaagctgcagggtcaagcctttcaaacggtggaccagttctggctaatggatgccctcctgttaatgttcctgctaacaatggtttatttgagaatgtgaagacagaggctgttgtcccaccagttatacctgtcaaaatcatcagcaatccaacaccgcaaatgacgttggagacgcataaggatggcaccaaacccactgaaagcagaaagttaaataaggaaagggaaattactgaaaatggtagtccaattgtcgataaacacattgttgctgctccagcagaagaggcagtcacaagcctaaataagaaagcctctcagaacatgcccttgcttccacatggtttgaggaacacaggaaatatttgctttctgaatgcaactttgcaggcattgctttcatgctcgccttttgtctaccttttacaggatttgaggaaccgcaggatacctaaggttggctacccaactctgagtgcatttgttgagttgatatctcaattggatgtgcctgatgagtcagttatcaagaaaaatgagaaggttattactgttgccgcaaaaccacttaatcctgccatgtttgatgctgttctcagaaactttacaccagatgtgccggctggaataactgctcggcctaggcaggaagatgctcaagagtttttaagttttgccatggatagaatgcatgatgaactgctgaaacttaatggagatggtttgaattcaaaggaggggatggttgtttcatccgctgatgatgatgcttgggagacagttggacgaaagaacaaatctgcaatagttagaactcagagttttgtcccctctgagcttagtgctatttttggagggcagctacagagcgttgtgaaagctgcaggtaacaaagcatcagctactgttcagcccttcctactgctccatcttgatatattcccagatgctgttcagacgcttaatgatgcacttcgtctgttctctactcctgaatctttggaaggatacagaacagctgcgggaaaggtatctaccttgtcacctttg

SEQ ID NO: 215112 - DNA, 2026 bp, Zea Mays
cccgtctcgtcctccttcctctcaagagtcgagacccaggcagccaggcttccagttccagccccacctcgcctctaccctcctcaaaccctacaccacgccccccggcccccagcccccggccttcgcccaacccgatagcgtagcgccggcgcagaaccggaccctgccgtgcggttgtccaccccgctcggcgccgcccgccgccgccgccgcctttgatgtctcctacctgcgacctcggcttcctctgcccccggtcgcagaagagctcccaagaggtcccccgagccaccgcttccggcgcccagcgattggcttccccaccgcagccgagatgagcagcggcggcgagaagatgttgttgtttgggtcctttacggaggacgagactaagttgttacagggtcagcccctcaaaagtccaactaaaagtgtcagcaaagaatgtgaacggacggagatccagtttggcaccctgaacttgtcagtgctgaatttagagaaaatatctacttcaagtgttgttcttcctgcaaaatcagcaaaaggggaaaccagtgccatcacgaaggagaatgcatgcaataatgaaaagaaagctgcagggtcaagcctttcaaacggtggaccagttctggctaatggatgccctcctgttaatgttcctgctaacaatggtttatttgagaatgtgaagacagaggctgttgtcccaccagttatacctgtcaaaatcatcagcaatccaacaccgcaaatgacgttggagacgcataaggatggcaccaaacccactgaaagcagaaagttaaataaggaaagggaaattactgaaaatggtagtccaattgtcgataaacacattgttgctgctccagcagaagaggcagtcacaagcctaaataagaaagcctctcagaacatgcccttgcttccacatggtttgaggaacacaggaaatatttgctttctgaatgcaactttgcaggcattgctttcatgctcgccttttgtctaccttttacaggatttgaggaaccgcaggatacctaaggttggctacccaactctgagtgcatttgttgagttgatatctcaattggatgtgcctgatgagtcagttatcaagaaaaatgagaaggttattactgttgccgcaaaaccacttaatcctgccatgtttgatgctgttctcagaaactttacaccagatgtgccggctggaataactgctcggcctaggcaggaagatgctcaagagtttttaagttttgccatggatagaatgcatgatgaactgctgaaacttaatggagatggtttgaattcaaaggaggggatggttgtttcatccgctgatgatgatgcttgggagacagttggacgaaagaacaaatctgcaatagttagaactcagagttttgtcccctctgagcttagtgctatttttggagggcagctacagagcgttgtgaaagctgcagcccaatatcagggttaatagttcatgttggaagagcattctacatgttggcgattaatgaagtgtctgttctgtgttagtcctttgatataacatggaagaatctaggatttttttggtgttccgtaaggtaattctgcgctctaccattgaagctctacaataatgcaccaatgcatctcagcactagcctggctgccctgctaagttaaaacagccccattcagatgttttcgttttctccaatggaataatgatatcatgattgcattagttattcaccataggtatagtgtgaaacttatgcttgagtaggcccacttgtgctttcctatctgtcttttcagtggtgtatactgataaatacacctgtcaggtaacaaagcatcagctactgttcagcccttcctactgctccatcttgatatattcccagatgctgttcagacgcttaatgatgcacttcgtctgttctctactcctgaatctttggaaggatacagaacagctgcgggaaaggtatctaccttgtcacctttg

SEQ ID NO: 215113 - DNA, 1642 bp, Zea Mays
cccgtctcgtcctccttcctctcaagagtcgagacccaggcagccaggcttccagttccagccccacctcgcctctaccctcctcaaaccctacaccacgccccccggcccccagcccccggccttcgcccaacccgatagcgtagcgccggcgcagaaccggaccctgccgtgcggttgtccaccccgctcggcgccgcccgccgccgccgccgcctttgatgtctcctacctgcgacctcggcttcctctgcccccggtcgcagaagagctcccaagaggtcccccgagccaccgcttccggcgcccagcgattggcttccccaccgcagccgagatgagcagcggcggcgagaagatgttgttgtttgggtcctttacggaggacgagactaagttgttacagggtcagcccctcaaaagtccaactaaaagtgtcagcaaagaatgtgaacggacggagatccagtttggcaccctgaacttgtcagtgctgaatttagagaaaatatctacttcaagtgttgttcttcctgcaaaatcagcaaaaggggaaaccagtgccatcacgaaggagaatgcatgcaataatgaaaagaaagctgcagggtcaagcctttcaaacggtggaccagttctggctaatggatgccctcctgttaatgttcctgctaacaatggtttatttgagaatgtgaagacagaggctgttgtcccaccagttatacctgtcaaaatcatcagcaatccaacaccgcaaatgacgttggagacgcataaggatggcaccaaacccactgaaagcagaaagttaaataaggaaagggaaattactgaaaatggtagtccaattgtcgataaacacattgttgctgctccagcagaagaggcagtcacaagcctaaataagaaagcctctcagaacatgcccttgcttccacatggtttgaggaacacaggaaatatttgctttctgaatgcaactttgcaggcattgctttcatgctcgccttttgtctaccttttacaggatttgaggaaccgcaggatacctaaggttggctacccaactctgagtgcatttgttgagttgatatctcaattggatgtgcctgatgagtcagttatcaagaaaaatgagaaggttattactgttgccgcaaaaccacttaatcctgccatgtttgatgctgttctcagaaactttacaccagatgtgccggctggaataactgctcggcctaggcaggaagatgctcaagagtttttaagttttgccatggatagaatgcatgatgaactgctgaaacttaatggagatggtttgaattcaaaggaggggatggttgtttcatccgctgatgatgatgcttgggagacagttggacgaaagaacaaatctgcaatagttagaactcagagttttgtcccctctgagcttagtgctatttttggagggcagctacagagcgttgtgaaagctgcagcatcagctactgttcagcccttcctactgctccatcttgatatattcccagatgctgttcagacgcttaatgatgcacttcgtctgttctctactcctgaatctttggaaggatacagaacagctgcgggaaaggtatctaccttgtcacctttg

SEQ ID NO: 215114 - DNA, 1636 bp, Zea Mays
cccgtctcgtcctccttcctctcaagagtcgagacccaggcagccaggcttccagttccagccccacctcgcctctaccctcctcaaaccctacaccacgccccccggcccccagcccccggccttcgcccaacccgatagcgtagcgccggcgcagaaccggaccctgccgtgcggttgtccaccccgctcggcgccgcccgccgccgccgccgcctttgatgtctcctacctgcgacctcggcttcctctgcccccggtcgcagaagagctcccaagaggtcccccgagccaccgcttccggcgcccagcgattggcttccccaccgcagccgagatgagcagcggcggcgagaagatgttgttgtttgggtcctttacggaggacgagactaagttgttacagggtcagcccctcaaaagtccaactaaaagtgtcagcaaagaatgtgaacggacggagatccagtttggcaccctgaacttgtcagtgctgaatttagagaaaatatctacttcaagtgttgttcttcctgcaaaatcagcaaaaggggaaaccagtgccatcacgaaggagaatgcatgcaataatgaaaagaaagctgcagggtcaagcctttcaaacggtggaccagttctggctaatggatgccctcctgttaatgttcctgctaacaatggtttatttgagaatgtgaagacagaggctgttgtcccaccagttatacctgtcaaaatcatcagcaatccaacaccgcaaatgacgttggagacgcataaggatggcaccaaacccactgaaagcagaaagttaaataaggaaagggaaattactgaaaatggtagtccaattgtcgataaacacattgttgctgctccagcagaagaggcagtcacaagcctaaataagaaagcctctcagaacatgcccttgcttccacatggtttgaggaacacaggaaatatttgctttctgaatgcaactttgcaggcattgctttcatgctcgccttttgtctaccttttacaggatttgaggaaccgcaggatacctaaggttggctacccaactctgagtgcatttgttgagttgatatctcaattggatgtgcctgatgagtcagttatcaagaaaaatgagaaggttattactgttgccgcaaaaccacttaatcctgccatgtttgatgctgttctcagaaactttacaccagatgtgccggctggaataactgctcggcctaggcaggaagatgctcaagagtttttaagttttgccatggatagaatgcatgatgaactgctgaaacttaatggagatggtttgaattcaaaggaggggatggttgtttcatccgctgatgatgatgcttgggagacagttggacgaaagaacaaatctgcaatagttagaactcagagttttgtcccctctgagcttagtgctatttttggagggcagctacagagcgttgtgaaagctgcagctactgttcagcccttcctactgctccatcttgatatattcccagatgctgttcagacgcttaatgatgcacttcgtctgttctctactcctgaatctttggaaggatacagaacagctgcgggaaaggtatctaccttgtcacctttg

SEQ ID NO: 215115 - DNA, 2993 bp, Zea Mays
cactcggggtatacttcgtcttccagcgggtcgaccttggagaaactcgaccagctgcactgatgcgcttagatcaagaggattcgaacgtcccttcaatcactgccgcctcgacgatgatgcactgatcgaggagggctagctcgggagtggaatatctactgacccccgactccgcaaggcatgtccaagccagcagcctcaccaccctcttctttgcctttgcccttgtgtccatccaaccaaccagccacagccactagagaggtcgaatccttactttcttgcaaacaatgggcctccttccaatccacagaatcatcttgctgtgtttttgctcgtctagcttattactgcctcctccagtatcatcggacagccgcatccttcccaacaagccgctgactgttggaagcacgctcacctccgatgacggcacttttgccctgggcttcttctccccgtccaacccggacaagaaacactactactatgttggtatatggtacgccaacattcccaaggacaacgtcgtgtgggttgccaaccgtggaaccccaataatcacggacccttcctctgcaacacttgccctgacgaacacgtccgatcttgttttgtccagcgcggacggccagacgctttggatggcaaacaccagcgctgctgcgtcgtcggagccggagaccaccgccggagaagccacgcttgacaacactggaaacttcatcctctggagttcacagggcgccgtcttatggcaaagcttcgattacccggccgacactcttctgcctggcatgaaatttagagtcacccaccgtaggcatgcactgcaacagctggtctcttggaagggcccccaagacccagccccgggcagcttctcctacggcgcagatcctgacgagctcctgcagcgctttgtcaggaatggctcgagaccatactggagaagtccggtgttgaatagttacttggtagccaggtcatatatcggaattctcaagtccactatctacctcacaataagcaaatacgacgacggtgaggtctatatgtcctttggcgtacccggtggctcctcatcgtcaactgccatgaagatcaaaatggactactcaggaaagatagaaatcctaatctggaacaccaacattttggaatggtacgtcctggaggcacagcctatgaatgaatgcagtacatatggatattgtggtccgtttgggtactgtgataacacagagcttaatgcgacatgcaagtgtctcgacagtttcgagccaataagcaacgaaggcaggagcaatggaagttttacagaaggatgccgccgcaaggagacactaagatgcggcgaagaagatactagtttcttaactttggcggacatgaagattcccgacgagttcgtgcatgtcaagaatagaagcttcgacggatgcacggcggaatgcgctagcaactgctcctgcacaggttacgcttatgccaatttcagcaccacggctttcaccggggatgacacaaggtgcctattatggatgggagatttgattgacacagcgaagcgcactggagatggagaaaatctttaccttcgagtaaacagatcaagtgataaaaagaggaggagcaatatcctgaaaattactctgccagctgtatcaagtttgctaatactcgtattcatgtggtttgtttggatctgttactcccgagtcaaagaaagaaataaaaaaacttggaagaaggtagtatcaggagttttgggcacttctgatgaactcgaggacgcgaaccttccttgtattagcttccgagaaattgtactagcaacgaacaatttttctagctccaacatgcttggacacggaggtttcggacatgtttataagggaacattagaatgtggtaaggcaattgccgtgaaaaggcttagtaagggttctggccagggggtactggagttcagaaacgaagtaattctcatcgcgaagttgcagcacagaaacctagttaaacttcttggtttctgcattcatggagatgagaaactattgatatatgaatacttatcaaacaaaagtttggatgcctttcttttcaattccacaagaaaaccatcgcttgattggtcaaaaagattcaacataatcttagggatagctagaggacttctttatcttcaccaagattcaaggctgaagataatccacagggatctcaaagcaaacaacatattactggatgatgaaatgaaccccaggatatctgattttggtatggcaagaattttttatggcaaccagcaacaaggaaacaccaaccgcgttgttggcacatatggttacatgtcgcctgaatatgctctggaaggtgtgttttctgtcaagtctgatgtgtatagcttcggagttttagttctagagattgtgagtggctcgaagatcacctctacgcacatgacagaacattaccccaaccttatagcctgtgcttggagcttatggaaggatgggaacacaaaagaatttgttgactcgtccattgttgcggatagttgttcgcttgatgagacttcacagtgcatccatatcgggctcttgtgtgttcaagacaacccaaatgctcggccactcatgtcatcagttgtgtctatcctggagaatggagacacatcacttccacctccaaaacagccaatatattttgcagaaagaaactacggaactgacggagcagcagaagctgttgtgaattctgcaaatactatgagtgttacagcgttggagggacgctagacgtatagttcctgcaaataccgatgcaacacatgcatgagaaagcaacatacattgtataggatgaaaacggtcggaaacggtatttattcggtaatcagttttttggtcgtttttatttgattgcgaataaataggatatataatacactatataaatttgtattcttgtttataacattgagc

SEQ ID NO: 215116 - DNA, 1345 bp, Zea Mays
ggccacaccttccgtctcccggcctccgctcgcctgtccctgtctctctctctcctcgctgagtcgccgccagccatgaacaacctcctcacggattcctttgagctcccccggcgggactcctcaagagatgcagacattgaaatgggaatgcatcaagctgatgcttcagacaacttaaaagatttcttgaagaaggtcgatacaattgagagtttaattgcaaagctgacaaatctattgaataagctacagactgcaaatgaggaatccaaagcagttacaaaagcaagttccatgaaagcaattaagcagcggatggagaaagatattgatgaagtggggaaaattgctcgtcaggcgaagacaaaagttgatgaattggaaaaagacaacttatcaaataggcaaaaacctggatgtggaaaaggttctgccgtggaccgatcaagagagcaaactactggtgaaaaagaaattgaaggagcggatggatgactttcagaccttgagagaagcaatcaggcaagagtatcgggaggttgttgaaagaagggtttttactgtaactggtaatcgtcctgatgaagagacaattgatgacttgatagagaccggaaaaagtgagcaaatattcaaagatgctatccaacatcagggaagaggccagatactagacactgttgctgaaatacaggagcgacatgatgctgtaagggatctagagaggaagcttctggagttgcaacagatattcatggacatggcagttcttgttgaggcgcaaggagacatgatcaacaacatcgagacccatgtctcgaacgccaccaaccacatacagcaaggtgtgagcgcgctccagaacgcgaagaaactgcagaggaattcgaggaagtggatgtgctacgccatcatcatactgctggtgatagtcgtggtcattgtcgtcgcagtcatccagccatggaagaagggcacctagcgtggtggtgccttttttcctgtttgtgtaatatgtgtgcagttttttttgtgggtgattcgtgatttgttgttgtacctatagtcgacgcaacaggagctctggcatttcgattcattctgtctagtgaaaggacactgccatcatatgccgataaaaataacgcttcgtatccgtcggtgaaaagattgatctctccacttggtctgggtgtgcagtgtgctgccgccccttgccgtcgtggacatgggatggcgccaggtgttcactgggatccatggagctactgccatagattagatttgtcctcatcatcaacatgctccacaatcccaaaatcttggatttgctgttgctcga

SEQ ID NO: 215117 - DNA, 7906 bp, Zea Mays
tcagtcggatttggaggagtcgaataaacaaggaaactcctcccggcccaaaaagcacttcacttgcaacagtccccgtcagggagggagcattgctgtgcgggatggcgataaggaagagcggaggcggtggcggggtgggggatgtggcgcggcggctgctgcttctggcctgctgctgcatttggcctggtggacggatcttcactgctgcggacactgaccccaacgatcttaatgtcctcaatacgctcttcaccagtctgaattctcctgggcagctcagagcttggcaggcgaatggcggtgatccttgtggccagtcatggcagggcattacttgctcaggatcaggggtcactaaaatcctattaccaaacttgtcactcaccggaaatctggcctacaacatgaataacttgggttcattagttgagcttgacttgagccaaaataaccttggtggtggaggccaaatacagtacaatcttcccaatgtgaagcttgagaaactcaatcttgcaggaaatcaatttggtggaaatttaccctactcaatttcgacgatgcctaatcttaagtatttaaaccttaatcataaccaactacaaggaaacatcactgatgtattttccaacctttatagtttgtcagagctggatctctcctttaattctcttactggtgatctaccacaaagtttcactggattgtcaagcctgaaaagaatgtatttgcagaacaaccaatttactggttatatcaatgtcttagccaaccttccccttgaaaccctgaatgttggaaacaaccatttcactggttggattcccagtcagcttaagaagataaacaatctacagaccgacggaaattcttggagcacaggaccagcgccacctccacctccatatacagcgcctcctcctccaaaccattggaatggcgcgggtcagaatgatgatggttcatcaagttctggtggaagacctgggataggtggtggaggtgtagcaggaatcattatatcattgctgattgttggatcagttgttgcattttttctaatcaaaagaagaaaacacaaagctattatggaagaacaatttgaacagcatcagccgttcacttccttcccttcaaatgaagttaacgacatgaagcctatctatgagtccaccacagtagacatagagtctttggcttcacctgcttcgattaatctgaaaccacccccgaagatagaacagaacaaatcatttgatgatgatgatgatttttcaaacaagactgctgcaaatagaagtaatataacacctatgaaggcaactgtttattcagttgcagatctacagatggcaacagatagcttcagcttcgataaccttgttggagagggtacttttggacgtgtttacagggcacagttcaatggtggaaaggttctggccatcaagaaattagacattactgtgatgccatttcaatcgtctgatgactttgctgaactggtctcgaacatttcaaaattgcaccatccgaatctgaatgagcttgtaggctattgcatggaacatggccagcacttgcttgtgtatgatttccataggaatggatcgcttcatgatctactccacctttcagatgagtacagcaaggcacttagctggaactctcgcatcaagatcgcactcggctctgcccgtgcactggagtaccttcatgaaatatgttctccatccatcatccataagaatttcaaggcatcaaatattttgctggactcagaattcaatccacacctttcagatactggacttgcaagcttcattcctgatgctgaattccaggcagcagaacaaagtgccggatacactgccccagaagtggacatgaccggtcagtacaccctcaagagtgatgtttacagctttggagttgtcatgcttgagctactgacaggacgtagaccatttgacagctctagacccaggtcagagcagtcacttgtgcggtgggcagcacctcagctgcatgacatcgatgcattggacagaatggtcgatcctgcactcaagggtctatacccagccaaatctctatcccgatttgctgatgtcctcgccctgtgtgtccagcctgaaccagaattcaggccaccaatgtcagaggtggtgcaagcattggttcgacttgtgcagagggccaacatgacgaagaggatgcttgatggaggagatacttctcgtggaccagatgatcaggaccaatatttcatatgacaagctgaactcgagcttttcagctacctctcagattgtatttatctcgtctcgttccactagcgcccggcagagacataatcacacaagtggaagaaacagaactttgtcagcttcgccagtacttggtttgacagaaaactgaaaaacacatatggccaccttcttttcagcaggagttcacttttaagtgtctatgcagacatgtcagtaacctgtaaggtactaaggcatcttggttttggataagtttggagggacatcatttgtgggcttctatcttcgtctagcactcagggctgaacatgcaggactgctcacaggtctctcctagaatccatctccatcgggtctccgcaacaacgaacaaaagtctaatgtttatcccattcaatgtgggcatgaggagttggaagtggttcagggcctcctcccatgtgacatctcagctcttccttgtagatacctgagactgtcgttgtccttgaaaaatctcaccaaggatcagttgcagcctattgtggatagaattgttgatcgactcctaggatggaaagcagatttgatgacaagggctggtagaaaagtgcaagtacaatatgtgcttactggaatgcttatatatctcgttatggcgataaatatcccctcttggactatcaaggctattgaaaaaattagaaaatgtttcttagggagggggcgcaaggaggtcaaaggagggaattgcctggttgcttggggcagagtttgtagacctctccagctgggcggtcttggcatttgtagtcttaagaagctcagttgggccctgcgcatgcggtggctatggctccaaaagaccgagcctagcagaccctagtgcagcctaccaatctaggtgccggacaaagcaagggctttcttctcggtggtgttgatttcaaaagttggtaatggggcaaatactttgttttggattgataaatgggttcatggatagaaaattgcaaatctagtacctagattatttgtagtcattccgaaaagaatcactaacagaagaacggtttaggagggcgttgacaaatagaagatggatttcagatatcataggaactctttctgtggtggtcttagtggatcatcttcatctctggaatcagattttagattttgagctattactagatgtggaagataagcatatattcagtattgctgctaatggggcttattcggctaaggctgcatatgaagtgttgttccctaggtctgttcatttcagtcactataaaagagtttgaaaaacttaggcccactccaaatgccacttcttcctttggctgacggcatgcttatcaaggcgtcgccttagcgtcgctttagcgctaaggctcgcgcagaaagcagagtgtctagcttgccttgccacgatgcgtaaggcgtccgccccgtcctaaggcgtcggcgaggtgttggcgaggcgacgccttaggggtagatagggttttgagtgggggtttcagttaggtggacgcacgtgtacacatcggttcgggtcagagcttgaggcggcggcggctgggaacgtctttgctagtagtggcgtccttcctcaactccggcggcgcgtgggtgtgctcctcccttagctccggcggcgtgtgggcgtggagcagctgcgctcacggcggcacgccagcgagctccctcagccctctctttatgatcctatggctgatccgaagtggagagcaaagtccaatgatcccggatggaagtatgggtattggacagaaattgggaaccgagataaggtcacatgcaacctttgcaagaccgtgacaaccggaggaatcaaaaggttgaaagaacaccttgcgggtggttttgcggatacattaatgtgttctaagacaacaacagagattagaaaagaaatgtaagcatatttggacaagaataagagatgcagacctatttttcttgatgaggatgatggtcatgagcagcaggagcagcaggatactacttatgtacatcaacctagcttggggacagccgctaaaaggaagagagctgcatttcaatttagaacagcagctccacaaccatccaacatggaaaaagaaaaaagaaaggttgcaaccatgcttcggagaactcccaaacaagttgtggatgacaggcgttcctcagggtcacaccaaaccaccatagaggctgcactgaagccaaaggctgacagggaatatgtgaatgagcaatgggcactgtggttctatgagtgtggcattatgccatcagttcttgacaatttcaggttgcttgtgaagctactgcacaatatggttccggttatgtgcctcctagtttccatgatttgagggagcctttgcttaattcatgtgtgaagaggacaaacaacatgagagctgagcatgagatagcatggaacaactatggctgcactctaatgtctgatggatggaatgatagaaggggtcgtcagctaatcaacttccttgatcgcagcccagaaggtacttatttcatggaatctgttgatgcatcaaatgtacaacataatgcatatatgctagctgatttgcttcaggagagaattgataagattggaagagataaggttgttcaactagtcactgataatggtgctaattatatggcagcggacaggattctaatggactggattccaacattattttggacaccttgtgctgcacattgtttggatctcatgttggaagatattggcaaattgaaagacttcaagaaacctattgcatatgccaaaagggtgaccacttttatttatagacatggaagaattttaagtgcaatgagggagaagacaagtgggatggatctggtaagaccagcagcaactcgatttgccacatacttccttacattgaagagcttacacaaacattgatatgccttgagagctctcttttcaagtgatgaatggaagaacaacaaattagcgaagacagaggcaggcaagagtgtgtacaacattgttctatctaaggcgttttggactacagttgaagattgccttagagcttcggcgccacttcttattgtgcttagggctgttgatggtgatgaaaaaccagccatgccagaagttgctgcactcatgaatgttgtaatagagaagataaggcttagctttcctacccaaaacaagcagacattgttgaaaaaaatcatggacatcattgagcgccggtgggtgacacaaatggaccatccattatatggagctgcactctatttgaacccgagaaagttttttccatccgaaagaagggggattctagatatgttgcagagctaaggagttgtttcaatgatgtactagcaagaatggagcccgatgaagagattaggtccaagattgatgagtatgacatgcatcatgaagaccaaagaggacctatcttttctaacaagctggcactcgaaaatattcaatcaaaaagccctcgcatttgaactacaaagatttgtgatgcgtgtggttagcctttgtgcttcatcatcgggttgtgaatggatttggagtacatttgaatttatgcatacaaagaagagaaatcggttgttgcgcaagaggttgaatgacttggtcttatctgcctatttcatgggaactcaacccaccaaatggtcatgttggagacacccgctgtgcctgtgcggctgtggtcctttggcaaatccttagagttgaattgtgacggcagttgatatccttagaccttcgggaaagcaaaaagcgataaagagatcgcagatggatattgtgctgtagcactttcagatggtggttcgtgtcagtcgattaatccactcccacatgagaagaattgtatattgtgctccctgaactctatcaggagagctgctgtagcagtcactggacatcgataatctcgaaggacaaggcggcggcggtgcagatctttctcccttttcttgcgggcggcaaaggagagagactgcgagccaaggaacaggccaacaaatatctgaggcccgatattttctcctgccccagccacgtggaaaagcgccgtcacgtaggcgtaaagctcccgtccagtccagggcccggtcggctcggctgccgatccttcttcaatccctcgcctgcaactggctctctgtccccttctgctccccccacggttccccagagcccgagccaaatctaggggcttccttcatccgagcgtggtttcaattctaggggtagtcacctcacctgaattccgcccaaataaattcgtcgctgccttgtgatccttggggtttccttggttcttgagttgcgatcttctgctgcctggttaaaatatcgaaaggggatttttttttaaaaatctgctcatcgaggaagcagggaagacaagaattgttgcatcggataaaggtcgggtgaaaatacaagcaaatcctgggaactcgcgtccctttgctaggtggttctttcctgatacaaagaacacaatgggcgatgtgtccttgaacggacccattaaggctgctgagccaggtgccggtggcattgccaagggcaatcaagttctggacacgatgtccgccgggtggacagacgagagacacaggctgtatataagctctatggaggcctctttcgtcgatcaactgtacaaccacgggagccgtccgcgcaacgcaaacggcaccgccttcaaggctctccgcagggagtacgtcgagtatgagaagaccgatgctcctgtgcgaaggggggctaagtgctgcggcgttcctgcaaatccttggatgcagcatttcaggccacgtagtgatggcggtaataacgcgcgaggcgatgggctcggggattctgtgggcgatcttgaatctggcactgaggcaaaccggaagagcctctcagcgtctcatggaagggaacgggacgcttgtgagggagaaccccagcttctccatgaaagtagagaggtctctgatcaaaattttgctgacgacgaggctgaagctgaaacagaatcaatgaaagcatacaagaaaaggagattaagcaggacaatgatcaactaaatttgcagggtcaattagcttagcctgttgcaggaattgagatgactgtcctaaaaggaggcagtaagatgatgggacatgtcttacgaaattttcagctgttgcctcttggtagccaaggcactttgaatccgaaggaaggtgttgaagggtagttgttagtgatcttgtgatgatataacgagctctggagcagttagcatcggcattttagtggattatgttcttgttatgtgtatctgtctatttttcagtcctcatcggtagtgctgcatagtacctcgctctctcgtcagaaggatattaggctaggtcactgttattaaatttttcaataacagtgaagtgtacatgtgtttgccaaatggtgagaatcattattgatttccaattcacaaactattctttatgcctcactccgtggatgtcgcggacatgtaacatggtcccggaaggaaggtacagcatacgacgtgcttgctgttgaacgatgatctttttaaaaaagaaaaaaaaaa

SEQ ID NO: 215118 - DNA, 711 bp, Zea Mays
atggccaaggcagcaaggccaacagcccaacatggcaacatggtctggtctgcacggatggcatctgcaagtggcagtgggtgcgcaagcactggagcatcccttgctgctgcgaacactctagttgtggttgtgcaagaaacaactccagttaatagaggtggagaaggagaagatggagaaagaacaactgatattggagtgaaagagtctgatacaaagaaaaggaaaccaaaaagaccaacctctggggtttgggactacttcatcaagtccacagtgacagagaagggagataagggcaagaccgaggaacaaatttgggcaaaatgcaagaagtgcaagttcaaaactcgtggtgaatcatcgaggggcacaactgtcttctggaaccatttgaaatcaaggcactacatacataaagggcggcaagaactacaagttcagaaaggtgaagggaacaatgatattgttcaaaatttcaagtatgatcctgaagctagcttgaggaagttccatatggcaatagttatgcatgagtacccctttaagatggttgaacatgaatattttgttgatttcatgaagtctttgcatccacactttacattcttgtgccgcacaaccactaggaatgagataatgacaatgtacatggatgaaaagaaaaaattgtttgagcagcttaaatccctttcttgccgattttct

SEQ ID NO: 215119 - DNA, 1714 bp, Zea Mays
atggaagtcgctggacgggggatagggttgtggaagccgccggctagggggagaggcggaggaggccgccgtcgttggggtctggaggaggccgccgtcggtggaggtatggaggaggccgccgtcggtctggagaacgaagaccgtggttctatcctctgcttttgcaagtgtctatgtgtaaaccctatctgctcatcgttggctgcggcaacaggggtacaccgcaaggcagggaggagaaacacacacgcaaagactcgcgggagatcggatacccaggaccaggagaagacgcgcggcccgctccgcttcgctgccccacacccccacctgcccctgctcctcgaaccgtccgccgttgcgttcgacatgggcgacccgccggcgctcaagaggcccaaactcgagaagggcgacaatgactccacctactgcccccgctccgcttccaatggcgcgggcgccaacggcccaccgccgcgtgacgacgtggaggaggatgacatctcggaggaggcggtcatcgccctcatcgcgcaccgcgagcgcgacgtcgagcgctgcaagctcaagctgctccactaccagtccctgctggacgccgcggagatgaagctggaagaggcacactcgcggctcgccaggttccgagatcgcaagccgccgccaacccggtcggagcccaagctaccgacgccgccgatccagagggaacccaagccatccccgccgccaatccggagggatctcaagccatcgccgcagccaccagagaagaaggctccatcgcccgcgccgcagccgtcggcgagcccgcagcttgtcatcccagggaccaacaaccgaccggccccgcgccctcagcccatgcctggcttgaagaaagccgctgccccgtcatcgtcttcatcacgggcgccgctggaacggtcaaggaaagaggagaagccgcccaagagaaagattgaacagaaggaacatcggaacttgattccgagtgtcaggaaatcatctgcgactgtgcttaaatttcaaggtggcaatttggtctcgagccaacacaggaggaagcttaggtgtctcgagctatgccctgctaatgatcagctcgttgttaccagtgcgctggatggattagttactttatggcaagtggagactagaggttttgcgattcccttgttttcgacctgcaacgagtcagcaagccaaggaaggggggagggcggtccgctcgaggcctcccgctgctgctcctgttgctgtacccgttcctgcccgaggagagccggtggcgcacaagctatagtggaggacctgccatcgataggcgacttgaagcggatgtgggtgcgggtcaagaagctgtgtggcggcatcacgagcaaggcaccggtgggcattgcgttggtgttgggcccggtgccactggctgtgaagctggtgcatgatgaccagttgcacctgccgcagctgcagattgagttctgcactgctgctgctgaatctgatgcattcacacagttggtggacaaagcaccagccgagtatgtgtggctcatggcgaagctggtgcagtcactacaggtggtgcagagcagcacgtcctggagcgagagcaaggaggacttcacactttctttaagcgtgtgggcgtggtgagtgaggcagcggcgagcgagcgctttcaggcggtccgccacccccacat

SEQ ID NO: 215120 - DNA, 1160 bp, Zea Mays
atgtccacaccgccagccaaagatgaagtgggaagactatagaacttgatgatgtcacattccaccagtgtgtcaacttaacaagatttaactcagaaaagacagtcagtttcgtgccacctgacggtgaatttgagttgatgaagtatcgaatcacagagggtgtaaaccttccattccgtgttctgccgacaatcaaggaattgggccgaacacgcatggagatcaacgtgaaagtcaagagtgttttcggtgctaagatgtttgcacttggtgtcgttgttaaggttccagttccgaagcagacagctaagactagtttccaaacaacatcaggcaaagcaaaatacaatgcttcgattgattcactggtgtggaagatcaggaaattccctgggcagactgaggcaactatgagcgcagaggtggagttgatttctactatgggtgaaaagaagtcatggaacagaccacctatccagatggaattccaggttccaatgttcactgcttctggtttacgtgttcgcttccttaaggtttgggagaagagtggttataacactgttgagtgggttcgctacatcacaagggctggatcatatgagataaggtgttagcaacaaatccatacaagatcaagatattattgacaaatgatattcattggtctccattgagcagctatccacagagatcaatctgtggcatcatgcatgatcataaagcgcatatattgtgacacaagtatctgaaactttgtacttcaacagagggtggggcagggcagatcagacaattttctgtgtttcttatttccattgtagtctgggatctctgttcttccctccatgccctgtttgtagtagggattattttttgctcgtatatttggctgtagctttccttgtttgttgatcaatacacctgttcagtttgtattgttttctccctcaaatggatgtatggattcacttgcataacagtgtgaacaaacattcgctgccaaagatctggtacgttgttagtgtttgacaattgtagtgtctgataggaaggtacattgtgcccttaaatattgctgtatataaagtttatttgattgtgatgattgccggttttggcgcttatgagtcgagcactgcctcggcaagatatta

SEQ ID NO: 215121 - DNA, 1178 bp, Zea Mays
cataatggtacctgccttgtttcagcgcttgcggtactatgaaatgtgggaagactatagaacttgatgatgtcacattccaccagtgtgtcaacttaacaagatttaactcagaaaagacagtcagtttcgtgccacctgacggtgaatttgagttgatgaagtatcgaatcacagagggtgtaaaccttccattccgtgttctgccgacaatcaaggaattgggccgaacacgcatggagatcaacgtgaaagtcaagagtgttttcggtgctaagatgtttgcacttggtgtcgttgttaaggttccagttccgaagcagacagctaagactagtttccaaacaacatcaggcaaagcaaaatacaatgcttcgattgattcactggtgtggaagatcaggaaattccctgggcagactgaggcaactatgagcgcagaggtggagttgatttctactatgggtgaaaagaagtcatggaacagaccacctatccagatggaattccaggttccaatgttcactgcttctggtttacgtgttcgcttccttaaggtttgggagaagagtggttataacactgttgagtgggttcgctacatcacaagggctggatcatatgagataaggtgttagcaacaaatccatacaagatcaagatattattgacaaatgatattcattggtctccattgagcagctatccacagagatcaatctgtggcatcatgcatgatcataaagcgcatatattgtgacacaagtatctgaaactttgtacttcaacagagggtggggcagggcagatcagacaattttctgtgtttcttatttccattgtagtctgggatctctgttcttccctccatgccctgtttgtagtagggattattttttgctcgtatatttggctgtagctttccttgtttgttgatcaatacacctgttcagtttgtattgttttctccctcaaatggatgtatggattcacttgcataacagtgtgaacaaacattcgctgccaaagatctggtacgttgttagtgtttgacaattgtagtgtctgataggaaggtacattgtgcccttaaatattgctgtatataaagtttatttgattgtgatgattgccggttttggcgcttatgagtcgagcactgcctcggcaagatatta

SEQ ID NO: 215122 - DNA, 13303 bp, Zea Mays
atttctcctcgactcgtccaagacaaggaaagtaggaaaccgcctgccctgcgtgtgggctgtctgctgtgttgctagcccagtactttctcttctcgctcacgcggcacgccgagcaaggggaccgacaggcggagcgcttctcagcccctccgcaccttcgggtctcgcgttggtggcgccggcgggcgctgccgatcgccggcggcggccgagatgttggaggaccaggtcgccttcctgctgcagaagtacctcggcaactacgtccggggcctcagcaaggaggcgctaaagatcagcgtctggagaggtgatgtagagctcacaaacatgcaactgaagccagaagctctcaattcattgaaattacctgttagagtcaaagctggctttcttggttctgtgaagctcaaggttccatggagcaggttgggacaagagccagttttggtttatcttgatcgaatttttatactagctgaaccagcaacacaagttgaaggttgcagcgaggatgctgtccaggaagcaaaaagaagtcgagttagggaaatggagatcaaattgttggagcgccaacagcaactgaaatctgaactaagttcatcatggctagggtctttcattggcactgtaattggaaatatcaagttatccattggcaatattcatatcagatacgaagacgtagagagcaatcctggccacccttttgcagcaggtctggtactttcaaagctttcagcagttacagtggatgaccttggcaaggagacttttgccacaggtggtgatttggaccgagtgaaaaagtctgttgaacttgagagtctggcggtgtattttgactctgatagcagttcttggattgtggataaaccctgggaggatttacttccatcagagtggagtcaggtttttgagtttcaggagcaggatggttccagatctgcttcgaaaaagcatgcctacattttacagcctgtatctggcaaagcaaaatatacaaagatacaacttactgaggcaaagaaaacaggacaagcattgcaaaatactgcagtggatttggatgatgttactctgtcgttgtcgaaggatggctacagggacatgttaaagttggctgataatttctctacattcaatcaacggctgagatatgctcatctccgaccatcttcaccattaaaatcggatccacgagcttggtggaagtatgcatacaaggtggtgactcaggaaatgaagaaagcaagcgggaggctatcttgggagcaattattgagaaatgcaagacttcggaagacatatgtatctttatatgcatccctcttaaaatctgacatgagtcgactggttgttgatgaccatgaggagattaagaggctggaccgtgaacttgatatggaggttattctacagtggaggatgttagctcacaagtttgtagaacagtcggtggaaacataccagtatgctcaacaaaataagaagtcctggtggtcatttggatggactggctcttcaaaggatgaggaagattcaaagagttttactgatgaagattgggaaagactaaatcggattattgggtacaaagaaaccaacgagtatgtcactgatcaacaggatatgaaactgatgcaatttgattttgaaatacgtatgaaacataatgcatcaaagcttaccattgatgattcggagtgccttgctgatctctcatgccaagatttctgctgcaacttgaaaatgtatccggaggcaaaaatatttgatctgaagctgggttcctacaggcttttatctccatatggcctgcttgctgagagtgcaagtgtcatcgattcttttgttggcctcttctcctacaaaccttttgatgagcaactggactggagtttgacagctaaagcttcgccttgttatataacttatttaaaggattcagttgatcaaattgttggcttcttcaagagtagccctaccattagccagaacctggcactagagactgctgctgctgtacagatgacactagatgaagtgaaacggactgctcaacagcaaatgactcgggtgctaaaagatcagtccaggttttcactgaacatggatattgctgctccaaaaattaccgttcctaccaagttccgaccagatgatgtacatgagactaagcttttgcttgaccttggaaatttagttcttcggacagaggaaatatgggatgcctatacttcagaagagcaggatatatatctaaactttaatttggtgcttagtgatgtctctgcatttctggtggatggtgattaccattggaatgaaacatctgatgaaaagaacttgttgccagtaattgacaaatgtgggattgctttgaaacttcagcagatccagttagaaagtcctctatatccttccacaagaatggcgatacgggtgccttccctaggatttcatttctctcctgcacgctatcatcgtttaatggaaattttaaaattttttcaagatggtgctagtgataatagcaattcagatcatgaacacttgtgggatcatgctgactttgaaggatggtcatctcttctcacatggaagggtgttggaaaccgggaagctgtttggcaacacagatatttgcgtctagtgggtccatttctctatgtatttgaaaatttaatgtctacaacgtacaagcaatggttcagtttacgcgggaaacaagttcaccagattctggaagacactggtgctttaattttgttgtttgataatgatgagggacgaaagatatggcagaaccgtttacagggtgctatataccgtgcatcgggttctgcaatttctagctttcctggagttgctctcccatcagaggcccactcattcaaaggcaactttcttgatgttgctgacacagagaaattatttgttgcgggcattcttgatgaattaaagatatgtttttcatgtggctatgagagtaaccacaaactaaaaaaaattctactagctaaggagagcagcctgtttgaatttcgggcagttggtggccaggttgaactctcaatgaaaggtggcaatttactgataggaactattttggggtcactagaaattgaagaccagtattactatccagggagtcctgtgccaaggttcttggcaaggtcttttattaatagcatgcaaactcaagaactcccgtctcttagccgaaagaacagtgcaggacctagaaacaccccattgatgaaaaatgacagtgaggaaaactttttcgaagcatcagatgattttgatgaatttgaaacacctatgcatcaaaagaggactatatcagactattttagcacccagaaatttttgcctactagcgttccttccctacagccgccaacatttaagcgcattcctgatttgataccagatactgaacttcaaactggcaaattcacattggaaggtagtggcactttcaatagttttgtgaaagctcagatagtgatttatgatcaacattctccccagtacaacagcttggataacagggtagttgtaactgttgccactttatccttcttttgccatcggccaactgttattgcaatcatggaatttatgaatgccatcaaccttgcaaacgggtctgatactgataaagataaaagcacttatcctgctactgtagaagatagtgcaattgaggaatctaagtctgatctggaatcagagccatcaataaaacccttactggctaaaggtaaaagcagaatagtttttcatcttacatccagcatggcagaggcacagatattactgatgaatgaaaatggtgaccggcttgctactttatcacaaaataatctctcgactgatataaaggtgttcacatcatcattcagcataaaggctgcactcggaaaccttaaaataagtgatgatagccttcttagcagccacccttacttttgggtttgtgatatgcgaaatcctggaggtcgttcatttgtggagatcgactttagttcatacaatgttggtgatgaagactattgtggttatgactatagccttgtagggcagctttcagaagttagaattgtttacctcaaccgttttgttcaagagattatcagttattttatgggacttgtgccaaaaagttctgatgccgttgtaaagctgaaagacaataagactaactcagagaagtgggttagcaaaaccgatatggaaggatcacctgctctcaaattggatgtttcattcagcaggcctataattgttatgccccgtgaaactaatagtaatgactttttggagcttgatgttctatacataacagtccaaaatgaattccaatggataggtggtgataagaatgagatgagcactgttcacttagacattttaacagttacagtacgggacataaatttagttattggtatgaatatggtgcgtggtgaaaccataattcaagatgtagaaggtctctcctttgaacttcgtagatcattgcgtgatttgagacatcagttgccagtggtggaggcagcaattaaggtggatgttttgaaagcaacactatccaatcgagaatatgaaattatttctgaatgtgcattgtctaacttctctgagacaccacatcctgtgcctactctggatgatcctcgatatggcacttccactactccatcccatgtatcagcttcttcttcagaaagtattcatgtcttgtccgaaggtgcagaaacatggatagctaataaattttctgtctcaataaatctggttgagctttctctgcattcaggatcgacaagagattctcctctggcgagcgttcaggcgagtggagcatggcttttctataaatcaaacacacggggagaaaattttatgtatgctactctcaaaggattttctgtttttgatgatcgtgaaggaaccaaagatgagttaaggcttgccattgggaaatcagcatctgttcgggacacatcatctgttgatggctatgataatcctaatgaacttgattcaggtgaacgaagaatacaaaaggatctaggccttgagccaatcccctcgatgcttattcttgatgccatcttccgaaaatcttcgtcatccgtctctgtctgtgttcagcggcccaagtttcttgtggcacttgacttcttactagcagtaatcgaattctttgtgccatctgctcagagtcttctatccaatgatgaagacaaggaccttttacatatgatcactccagtagtattgaatgatcaaatttatttccaggagcattcaacatttagtctttcacctcagaagcccttgattgttgataatgaaagatttgatcacttcgtatatgatgggaagggtggaaagttatatttgctggatagtgaggggaaaattctctcaagcccttgtactgagagtttcattcatgtgcttgggtgtaagagattgcaatttcggaatgtcactatagtgaatggtgaatatttggattcctgtatctctctcggtgatgatagctgttattcagcatcaaggaatgaccatgtctacttagtaagagaagatgatgggtccttgtcaacccccagcaaggaaattagaggagacagtgttaaaaatgggagtgctgatatatcaaccgaatttattatggaactacaggctattggaccagagcttactttctatagtacatcaaggaatgctggtgaaaacttagcactgtcaacaaaggttattcatgcccacacagatgcattttgcaggcttataatgaaaggcgacagtatggagatgaatggaaacatacttggtttaaagatggagagtaatggcatcagagttatagaaccatttgacatggtcgtgaaatattccaatgcgtctggaaagacaaatttgcatctactagtttctgaaatatatatgaatttttccttcagtattctcagactgtttttagcagttgaggaagaaatttcagcatttcttaggatgtcgtcaaagaaaatttcactggtgtgttaccagtttgacaaagttgcaactatgcaaggtaatgctaatgatcaagtgttatctttctggcgaccgcgtgctccatctggatatgccatttttggcgattatctcacaccaatgaacgagcctcctactaaaggagttcttgctctgaacacaaacattgttagggtcaaaaggcctttatcgtacaaactagtgtggcaatctggttctccaagaacaaacatttttcatcagaaggacttggaggataagatctctaatattgaccagctctgctctgtttggttacctgtggcacctgcgggttatgttgcaatgggttgtgttgcttcatctggaactgctgaaccacctttgtcttcagctttctgtttaactgcttctttggtttcatcatgtaatctaagggattgcattgcactgagggataacactaacatgatattctggcgagttgataatgcttttggttcctttttacctggagatcctgcaagcatgagtgtggatgggaatgcttatgatcttcgacatatgctgttcgacagtgcagactcatcttccaagactgtctctagaaggcaagatagtagaaatgatttctctcaactagagagatcagaattgacctcaggtcggctatttgatgctgtggcaagctttaaactaatttggtcaaatagtgggacctcttcaccaaaaaagctctcaatatggcgtccaatgttgtctgaaggaatgttttactttggtgacatagctgttaacgggtatgaaccaccaaattcaactgttgttcttcgtgatactggtgaagacacttttctcagagctcctgaaggttttgaccttgttggtcgaattaagaagcaccggggcactgagggtgtatcattttggtttcctaaagctccttcaggttttgtggcattaggatgtgttgcatctaaaagttctccaaccaaagaggacttcagtttgttaagatgtattagaaatgacatggtggctggaggtcaattttctgaggaaagtttatgggattcatctaatgctagaacatctgaaccttttagcttatggactgttgataatgatgctggtacgtttcttgtgagaagtggatatagaaaacctccaaagaggcttgcactgaagcttgcaggtccacctacatcaagcagttcagatagcatcattgttgatgccaaaattaaaacattttctgctgtttcctttgatgattatggcggaatgatggtgccattatttggggtgtcctttgacagtgttggactaagttatcatggaggtcctcatcatcttaatgcaactgtgagcttgtcttttgtggccagatcctataatgacaagtatagctcgtgggagccctttattgaaccaacagatgcatttcttaggtaccaattcgacatgaatacaccaggttctcctagacaactccgtattacctcaactcaagaccttaatttgaacatatctgtttccaatacaaacatgttatcgcaagcttatgctagctggaataatattagctgtggtgatgaattgtataagaaggaaaccttttcttctactgagcgaccagttcttgatgttcatcaaagaagaagttattatgttgtcccacaaaataaacttggacaagatatttatgtaagaactactgaaaatagaggttcacttgttactctgttgccctctggggatgataggtccataaaagttccggctttaagggatctatcagattctcatttaaatggaagatctgttaaaccatatcggttgatgataactgccattcttgcggatgcagaggtcaaggatgatgaaggattagaaactggtgaatatatgactgctgtgcggctcttttcagaaaaccattccatatctgttcaacaacagagtgcccgtacttgtgctgctattggagaacacttgtcacagaacaccagaaaggtgaactggaacgaaatgttctttttcaaagtcgaacgtgtggacagctatactctagagcttcttgtgcttgatgctggtaaaggtcaaccagttggtatatactctgctccattggagcaagttgtgcaaaagctccctcctacctctaatccggactctgtcaaatttgatttggctttaggagaccttatgtcaactaagacagtggaacaggaaactgttaaacctagtggaaaaataagatttgcggtacttgtttctggtagagctagtgtacaacaagggaacagagccagtcctgaaagcaagactggatatattcagattagcccttcaaaagaagggccatggacaagcatgaagttgaactatgctgtacctgcagcatgttggaggtttggtaattgtgtgattgctagtgaagcaacagtcaaggaaggcaacagatacgttagcatacgttcccttgtgtcagttactaatacaaccaatttcattgttgatttacgtctaaaaggaagaatttctcaaagtgcacgggcagatgaacagggagacagttttggtaaagaggatcaaatcctgattggaacgctggagcccaattctactattccagtcccactatcaggcctctcacatcctcttatgccctatatgttgcagttaaggccggcaaaacatcatgatcatgaaaattactcctggagtgatgtccaggagaggcgcagtcaaaccgagtttagaaaggaggagatcctagatttatgtatatcagatctgtatgaatcggaaaacttgctattctgctcacaggtagatggcacctcgaattcttgtcatggactgtggttttgcttgagcatagaaggcaaggaaataggcaaagatgtacagatggaaccaatatatgattggtgcatcattattaagtccccgttgtgtttgacatactatcttcccattgctgcacattatactgtcagttctagccacctcgataatgaagattcaagttgctcccttggcaccttaagtccgggtgaggctgtaaaggttcacaatgttgatccaagaaaccctttgtacttatccctggttccacatggaggatgggaactgatgcatgagcctgttgttatatcacatccaacccaagcaccttccaaatttatcaatctaagaagctctttatcaggaagggttgtacagattctgcttgaacaaagcagtgatagtgactatttgatggcaaggcttatcagaatatatgttccctattggatatctttttctagattgcctacacttactctgcgtctcattgatatttctggaaggaaagagaagaggcgccttctttcacgttcacatctggaaaggggtgagaagcaactctatgatataaaacacgatgaattggttgagggatacactatagcgtctggattaaattttaagggattaggacttctatcatctgttggacatggtggacggtttggatctgtgaaagaattgtcgcctcttggcgatatggatggagcagttgatctttctgcctatgatgatgatggaaaatgcatgcatattcttctttgttcaaagccatcctcgtatcaagctgttccaacaaaggttatccatgtacgcccgtatataacattcacaaacagggccggacaagatttgtacttaaaacttagtattgaggatgagccaaaggtcttacatgcatatgactggagggtttcctttatgtactccaaggggactactgacaaactgcaggtccgactagtggatacagaatggtgccaacctctggagatagtaaaagaagacactattgttatagcaatgagaaagcagggtggtactcagaaatttgtaaaagctgagatacgtggttatgaggaaggttcaagattcttgattgtattccgtctgggcccagcatatggaccaatcaggattgagaaccggacgagtcataccacaatcagtacttgccagtctggtttaggggaggagagttggatccaagtgaagccacatgcaaccagaaaatattcttgggatgacccatatggacagaaagttattgatgttagcattgataaaggcgatgatacttgtgtcctatgtgttgacctggaaaatcctattggaagttccaccagttttagggaacatggcctcatgtttactgttgataccagtgacattaagatattgaagtttgctgattacataaggaaagaggaagtatatggattgcctggatctgaactgactgatcaccaaggatcgtcattgaaggaaaatgagacagagccaggtgctggacccttggagctcattgttgaacttggagttgttggaatatctttgattgatcataagccaagagagcttttatacttgcatctgcagaaggttttcgtttcatacttgactggttatgattttgggaccactagcaggtttaaattaatccttggcgagttgcaactagataatcagttgccactgtctacaatgcctgttgttttgtctaccgagagcaggcctgattcaaatcgttctgttttcaaagcaaacgttgctgttagcaatgtaacttctaatggcattcaagtttacccacatgtctatatccgggtaactgatcaaacatggagactaaacattcatgaacctattatttgggcactgtttgacttctacagcaatcttcgttttgtcaccaccatcaacagcacaactgtcacggaagtggatcctgagatacgaatagagctcattgatatttcagagataaggctaaaaatatctctggaaactgcgcctagtcaaagacctcgtggtgtcctaggcatatggagccccatcctatctgctgtgggtaatgcactcaagattcaggtgcatctgaggaaggtcatgcacagaagccggtttatgcggaagagctccatcatccctgctatcacgaaccgaatcaagagagatctgattcacaatccgctacatctaatcttttctgtggattttcttggagtaacaaaatcaactttatcatcacttagtaaaggatttgcagagctctctactgatgggcaatttcttcagctgagatcaaagcaggtttggtcaaggagaatcactggtgttggtgatgggctagttcaagggactgaagcatttgctcagggtttggctttcggggtttctggtgttttaagaaagccagttgagagtgccagacagtatggtgttataggtattgcacctggcattggccgtgcttttgtgggtttcattgtccaacctttaagtggggctctggattttttttcactgacggttgatggaatcagtgctagttttatgagatgtgttaacattttaagtaacaaatctgttccgcagaggataagagatcctcgtgctatacatcgtgatggtatagtaagagactatgacaaatttgaagctgctggccagatggccctttatctggcagaagctagcagatattttgcatgcacggatttatttcgagaaccttctaagtacgcatggtctgattactatgaagaccattttattttaccaagccagaggattgctttagtaactaataagcgggtgatgctgcttcagtgcttggatctagataaaatggacaagaaaccttctaaaatactttgggatgttccttgggaagaagtactttcattggagctagcaaaagctgggtatcagaggccttcacatgtaatcatacatctgaagaattttaggaggtcagagaactttgtaaggcttattaagtgcaacattgacaacgaacgggaacctcaggctctttcactttgctgttcaattcggaaaatgtggagatctcaccaagcagcaatgaaagttataccattgaaggttccatcaggccagcgtcatgtgtattttgtgtcagatgatgataaaaaggaatcccacagtttatctaggcctttgctaagctcgggaggaacctctactgatgttgagcaacagttcataaacaatacagttcactttcagaaaatgtggagcagtgaaccagaaattcagagccgatgcaaactagttgccaagcagattgcggatgacggaagggtgttcagcatatggaggcctctctgccctaatgggtatgtctcaattggtgatattgcgcatgttggcatccatccaccgcattttgctgctgtatacaagaatatcaatgggaactttgcactgcctcttggctatgacctggtttggagaaattgtgctgaggattacaagagccctgtatcaatatggcttccaaggccaccggggggatacgtagctcttgggtgtgttgctgtcccttcattcaaggagcccactcttgactgtgctttctgtgtggatgagagactcgcggaggatgccgcgtatgaggagcaaatcatatgggcctcatcggatgcttacccatggggatgctatatctaccaagttcagagcgcctcaatgcagttcatggcacttcgtgtcccaaaagaacaatctgagctaaggcccaagaagatattggagtcatttctgcagcaagcatcagagactcaaacgtcccgtgcatgaagaagctgcacatgatgcttgtgcgtgcaagagaactcggctgggacaaagggcaagtctcgtgcaagaaagctcgaagaatgccacttctttcggatcactccatttctccgttgtcaaagcatacacagaggacagagccttgcatgccaacactcgggttgacggaagtgttgtatactagaatagtaggttaaaggttgtaaatgtaaagttttgtaacgtttgatatagtttttgtccagctacatttgttaaggcccatgtggacgtgggccatattagttgtggctacatattctactaagaagttctcaggactaatcatactttctctaatttaaggttgttaaggcccatgtggacgtgggccatactagttgtggctatatattctactaagggcccgtttggtaaaacttcagctcctgcttctttagcttcagattctgatcctcgtgaggagctgatcctcctgattttcctagaaaatcagaatcatttttaaaaccgtttggcaagtaaactgattcttgtcttctgagggttggtggcctatggcgattgtctg

SEQ ID NO: 215123 - DNA, 11935 bp, Zea Mays
atgagtcgactggttgttgatgaccatgaggagattaagaggctggaccgtgaacttgatatggaggttattctacagtggaggatgttagctcacaagtttgtagaacagtcggtggaaacataccagtatgctcaacaaaataagaagtcctggtggactggctcttcaaaggatgaggaagattcaaagagttttactgatgaagattgggaaagactaaatcggattattgggtacaaagaaaccaacgagtatgtcactgatcaacaggatatgaaactgatgcaatttgattttgaaatacgtatgaaacataatgcatcaaagcttaccattgatgattcggagtgccttgctgatctctcatgccaagatttctgctgcaacttgaaaatgtatccggaggcaaaaatatttgatctgaagctgggttcctacaggcttttatctccatatggcctgcttgctgagagtgcaagtgtcatcgattcttttgttggcctcttctcctacaaaccttttgatgagcaactggactggagtttgacagctaaagcttcgccttgttatataacttatttaaaggattcagttgatcaaattgttggcttcttcaagagtagccctaccattagccagaacctggcactagagactgctgctgctgtacagatgacactagatgaagtgaaacggactgctcaacagcaaatgactcgggtgctaaaagatcagtccaggttttcactgaacatggatattgctgctccaaaaattaccgttcctaccaagttccgaccagatgatgtacatgagactaagcttttgcttgaccttggaaatttagttcttcggacagaggaaatatgggatgcctatacttcagaagagcaggatatatatctaaactttaatttggtgcttagtgatgtctctgcatttctggtggatggtgattaccattggaatgaaacatctgatgaaaagaacttgttgccagtaattgacaaatgtgggattgctttgaaacttcagcagatccagttagaaagtcctctatatccttccacaagaatggcgatacgggtgccttccctaggatttcatttctctcctgcacgctatcatcgtttaatggaaattttaaaattttttcaagatggtgctagtgataatagcaattcagatcatgaacacttgtgggatcatgctgactttgaaggatggtcatctcttctcacatggaagggtgttggaaaccgggaagctgtttggcaacacagatatttgcgtctagtgggtccatttctctatgtatttgaaaatttaatgtctacaacgtacaagcaatggttcagtttacgcgggaaacaagttcaccagattctggaagacactggtgctttaattttgttgtttgataatgatgagggacgaaagatatggcagaaccgtttacagggtgctatataccgtgcatcgggttctgcaatttctagctttcctggagttgctctcccatcagaggcccactcattcaaaggcaactttcttgatgttgctgacacagagaaattatttgttgcgggcattcttgatgaattaaagatatgtttttcatgtggctatgagagtaaccacaaactaaaaaaaattctactagctaaggagagcagcctgtttgaatttcgggcagttggtggccaggttgaactctcaatgaaaggtggcaatttactgataggaactattttggggtcactagaaattgaagaccagtattactatccagggagtcctgtgccaaggttcttggcaaggtcttttattaatagcatgcaaactcaagaactcccgtctcttagccgaaagaacagtgcaggacctagaaacaccccattgatgaaaaatgacagtgaggaaaactttttcgaagcatcagatgattttgatgaatttgaaacacctatgcatcaaaagaggactatatcagactattttagcacccagaaatttttgcctactagcgttccttccctacagccgccaacatttaagcgcattcctgatttgataccagatactgaacttcaaactggcaaattcacattggaaggtagtggcactttcaatagttttgtgaaagctcagatagtgatttatgatcaacattctccccagtacaacagcttggataacagggtagttgtaactgttgccactttatccttcttttgccatcggccaactgttattgcaatcatggaatttatgaatgccatcaaccttgcaaacgggtctgatactgataaagataaaagcacttatcctgctactgtagaagatagtgcaattgaggaatctaagtctgatctggaatcagagccatcaataaaacccttactggctaaaggtaaaagcagaatagtttttcatcttacatccagcatggcagaggcacagatattactgatgaatgaaaatggtgaccggcttgctactttatcacaaaataatctctcgactgatataaaggtgttcacatcatcattcagcataaaggctgcactcggaaaccttaaaataagtgatgatagccttcttagcagccacccttacttttgggtttgtgatatgcgaaatcctggaggtcgttcatttgtggagatcgactttagttcatacaatgttggtgatgaagactattgtggttatgactatagccttgtagggcagctttcagaagttagaattgtttacctcaaccgttttgttcaagagattatcagttattttatgggacttgtgccaaaaagttctgatgccgttgtaaagctgaaagacaataagactaactcagagaagtgggttagcaaaaccgatatggaaggatcacctgctctcaaattggatgtttcattcagcaggcctataattgttatgccccgtgaaactaatagtaatgactttttggagcttgatgttctatacataacagtccaaaatgaattccaatggataggtggtgataagaatgagatgagcactgttcacttagacattttaacagttacagtacgggacataaatttagttattggtatgaatatggtgcgtggtgaaaccataattcaagatgtagaaggtctctcctttgaacttcgtagatcattgcgtgatttgagacatcagttgccagtggtggaggcagcaattaaggtggatgttttgaaagcaacactatccaatcgagaatatgaaattatttctgaatgtgcattgtctaacttctctgagacaccacatcctgtgcctactctggatgatcctcgatatggcacttccactactccatcccatgtatcagcttcttcttcagaaagtattcatgtcttgtccgaaggtgcagaaacatggatagctaataaattttctgtctcaataaatctggttgagctttctctgcattcaggatcgacaagagattctcctctggcgagcgttcaggcgagtggagcatggcttttctataaatcaaacacacggggagaaaattttatgtatgctactctcaaaggattttctgtttttgatgatcgtgaaggaaccaaagatgagttaaggcttgccattgggaaatcagcatctgttcgggacacatcatctgttgatggctatgataatcctaatgaacttgattcaggtgaacgaagaatacaaaaggatctaggccttgagccaatcccctcgatgcttattcttgatgccatcttccgaaaatcttcgtcatccgtctctgtctgtgttcagcggcccaagtttcttgtggcacttgacttcttactagcagtaatcgaattctttgtgccatctgctcagagtcttctatccaatgatgaagacaaggaccttttacatatgatcactccagtagtattgaatgatcaaatttatttccaggagcattcaacatttagtctttcacctcagaagcccttgattgttgataatgaaagatttgatcacttcgtatatgatgggaagggtggaaagttatatttgctggatagtgaggggaaaattctctcaagcccttgtactgagagtttcattcatgtgcttgggtgtaagagattgcaatttcggaatgtcactatagtgaatggtgaatatttggattcctgtatctctctcggtgatgatagctgttattcagcatcaaggaatgaccatgtctacttagtaagagaagatgatgggtccttgtcaacccccagcaaggaaattagaggagacagtgttaaaaatgggagtgctgatatatcaaccgaatttattatggaactacaggctattggaccagagcttactttctatagtacatcaaggaatgctggtgaaaacttagcactgtcaacaaaggttattcatgcccacacagatgcattttgcaggcttataatgaaaggcgacagtatggagatgaatggaaacatacttggtttaaagatggagagtaatggcatcagagttatagaaccatttgacatggtcgtgaaatattccaatgcgtctggaaagacaaatttgcatctactagtttctgaaatatatatgaatttttccttcagtattctcagactgtttttagcagttgaggaagaaatttcagcatttcttaggatgtcgtcaaagaaaatttcactggtgtgttaccagtttgacaaagttgcaactatgcaaggtaatgctaatgatcaagtgttatctttctggcgaccgcgtgctccatctggatatgccatttttggcgattatctcacaccaatgaacgagcctcctactaaaggagttcttgctctgaacacaaacattgttagggtcaaaaggcctttatcgtacaaactagtgtggcaatctggttctccaagaacaaacatttttcatcagaaggacttggaggataagatctctaatattgaccagctctgctctgtttggttacctgtggcacctgcgggttatgttgcaatgggttgtgttgcttcatctggaactgctgaaccacctttgtcttcagctttctgtttaactgcttctttggtttcatcatgtaatctaagggattgcattgcactgagggataacactaacatgatattctggcgagttgataatgcttttggttcctttttacctggagatcctgcaagcatgagtgtggatgggaatgcttatgatcttcgacatatgctgttcgacagtgcagactcatcttccaagactgtctctagaaggcaagatagtagaaatgatttctctcaactagagagatcagaattgacctcaggtcggctatttgatgctgtggcaagctttaaactaatttggtcaaatagtgggacctcttcaccaaaaaagctctcaatatggcgtccaatgttgtctgaaggaatgttttactttggtgacatagctgttaacgggtatgaaccaccaaattcaactgttgttcttcgtgatactggtgaagacacttttctcagagctcctgaaggttttgaccttgttggtcgaattaagaagcaccggggcactgagggtgtatcattttggtttcctaaagctccttcaggttttgtggcattaggatgtgttgcatctaaaagttctccaaccaaagaggacttcagtttgttaagatgtattagaaatgacatggtggctggaggtcaattttctgaggaaagtttatgggattcatctaatgctagaacatctgaaccttttagcttatggactgttgataatgatgctggtacgtttcttgtgagaagtggatatagaaaacctccaaagaggcttgcactgaagcttgcaggtccacctacatcaagcagttcagatagcatcattgttgatgccaaaattaaaacattttctgctgtttcctttgatgattatggcggaatgatggtgccattatttggggtgtcctttgacagtgttggactaagttatcatggaggtcctcatcatcttaatgcaactgtgagcttgtcttttgtggccagatcctataatgacaagtatagctcgtgggagccctttattgaaccaacagatgcatttcttaggtaccaattcgacatgaatacaccaggttctcctagacaactccgtattacctcaactcaagaccttaatttgaacatatctgtttccaatacaaacatgttatcgcaagcttatgctagctggaataatattagctgtggtgatgaattgtataagaaggaaaccttttcttctactgagcgaccagttcttgatgttcatcaaagaagaagttattatgttgtcccacaaaataaacttggacaagatatttatgtaagaactactgaaaatagaggttcacttgttactctgttgccctctggggatgataggtccataaaagttccggctttaagggatctatcagattctcatttaaatggaagatctgttaaaccatatcggttgatgataactgccattcttgcggatgcagaggtcaaggatgatgaaggattagaaactggtgaatatatgactgctgtgcggctcttttcagaaaaccattccatatctgttcaacaacagagtgcccgtacttgtgctgctattggagaacacttgtcacagaacaccagaaaggtgaactggaacgaaatgttctttttcaaagtcgaacgtgtggacagctatactctagagcttcttgtgcttgatgctggtaaaggtcaaccagttggtatatactctgctccattggagcaagttgtgcaaaagctccctcctacctctaatccggactctgtcaaatttgatttggctttaggagaccttatgtcaactaagacagtggaaactgttaaacctagtggaaaaataagatttgcggtacttgtttctggtagagctagtgtacaacaagggaacagagccagtcctgaaagcaagactggatatattcagattagcccttcaaaagaagggccatggacaagcatgaagttgaactatgctgtacctgcagcatgttggaggtttggtaattgtgtgattgctagtgaagcaacagtcaaggaaggcaacagatacgttagcatacgttcccttgtgtcagttactaatacaaccaatttcattgttgatttacgtctaaaaggaagaatttctcaaagtgcacgggcagatgaacagggagacagttttggtaaagaggatcaaatcctgattggaacgctggagcccaattctactattccagtcccactatcaggcctctcacatcctcttatgccctatatgttgcagttaaggccggcaaaacatcatgatcatgaaaattactcctggagtgatgtccaggagaggcgcagtcaaaccgagtttagaaaggaggagatcctagatttatgtatatcagatctgtatgaatcggaaaacttgctattctgctcacaggtagatggcacctcgaattcttgtcatggactgtggttttgcttgagcatagaaggcaaggaaataggcaaagatgtacagatggaaccaatatatgattggtgcatcattattaagtccccgttgtgtttgacatactatcttcccattgctgcacattatactgtcagttctagccacctcgataatgaagattcaagttgctcccttggcaccttaagtccgggtgaggctgtaaaggttcacaatgttgatccaagaaaccctttgtacttatccctggttccacatggaggatgggaactgatgcatgagcctgttgttatatcacatccaacccaagcaccttccaaatttatcaatctaagaagctctttatcaggaagggttgtacagattctgcttgaacaaagcagtgatagtgactatttgatggcaaggcttatcagaatatatgttccctattggatatctttttctagattgcctacacttactctgcgtctcattgatatttctggaaggaaagagaagaggcgccttctttcacgttcacatctggaaaggggtgagaagcaactctatgatataaaacacgatgaattggttgagggatacactatagcgtctggattaaattttaagggattaggacttctatcatctgttggacatggtggacggtttggatctgtgaaagaattgtcgcctcttggcgatatggatggagcagttgatctttctgcctatgatgatgatggaaaatgcatgcatattcttctttgttcaaagccatcctcgtatcaagctgttccaacaaaggttatccatgtacgcccgtatataacattcacaaacagggccggacaagatttgtacttaaaacttagtattgaggatgagccaaaggtcttacatgcatatgactggagggtttcctttatgtactccaaggggactactgacaaactgcaggtccgactagtggatacagaatggtgccaacctctggagatagtaaaagaagacactattgttatagcaatgagaaagcagggtggtactcagaaatttgtaaaagctgagatacgtggttatgaggaaggttcaagattcttgattgtattccgtctgggcccagcatatggaccaatcaggattgagaaccggacgagtcataccacaatcagtacttgccagtctggtttaggggaggagagttggatccaagtgaagccacatgcaaccagaaaatattcttgggatgacccatatggacagaaagttattgatgttagcattgataaaggcgatgatacttgtgtcctatgtgttgacctggaaaatcctattggaagttccaccagttttagggaacatggcctcatgtttactgttgataccagtgacattaagatattgaagtttgctgattacataaggaaagaggaagtatatggattgcctggatctgaactgactgatcaccaaggatcgtcattgaaggaaaatgagacagagccaggtgctggacccttggagctcattgttgaacttggagttgttggaatatctttgattgatcataagccaagagagcttttatacttgcatctgcagaaggttttcgtttcatacttgactggttatgattttgggaccactagcaggtttaaattaatccttggcgagttgcaactagataatcagttgccactgtctacaatgcctgttgttttgtctaccgagagcaggcctgattcaaatcgttctgttttcaaagcaaacgttgctgttagcaatgtaacttctaatggcattcaagtttacccacatgtctatatccgggtaactgatcaaacatggagactaaacattcatgaacctattatttgggcactgtttgacttctacagcaatcttcgttttgtcaccaccatcaacagcacaactgtcacggaagtggatcctgagatacgaatagagctcattgatatttcagagataaggctaaaaatatctctggaaactgcgcctagtcaaagacctcgtggtgtcctaggcatatggagccccatcctatctgctgtgggtaatgcactcaagattcaggtgcatctgaggaaggtcatgcacagaagccggtttatgcggaagagctccatcatccctgctatcacgaaccgaatcaagagagatctgattcacaatccgctacatctaatcttttctgtggattttcttggagtaacaaaatcaactttatcatcacttagtaaaggatttgcagagctctctactgatgggcaatttcttcagctgagatcaaagcaggtttggtcaaggagaatcactggtgttggtgatgggctagttcaagggactgaagcatttgctcagggtttggctttcggggtttctggtgttttaagaaagccagttgagagtgccagacagtatggtgttataggtattgcacctggcattggccgtgcttttgtgggtttcattgtccaacctttaagtggggctctggattttttttcactgacggttgatggaatcagtgctagttttatgagatgtgttaacattttaagtaacaaatctgttccgcagaggataagagatcctcgtgctatacatcgtgatggtatagtaagagactatgacaaatttgaagctgctggccagatggccctttatctggcagaagctagcagatattttgcatgcacggatttatttcgagaaccttctaagtacgcatggtctgattactatgaagaccattttattttaccaagccagaggattgctttagtaactaataagcgggtgatgctgcttcagtgcttggatctagataaaatggacaagaaaccttctaaaatactttgggatgttccttgggaagaagtactttcattggagctagcaaaagctgggtatcagaggccttcacatgtaatcatacatctgaagaattttaggaggtcagagaactttgtaaggcttattaagtgcaacattgacaacgaacgggaacctcaggctctttcactttgctgttcaattcggaaaatgtggagatctcaccaagcagcaatgaaagttataccattgaaggttccatcaggccagcgtcatgtgtattttgtgtcagatgatgataaaaaggaatcccacagtttatctaggcctttgctaagctcgggaggaacctctactgatgttgagcaacagttcataaacaatacagttcactttcagaaaatgtggagcagtgaaccagaaattcagagccgatgcaaactagttgccaagcagattgcggatgacggaagggtgttcagcatatggaggcctctctgccctaatgggtatgtctcaattggtgatattgcgcatgttggcatccatccaccgcattttgctgctgtatacaagaatatcaatgggaactttgcactgcctcttggctatgacctggtttggagaaattgtgctgaggattacaagagccctgtatcaatatggcttccaaggccaccggggggatacgtagctcttgggtgtgttgctgtcccttcattcaaggagcccactcttgactgtgctttctgtgtggatgagagactcgcggaggatgccgcgtatgaggagcaaatcatatgggcctcatcggatgcttacccatggggatgctatatctaccaagttcagagcgcctcaatgcagttcatggcacttcgtgtcccaaaagaacaatctgagctaaggcccaagaagatattggagtcatttctgcagcaagcatcagagactcaaacgtcccgtgcatgaagaagctgcacatgatgcttgtgcgtgcaagagaactcggctgggacaaagggcaagtctcgtgcaagaaagctcgaagaatgccacttctttcggatcactccatttctccgttgtcaaagcatacacagaggacagagccttgcatgccaacactcgggttgacggaagtgttgtatactagaatagtaggttaaaggttgtaaatgtaaagttttgtaacgtttgatatagtttttgtccagctacatttgttaaggcccatgtggacgtgggccatattagttgtggctacatattctactaagaagttctcaggactaatcatactttctctaatttaaggttgttaaggcccatgtggacgtgggccatactagttgtggctatatattctactaagggcccgtttggtaaaacttcagctcctgcttctttagcttcagattctgatcctcgtgaggagctgatcctcctgattttcctagaaaatcagaatcatttttaaaaccgtttggcaagtaaactgattcttgtcttctgagggttggtggcctatggcgattgtctg

SEQ ID NO: 215124 - DNA, 10969 bp, Zea Mays
atggatattgctgctccaaaaattaccgttcctaccaagttccgaccagatgatgtacatgagactaagcttttgcttgaccttggaaatttagttcttcggacagaggaaatatgggatgcctatacttcagaagagcaggatatatatctaaactttaatttggtgcttagtgatgtctctgcatttctggtggatggtgattaccattggaatgaaacatctgatgaaaagaacttgttgccagtaattgacaaatgtgggattgctttgaaacttcagcagggtgttggaaaccgggaagctgtttggcaacacagatatttgcgtctagtgggtccatttctctatgtatttgaaaatttaatgtctacaacgtacaagcaatggttcagtttacgcgggaaacaagttcaccagattctggaagacactggtgctttaattttgttgtttgataatgatgagggacgaaagatatggcagaaccgtttacagggtgctatataccgtgcatcgggttctgcaatttctagctttcctggagttgctctcccatcagaggcccactcattcaaaggcaactttcttgatgttgctgacacagagaaattatttgttgcgggcattcttgatgaattaaagatatgtttttcatgtggctatgagagtaaccacaaactaaaaaaaattctactagctaaggagagcagcctgtttgaatttcgggcagttggtggccaggttgaactctcaatgaaaggtggcaatttactgataggaactattttggggtcactagaaattgaagaccagtattactatccagggagtcctgtgccaaggttcttggcaaggtcttttattaatagcatgcaaactcaagaactcccgtctcttagccgaaagaacagtgcaggacctagaaacaccccattgatgaaaaatgacagtgaggaaaactttttcgaagcatcagatgattttgatgaatttgaaacacctatgcatcaaaagaggactatatcagactattttagcacccagaaatttttgcctactagcgttccttccctacagccgccaacatttaagcgcattcctgatttgataccagatactgaacttcaaactggcaaattcacattggaaggtagtggcactttcaatagttttgtgaaagctcagatagtgatttatgatcaacattctccccagtacaacagcttggataacagggtagttgtaactgttgccactttatccttcttttgccatcggccaactgttattgcaatcatggaatttatgaatgccatcaaccttgcaaacgggtctgatactgataaagataaaagcacttatcctgctactgtagaagatagtgcaattgaggaatctaagtctgatctggaatcagagccatcaataaaacccttactggctaaaggtaaaagcagaatagtttttcatcttacatccagcatggcagaggcacagatattactgatgaatgaaaatggtgaccggcttgctactttatcacaaaataatctctcgactgatataaaggtgttcacatcatcattcagcataaaggctgcactcggaaaccttaaaataagtgatgatagccttcttagcagccacccttacttttgggtttgtgatatgcgaaatcctggaggtcgttcatttgtggagatcgactttagttcatacaatgttggtgatgaagactattgtggttatgactatagccttgtagggcagctttcagaagttagaattgtttacctcaaccgttttgttcaagagattatcagttattttatgggacttgtgccaaaaagttctgatgccgttgtaaagctgaaagacaataagactaactcagagaagtgggttagcaaaaccgatatggaaggatcacctgctctcaaattggatgtttcattcagcaggcctataattgttatgccccgtgaaactaatagtaatgactttttggagcttgatgttctatacataacagtccaaaatgaattccaatggataggtggtgataagaatgagatgagcactgttcacttagacattttaacagttacagtacgggacataaatttagttattggtatgaatatggtgcgtggtgaaaccataattcaagatgtagaaggtctctcctttgaacttcgtagatcattgcgtgatttgagacatcagttgccagtggtggaggcagcaattaaggtggatgttttgaaagcaacactatccaatcgagaatatgaaattatttctgaatgtgcattgtctaacttctctgagacaccacatcctgtgcctactctggatgatcctcgatatggcacttccactactccatcccatgtatcagcttcttcttcagaaagtattcatgtcttgtccgaaggtgcagaaacatggatagctaataaattttctgtctcaataaatctggttgagctttctctgcattcaggatcgacaagagattctcctctggcgagcgttcaggcgagtggagcatggcttttctataaatcaaacacacggggagaaaattttatgtatgctactctcaaaggattttctgtttttgatgatcgtgaaggaaccaaagatgagttaaggcttgccattgggaaatcagcatctgttcgggacacatcatctgttgatggctatgataatcctaatgaacttgattcaggtgaacgaagaatacaaaaggatctaggccttgagccaatcccctcgatgcttattcttgatgccatcttccgaaaatcttcgtcatccgtctctgtctgtgttcagcggcccaagtttcttgtggcacttgacttcttactagcagtaatcgaattctttgtgccatctgctcagagtcttctatccaatgatgaagacaaggaccttttacatatgatcactccagtagtattgaatgatcaaatttatttccaggagcattcaacatttagtctttcacctcagaagcccttgattgttgataatgaaagatttgatcacttcgtatatgatgggaagggtggaaagttatatttgctggatagtgaggggaaaattctctcaagcccttgtactgagagtttcattcatgtgcttgggtgtaagagattgcaatttcggaatgtcactatagtgaatggtgaatatttggattcctgtatctctctcggtgatgatagctgttattcagcatcaaggaatgaccatgtctacttagtaagagaagatgatgggtccttgtcaacccccagcaaggaaattagaggagacagtgttaaaaatgggagtgctgatatatcaaccgaatttattatggaactacaggctattggaccagagcttactttctatagtacatcaaggaatgctggtgaaaacttagcactgtcaacaaaggttattcatgcccacacagatgcattttgcaggcttataatgaaaggcgacagtatggagatgaatggaaacatacttggtttaaagatggagagtaatggcatcagagttatagaaccatttgacatggtcgtgaaatattccaatgcgtctggaaagacaaatttgcatctactagtttctgaaatatatatgaatttttccttcagtattctcagactgtttttagcagttgaggaagaaatttcagcatttcttaggatgtcgtcaaagaaaatttcactggtgtgttaccagtttgacaaagttgcaactatgcaaggtaatgctaatgatcaagtgttatctttctggcgaccgcgtgctccatctggatatgccatttttggcgattatctcacaccaatgaacgagcctcctactaaaggagttcttgctctgaacacaaacattgttagggtcaaaaggcctttatcgtacaaactagtgtggcaatctggttctccaagaacaaacatttttcatcagaaggacttggaggataagatctctaatattgaccagctctgctctgtttggttacctgtggcacctgcgggttatgttgcaatgggttgtgttgcttcatctggaactgctgaaccacctttgtcttcagctttctgtttaactgcttctttggtttcatcatgtaatctaagggattgcattgcactgagggataacactaacatgatattctggcgagttgataatgcttttggttcctttttacctggagatcctgcaagcatgagtgtggatgggaatgcttatgatcttcgacatatgctgttcgacagtgcagactcatcttccaagactgtctctagaaggcaagatagtagaaatgatttctctcaactagagagatcagaattgacctcaggtcggctatttgatgctgtggcaagctttaaactaatttggtcaaatagtgggacctcttcaccaaaaaagctctcaatatggcgtccaatgttgtctgaaggaatgttttactttggtgacatagctgttaacgggtatgaaccaccaaattcaactgttgttcttcgtgatactggtgaagacacttttctcagagctcctgaaggttttgaccttgttggtcgaattaagaagcaccggggcactgagggtgtatcattttggtttcctaaagctccttcaggttttgtggcattaggatgtgttgcatctaaaagttctccaaccaaagaggacttcagtttgttaagatgtattagaaatgacatggtggctggaggtcaattttctgaggaaagtttatgggattcatctaatgctagaacatctgaaccttttagcttatggactgttgataatgatgctggtacgtttcttgtgagaagtggatatagaaaacctccaaagaggcttgcactgaagcttgcaggtccacctacatcaagcagttcagatagcatcattgttgatgccaaaattaaaacattttctgctgtttcctttgatgattatggcggaatgatggtgccattatttggggtgtcctttgacagtgttggactaagttatcatggaggtcctcatcatcttaatgcaactgtgagcttgtcttttgtggccagatcctataatgacaagtatagctcgtgggagccctttattgaaccaacagatgcatttcttaggtaccaattcgacatgaatacaccaggttctcctagacaactccgtattacctcaactcaagaccttaatttgaacatatctgtttccaatacaaacatgttatcgcaagcttatgctagctggaataatattagctgtggtgatgaattgtataagaaggaaaccttttcttctactgagcgaccagttcttgatgttcatcaaagaagaagttattatgttgtcccacaaaataaacttggacaagatatttatgtaagaactactgaaaatagaggttcacttgttactctgttgccctctggggatgataggtccataaaagttccggctttaagggatctatcagattctcatttaaatggaagatctgttaaaccatatcggttgatgataactgccattcttgcggatgcagaggtcaaggatgatgaaggattagaaactggtgaatatatgactgctgtgcggctcttttcagaaaaccattccatatctgttcaacaacagagtgcccgtacttgtgctgctattggagaacacttgtcacagaacaccagaaaggtgaactggaacgaaatgttctttttcaaagtcgaacgtgtggacagctatactctagagcttcttgtgcttgatgctggtcaaccagttggtatatactctgctccattggagcaagttgtgcaaaagctccctcctacctctaatccggactctgtcaaatttgatttggctttaggagaccttatgtcaactaagacagtggaacaggaaactgttaaacctagtggaaaaataagatttgcggtacttgtttctggtagagctagtgtacaacaagggaacagagccagtcctgaaagcaagactggatatattcagattagcccttcaaaagaagggccatggacaagcatgaagttgaactatgctgtacctgcagcatgttggaggtttggtaattgtgtgattgctagtgaagcaacagtcaaggaaggcaacagatacgttagcatacgttcccttgtgtcagttactaatacaaccaatttcattgttgatttacgtctaaaaggaagaatttctcaaagtgcacgggcagatgaacagggagacagttttggtaaagaggatcaaatcctgattggaacgctggagcccaattctactattccagtcccactatcaggcctctcacatcctcttatgccctatatgttgcagttaaggccggcaaaacatcatgatcatgaaaattactcctggagtgatgtccaggagaggcgcagtcaaaccgagtttagaaaggaggagatcctagatttatgtatatcagatctgtatgaatcggaaaacttgctattctgctcacaggtagatggcacctcgaattcttgtcatggactgtggttttgcttgagcatagaaggcaaggaaataggcaaagatgtacagatggaaccaatatatgattggtgcatcattattaagtccccgttgtgtttgacatactatcttcccattgctgcacattatactgtcagttctagccacctcgataatgaagattcaagttgctcccttggcaccttaagtccgggtgaggctgtaaaggttcacaatgttgatccaagaaaccctttgtacttatccctggttccacatggaggatgggaactgatgcatgagcctgttgttatatcacatccaacccaagcaccttccaaatttatcaatctaagaagctctttatcaggaagggttgtacagattctgcttgaacaaagcagtgatagtgactatttgatggcaaggcttatcagaatatatgttccctattggatatctttttctagattgcctacacttactctgcgtctcattgatatttctggaaggaaagagaagaggcgccttctttcacgttcacatctggaaaggggtgagaagcaactctatgatataaaacacgatgaattggttgagggatacactatagcgtctggattaaattttaagggattaggacttctatcatctgttggacatggtggacggtttggatctgtgaaagaattgtcgcctcttggcgatatggatggagcagttgatctttctgcctatgatgatgatggaaaatgcatgcatattcttctttgttcaaagccatcctcgtatcaagctgttccaacaaaggttatccatgtacgcccgtatataacattcacaaacagggccggacaagatttgtacttaaaacttagtattgaggatgagccaaaggtcttacatgcatatgactggagggtttcctttatgtactccaaggggactactgacaaactgcaggtccgactagtggatacagaatggtgccaacctctggagatagtaaaagaagacactattgttatagcaatgagaaagcagggtggtactcagaaatttgtaaaagctgagatacgtggttatgaggaaggttcaagattcttgattgtattccgtctgggcccagcatatggaccaatcaggattgagaaccggacgagtcataccacaatcagtacttgccagtctggtttaggggaggagagttggatccaagtgaagccacatgcaaccagaaaatattcttgggatgacccatatggacagaaagttattgatgttagcattgataaaggcgatgatacttgtgtcctatgtgttgacctggaaaatcctattggaagttccaccagttttagggaacatggcctcatgtttactgttgataccagtgacattaagatattgaagtttgctgattacataaggaaagaggaagtatatggattgcctggatctgaactgactgatcaccaaggatcgtcattgaaggaaaatgagacagagccaggtgctggacccttggagctcattgttgaacttggagttgttggaatatctttgattgatcataagccaagagagcttttatacttgcatctgcagaaggttttcgtttcatacttgactggttatgattttgggaccactagcaggtttaaattaatccttggcgagttgcaactagataatcagttgccactgtctacaatgcctgttgttttgtctaccgagagcaggcctgattcaaatcgttctgttttcaaagcaaacgttgctgttagcaatgtaacttctaatggcattcaagtttacccacatgtctatatccgggtaactgatcaaacatggagactaaacattcatgaacctattatttgggcactgtttgacttctacagcaatcttcgttttgtcaccaccatcaacagcacaactgtcacggaagtggatcctgagatacgaatagagctcattgatatttcagagataaggctaaaaatatctctggaaactgcgcctagtcaaagacctcgtggtgtcctaggcatatggagccccatcctatctgctgtgggtaatgcactcaagattcaggtgcatctgaggaaggtcatgcacagaagccggtttatgcggaagagctccatcatccctgctatcacgaaccgaatcaagagagatctgattcacaatccgctacatctaatcttttctgtggattttcttggagtaacaaaatcaactttatcatcacttagtaaaggatttgcagagctctctactgatgggcaatttcttcagctgagatcaaagcaggtttggtcaaggagaatcactggtgttggtgatgggctagttcaagggactgaagcatttgctcagggtttggctttcggggtttctggtgttttaagaaagccagttgagagtgccagacagtatggtgttataggtattgcacctggcattggccgtgcttttgtgggtttcattgtccaacctttaagtggggctctggattttttttcactgacggttgatggaatcagtgctagttttatgagatgtgttaacattttaagtaacaaatctgttccgcagaggataagagatcctcgtgctatacatcgtgatggtatagtaagagactatgacaaatttgaagctgctggccagatggccctttatctggcagaagctagcagatattttgcatgcacggatttatttcgagaaccttctaagtacgcatggtctgattactatgaagaccattttattttaccaagccagaggattgctttagtaactaataagcgggtgatgctgcttcagtgcttggatctagataaaatggacaagaaaccttctaaaatactttgggatgttccttgggaagaagtactttcattggagctagcaaaagctgggtatcagaggccttcacatgtaatcatacatctgaagaattttaggaggtcagagaactttgtaaggcttattaagtgcaacattgacaacgaacgggaacctcaggctctttcactttgctgttcaattcggaaaatgtggagatctcaccaagcagcaatgaaagttataccattgaaggttccatcaggccagcgtcatgtgtattttgtgtcagatgatgataaaaaggaatcccacagtttatctaggcctttgctaagctcgggaggaacctctactgatgttgagcaacagttcataaacaatacagttcactttcagaaaatgtggagcagtgaaccagaaattcagagccgatgcaaactagttgccaagcagattgcggatgacggaagggtgttcagcatatggaggcctctctgccctaatgggtatgtctcaattggtgatattgcgcatgttggcatccatccaccgcattttgctgctgtatacaagaatatcaatgggaactttgcactgcctcttggctatgacctggtttggagaaattgtgctgaggattacaagagccctgtatcaatatggcttccaaggccaccggggggatacgtagctcttgggtgtgttgctgtcccttcattcaaggagcccactcttgactgtgctttctgtgtggatgagagactcgcggaggatgccgcgtatgaggagcaaatcatatgggcctcatcggatgcttacccatggggatgctatatctaccaagttcagagcgcctcaatgcagttcatggcacttcgtgtcccaaaagaacaatctgagctaaggcccaagaagatattggagtcatttctgcagcaagcatcagagactcaaacgtcccgtgcatgaagaagctgcacatgatgcttgtgcgtgcaagagaactcggctgggacaaagggcaagtctcgtgcaagaaagctcgaagaatgccacttctttcggatcactccatttctccgttgtcaaagcatacacagaggacagagccttgcatgccaacactcgggttgacggaagtgttgtatactagaatagtaggttaaaggttgtaaatgtaaagttttgtaacgtttgatatagtttttgtccagctacatttgttaaggcccatgtggacgtgggccatattagttgtggctacatattctactaagaagttctcaggactaatcatactttctctaatttaaggttgttaaggcccatgtggacgtgggccatactagttgtggctatatattctactaagggcccgtttggtaaaacttcagctcctgcttctttagcttcagattctgatcctcgtgaggagctgatcctcctgattttcctagaaaatcagaatcatttttaaaaccgtttggcaagtaaactgattcttgtcttctgagggttggtggcctatggcgattgtctg

SEQ ID NO: 215125 - DNA, 1811 bp, Zea Mays
gaagcggcgggaggctgggagagcgggcgggaaagcgcgggaatggaaggcggcgggagggcgagagggggatatggcgagtcctacagcctcggcaaatgtaccgagcgaagggcaggcgatggcgagcattccacgtctagttgcatcccctgtggacatgtctacggcagacattgcttagagatgtggttactgcagtacggcaagaaaaaggcaccgtgtcctcaatgtggcaagagatatacacagaacaacatcatcaacctctatgtaccagagattgttgttcccaataatgatcttgaaaagcaagtattgtccttgagagagagaaatgaatatcttgagaagcaacaagcaaaattacttgaggagataaaagagcataagaatgagtttttggtcgatggagctcgggtcatgggtatagatgcatccagtcaaattatattgacttcgggaagggcacatggagttagtgctgaacacatacttacaaaggttagcatgtttcatggacatggaatggagaaaatccaccttcctcctgatactaaagctattagggatatctgtgtactgcccgggggccatgttgtttttgcatcactgggcaggaagttgtctattttcagcatggctaccaacaatgttgtccttcaatatgatctgccggctcctggttggtcctgttcaggggattatactacttcaagtcatatttatgctgggttacagaacggcatgctattagtctttgatatccgtcaaacttctgcacctttgcattctagcatgggtctatcaacacacccagttcatacaatacactgcgctgtagatggcagtggttccaggaaggttttttctgcttcttctataggaccctgcgtttgggatgccagcgaaaacaggccgagtttggtaagtgggatggaaaaccaaggggtctgcatatctcttgcgtgcagctctccatcaagtgatgtcctggtggcttcatatcgcccgagagttgagctgccagacgctatcgccacatctcaagcgtctacaccacaatcaccggcacccaccggttcaggaaaactaggatgccacacactccttaggagaaccaccgccacatcctttgccagggaccatatctgcagtggtagcgtaagtgagttgcgaatgtcgaagtctgcaataataccctgcagagacaatcagcatctatttgcctatggagatgaatcgttgtacggagtccggacttggcggctgccttcgtttcagcggtacaccgatctcaagccccacaggcaaccggtccttgatctaaggtatgctgaaagttcaactggggagaggtaccttggttgcttaagtgccgaaaagctacaggttttcacaattaggtagcttgacagaggcattagcttggtttctggaattctggtagttgtgcttgtgcatgctaacatttgtttcttcagcagctttgctgtataagtaaaggccattgtccatccgtacagtcttcacttaaaacagcgtgtaaaaccatgctgtacatttcaaacaatctgttgtaacttgtaagaggctccagcatacaatacaccagcgggtgaaggattgcatatgctgtagtgttgtactgatgcagcattgcattttgtcatgaatcaaggaaacaaatgggtagcaatctgtcacacctttgaagcttcctgctgtgctcactcgctgatgttttcagtttgtaatcgtcattgtacttcactacaaaacgtaacgtaacatcaggcatgcacttcttc

SEQ ID NO: 215126 - DNA, 2243 bp, Zea Mays
actcgctgaaatttcttttcccaatccagttcattctgccgctctccaatagtccaatccggtcgcggcgaagctcggccagacggccaccccaccccaatgccgtcacggtcgggctcccggggcaggcggccgcggccggccccagaggtggctgctcccacggctgtacaagtgagctcgtccggctcgagtgaggaagggagcgatgaggaggaggaggaggggagcgagggatccggtgacggtgcgaggagcccgggcggctctgccagcaagtataaggcggcggagagtgaagccgaggcggaggacccatgccttcccagctgccccatttgtatggtcgcgtggaccgctgatggttcgcatcgcgtgagttgcatcccctgtggacatgtctacggcagacattgcttagagatgtggttactgcagtacggcaagaaaaaggcaccgtgtcctcaatgtggcaagagatatacacagaacaacatcatcaacctctatgtaccagagattgttgttcccaataatgatcttgaaaagcaagtattgtccttgagagagagaaatgaatatcttgagaagcaacaagcaaaattacttgaggagataaaagagcataagaggcagattatgttgcaacaaaatataatatatgaatcaaacaaaaagagacagagagtgacagagcagtcatcagatggaatactaggggcagagctaattgcctcgcatacaaaggacattgaccacaacaatctgtcaagttttgctctccagaatgagtttttggtcgatggagctcgggtcatgggtatagatgcatccagtcaaattatattgacttcgggaagggcacatggagttagtgctgaacacatacttacaaaggtacaagtcttaagagaaggttttgcttaatgacttaaggttagcatgtttcatggacatggaatggagaaaatccaccttcctcctgatactaaagctattagggatatctgtgtactgcccgggggccatgttgtttttgcatcactgggcaggaagttgtctattttcagcatggctaccaacaatgttgtccttcaatatgatctgccggctcctggttggtcctgttcaggggattatactacttcaagtcatatttatgctgggttacagaacggcatgctattagtctttgatatccgtcaaacttctgcacctttgcattctagcatgggtctatcaacacacccagttcatacaatacactgcgctgtagatggcagtggttccaggaaggttttttctgcttcttctataggaccctgcgtttgggatgccagcgaaaacaggccgagtttggtaagtgggatggaaaaccaaggggtctgcatatctcttgcgtgcagctctccatcaagtgatgtcctggtggcttcatatcgcccgagagttgagctgccagacgctatcgccacatctcaagcgtctacaccacaatcaccggcacccaccggttcaggaaaactaggatgccacacactccttaggagaaccaccgccacatcctttgccagggaccatatctgcagtggtagcgtaagtgagttgcgaatgtcgaagtctgcaataataccctgcagagacaatcagcatctatttgcctatggagatgaatcgttgtacggagtccggacttggcggctgccttcgtttcagcggtacaccgatctcaagccccacaggcaaccggtccttgatctaaggtatgctgaaagttcaactggggagaggtaccttggttgcttaagtgccgaaaagctacaggttttcacaattaggtagcttgacagaggcattagcttggtttctggaattctggtagttgtgcttgtgcatgctaacatttgtttcttcagcagctttgctgtataagtaaaggccattgtccatccgtacagtcttcacttaaaacagcgtgtaaaaccatgctgtacatttcaaacaatctgttgtaacttgtaagaggctccagcatacaatacaccagcgggtgaaggattgcatatgctgtagtgttgtactgatgcagcattgcattttgtcatgaatcaaggaaacaaatgggtagcaatctgtcacacctttgaagcttcctgctgtgctcactcgctgatgttttcagtttgtaatcgtcattgtacttcactacaaaacgtaacgtaacatcaggcatgcacttcttc

SEQ ID NO: 215127 - DNA, 2204 bp, Zea Mays
actcgctgaaatttcttttcccaatccagttcattctgccgctctccaatagtccaatccggtcgcggcgaagctcggccagacggccaccccaccccaatgccgtcacggtcgggctcccggggcaggcggccgcggccggccccagaggtggctgctcccacggctgtacaagtgagctcgtccggctcgagtgaggaagggagcgatgaggaggaggaggaggggagcgagggatccggtgacggtgcgaggagcccgggcggctctgccagcaagtataaggcggcggagagtgaagccgaggcggaggacccatgccttcccagctgccccatttgtatggtcgcgtggaccgctgatggttcgcatcgcgtgagttgcatcccctgtggacatgtctacggcagacattgcttagagatgtggttactgcagtacggcaagaaaaaggcaccgtgtcctcaatgtggcaagagatatacacagaacaacatcatcaacctctatgtaccagagattgttgttcccaataatgatcttgaaaagcaagtattgtccttgagagagagaaatgaatatcttgagaagcaacaagcaaaattacttgaggagataaaagagcataagaggcagattatgttgcaacaaaatataatatatgaatcaaacaaaaagagacagagagtgacagagcagtcatcagatggaatactaggggcagagctaattgcctcgcatacaaaggacattgaccacaacaatctgtcaagttttgctctccagaatgagtttttggtcgatggagctcgggtcatgggtatagatgcatccagtcaaattatattgacttcgggaagggcacatggagttagtgctgaacacatacttacaaaggttagcatgtttcatggacatggaatggagaaaatccaccttcctcctgatactaaagctattagggatatctgtgtactgcccgggggccatgttgtttttgcatcactgggcaggaagttgtctattttcagcatggctaccaacaatgttgtccttcaatatgatctgccggctcctggttggtcctgttcaggggattatactacttcaagtcatatttatgctgggttacagaacggcatgctattagtctttgatatccgtcaaacttctgcacctttgcattctagcatgggtctatcaacacacccagttcatacaatacactgcgctgtagatggcagtggttccaggaaggttttttctgcttcttctataggaccctgcgtttgggatgccagcgaaaacaggccgagtttggtaagtgggatggaaaaccaaggggtctgcatatctcttgcgtgcagctctccatcaagtgatgtcctggtggcttcatatcgcccgagagttgagctgccagacgctatcgccacatctcaagcgtctacaccacaatcaccggcacccaccggttcaggaaaactaggatgccacacactccttaggagaaccaccgccacatcctttgccagggaccatatctgcagtggtagcgtaagtgagttgcgaatgtcgaagtctgcaataataccctgcagagacaatcagcatctatttgcctatggagatgaatcgttgtacggagtccggacttggcggctgccttcgtttcagcggtacaccgatctcaagccccacaggcaaccggtccttgatctaaggtatgctgaaagttcaactggggagaggtaccttggttgcttaagtgccgaaaagctacaggttttcacaattaggtagcttgacagaggcattagcttggtttctggaattctggtagttgtgcttgtgcatgctaacatttgtttcttcagcagctttgctgtataagtaaaggccattgtccatccgtacagtcttcacttaaaacagcgtgtaaaaccatgctgtacatttcaaacaatctgttgtaacttgtaagaggctccagcatacaatacaccagcgggtgaaggattgcatatgctgtagtgttgtactgatgcagcattgcattttgtcatgaatcaaggaaacaaatgggtagcaatctgtcacacctttgaagcttcctgctgtgctcactcgctgatgttttcagtttgtaatcgtcattgtacttcactacaaaacgtaacgtaacatcaggcatgcacttcttc

SEQ ID NO: 215128 - DNA, 2168 bp, Zea Mays
cgctcaccgaccggcgccatcactcgctgaaatttcttttcccaatccagttcattctgccgctctccaatagtccaatccggtcgcggcgaagctcggccagacggccaccccaccccaatgccgtcacggtcgggctcccggggcaggcggccgcggccggccccagaggtggctgctcccacggctgtacaagtgagctcgtccggctcgagtgaggaagggagcgatgaggaggaggaggaggggagcgagggatccggtgacggtgcgaggagcccgggcggctctgccagcaagtataaggcggcggagagtgaagccgaggcggaggacccatgccttcccagctgccccatttgtatggtcgcgtggaccgctgatggttcgcatcgcgtgagttgcatcccctgtggacatgtctacggcagacattgcttagagatgtggttactgcagtacggcaagaaaaaggcaccgtgtcctcaatgtggcaagagatatacacagaacaacatcatcaacctctatgtaccagagattgttgttcccaataatgatcttgaaaagcaagtattgtccttgagagagagaaatgaatatcttgagaagcaacaagcaaaattacttgaggagataaaagagcataagaggcagattatgttgcaacaaaatataatatatgaatcaaacaaaaagagacagagagtgacagagcagtcatcagatggaatactaggggcagagctaattgcctcgcatacaaaggacattgaccacaacaatctgtcaagttttgctctccagaatgagtttttggtcgatggagctcgggtcatgggtatagatgcatccagtcaaattatattgacttcgggaagggcacatggagttagtgctgaacacatacttacaaaggttagcatgtttcatggacatggaatggagaaaatccaccttcctcctgatactaaagctattagggatatctgtgtactgcccgggggccatgttgtttttgcatcactgggcaggaagttgtctattttcagcatggctaccaacaatgttgtccttcaatatgatctgccggctcctggttggtcctgttcaggggattatactacttcaagtcatatttatgctgggttacagaacggcatgctattagtctttgatatccgtcaaacttctgcacctttgcattctagcatgggtctatcaacacacccagttcatacaatacactgcgctgtagatggcagtggttccaggaaggttttttctgcttcttctataggaccctgcgtttgggatgccagcgaaaacagctctccatcaagtgatgtcctggtggcttcatatcgcccgagagttgagctgccagacgctatcgccacatctcaagcgtctacaccacaatcaccggcacccaccggttcaggaaaactaggatgccacacactccttaggagaaccaccgccacatcctttgccagggaccatatctgcagtggtagcgtaagtgagttgcgaatgtcgaagtctgcaataataccctgcagagacaatcagcatctatttgcctatggagatgaatcgttgtacggagtccggacttggcggctgccttcgtttcagcggtacaccgatctcaagccccacaggcaaccggtccttgatctaaggtatgctgaaagttcaactggggagaggtaccttggttgcttaagtgccgaaaagctacaggttttcacaattaggtagcttgacagaggcattagcttggtttctggaattctggtagttgtgcttgtgcatgctaacatttgtttcttcagcagctttgctgtataagtaaaggccattgtccatccgtacagtcttcacttaaaacagcgtgtaaaaccatgctgtacatttcaaacaatctgttgtaacttgtaagaggctccagcatacaatacaccagcgggtgaaggattgcatatgctgtagtgttgtactgatgcagcattgcattttgtcatgaatcaaggaaacaaatgggtagcaatctgtcacacctttgaagcttcctgctgtgctcactcgctgatgttttcagtttgtaatcgtcattgtacttcactacaaaacgtaacgtaacatcaggcatgcacttcttc

SEQ ID NO: 215129 - DNA, 971 bp, Zea Mays
atggacgctgaggacatggaggatgtacaagcccccacggccgtccaggttgtcaaaccagttgattccttcagtataaaccagaaatacttcaagatgtgcccaaggaaacaaaaaaggcatgtgaaggcaacctatgaaatggggttaactgatatttgtagaaatttaaaaggctatgaattgcagttctggccattttttggctatggtgaaaagattttagtcgttttctcatatgtctttctcaagaatgggccaaggttgcggtgacttgctcttgacacttttagtaaggaagctgcataatgctcttacttctcttaacaattttccagttataatgagccaccacttcaagctaaggagcagtattgctcatatccctacaaggcactcaacaattactccatgtatgcgagagctttttataattgtggcaaggggcagagacaactctattatctgctatcttgttgtggaaacaattcataacagttagacctcgtgttgctattataatgggatctcagactgatcttcctgtgatgaaagttgttgagagggtttcaaaagagttcaacataccttgtgaggatgtagagattcttcgtagagtgtagcaaccttcatagacataataaaaaataacattttcttatgtcttatgtcaagagcaagtcatcgcaaccttcgtagacatattgttgttgtttggtttgtgggggcaagaactataagcacaaccctgaaatacatatacaagctaggagctttacactggcagagaaaaggatgtgatcatgcaatataatggcaaatctgatggtttttattagagtgggtgtttctttagtagcttgaacttggttacagttgtagcaaatctgacaggcactaagtttgacttcttggcctactcgtcggcgctcaagcatttggtacttggtcaggtctacttattacacggt

SEQ ID NO: 215130 - DNA, 894 bp, Zea Mays
atggacgctgaggacatggaggatgtacaagcccccacggccgtccaggttgtcaaaccagttgattccttcagtataaaccagaaatacttcaagatgtgcccaaggaaacaaaaaaggcatgtgaaggcaacctatgaaatggggttaactgatatttgtagaaatttaaaaggctatgaattgcagttctggccattttttggctatggtgaaaagattttagtcgttttctcatatgtctttctcaagaatgggccaaggttgcggtgacttgctcttgacacttttagtaaggaagctgcataatgctcttacttctcttaacaattttccagttataatgagccaccacttcaagctaaggagcagtattgctcatatccctacaaggcactcaacaattactccatgtatgcgattagacctcgtgttgctattataatgggatctcagactgatcttcctgtgatgaaagttgttgagagggtttcaaaagagttcaacataccttgtgaggatgtagagattcttcgtagagtgtagcaaccttcatagacataataaaaaataacattttcttatgtcttatgtcaagagcaagtcatcgcaaccttcgtagacatattgttgttgtttggtttgtgggggcaagaactataagcacaaccctgaaatacatatacaagctaggagctttacactggcagagaaaaggatgtgatcatgcaatataatggcaaatctgatggtttttattagagtgggtgtttctttagtagcttgaacttggttacagttgtagcaaatctgacaggcactaagtttgacttcttggcctactcgtcggcgctcaagcatttggtacttggtcaggtctacttattacacggt

SEQ ID NO: 215131 - DNA, 1126 bp, Zea Mays
gtaccaactgctgatacatagggatcttaaataggaaaaaacaattacacatggtttcttaggcatgtcatcaagttataaacttttccccaaaaaatgtttatgtacattactttgcaattgctaacctgttgtgcatttgattttgcaatcgtaaccatcgcgctatccaaatatacctccaatcaacaggatcgagctacgcaaattgctcctacattctcacatacacttaggggtgacaatgggctctaaattttaaactataatatttaaggttctgatcggattaggatcaggctctatttctattcatttttgaactagatttttatttagggagctaagaaattatgaagaaacatttggatcgcgatccattaccacccctttatacactccattctgatttgcacaacatataacttctatctggaacaggtatgctttctccggtaagcaaaatataacatgccttttccatattcacaacaaaaatacacaggttcattttttttccatcgtgtcccctaactgggaaaaaataagaaaagatatgtgaacaccaaaaggggatgcaactgcgaactgtgagaaattttccacatactacgctcacattgtctggggcaatgggatatcatactcatacagtaatactgctgcctgtcgatcttaacaaatttcattcaagaactagggcatgctaatgttcaaaagagttgtcagcgattcatgacacctggtagcactacaaccagcaatgtatggatgaattgaaggaagtaaagaaggcagacaatcttacagaaactttacagaaactctgcatcttgaaactgccatgattgacaaagaagctggatgcatcatgtgcattggtgtcttcttatcaccatgcattaatgtgaagcaagttcatttgttgactaagaatggatgaacacaaatcagtggagttcgttgcactagagatggaggttggagaggtgtggtaggtgtcaatatggctttgatacaattttgccctacaatctttgtacggaacaagaaaaatgacattgtacgtggatactatattgtaattcaataattttttctaaataataaatatatttgtttatag

SEQ ID NO: 215132 - DNA, 641 bp, Zea Mays
tttgctttgtcgtcgtctctccgattgccatagctgatttgcacaacatataacttctatctggaacagatatgtgaacaccaaaaggggatgcaactgcgaactgtgagaaattttccacatactacgctcacattgtctggggcaatgggatatcatactcatacagtaatactgctgcctgtcgatcttaacaaatttcattcaagaactagggcatgctaatgttcaaaagagttgtcagcgattcatgacacctggtagcactacaaccagcaatgtatggatgaattgaaggaagtaaagaaggcagacaatcttacagaaactttacagaaactctgcatcttgaaactgccatgattgacaaagaagctggatgcatcatgtgcattggtgtcttcttatcaccatgcattaatgtgaagcaagttcatttgttgactaagaatggatgaacacaaatcagtggagttcgttgcactagagatggaggttggagaggtgtggtaggtgtcaatatggctttgatacaattttgccctacaatctttgtacggaacaagaaaaatgacattgtacgtggatactatattgtaattcaataattttttctaaataataaatatatttgtttatag

SEQ ID NO: 215133 - DNA, 721 bp, Zea Mays
tttgctttgtcgtcgtctctccgattgccatagggagctaagaaattatgaagaaacatttggatcgcgatccattaccacccctttatacactccattctgatttgcacaacatataacttctatctggaacaggtatgctttctccgatatgtgaacaccaaaaggggatgcaactgcgaactgtgagaaattttccacatactacgctcacattgtctggggcaatgggatatcatactcatacagtaatactgctgcctgtcgatcttaacaaatttcattcaagaactagggcatgctaatgttcaaaagagttgtcagcgattcatgacacctggtagcactacaaccagcaatgtatggatgaattgaaggaagtaaagaaggcagacaatcttacagaaactttacagaaactctgcatcttgaaactgccatgattgacaaagaagctggatgcatcatgtgcattggtgtcttcttatcaccatgcattaatgtgaagcaagttcatttgttgactaagaatggatgaacacaaatcagtggagttcgttgcactagagatggaggttggagaggtgtggtaggtgtcaatatggctttgatacaattttgccctacaatctttgtacggaacaagaaaaatgacattgtacgtggatactatattgtaattcaataattttttctaaataataaatatatttgtttatag

SEQ ID NO: 215134 - DNA, 721 bp, Zea Mays
ccgtttgctttgtcgtcgtctctccgattgccataggtatgctttctccggtaagcaaaatataacatgccttttccatattcacaacaaaaatacacaggttcattttttttccatcgtgtcccctaactgggaaaaaataagaaaagatatgtgaacaccaaaaggggatgcaactgcgaactgtgagaaattttccacatactacgctcacattgtctggggcaatgggatatcatactcatacagtaatactgctgcctgtcgatcttaacaaatttcattcaagaactagggcatgctaatgttcaaaagagttgtcagcgattcatgacacctggtagcactacaaccagcaatgtatggatgaattgaaggaagtaaagaaggcagacaatcttacagaaactttacagaaactctgcatcttgaaactgccatgattgacaaagaagctggatgcatcatgtgcattggtgtcttcttatcaccatgcattaatgtgaagcaagttcatttgttgactaagaatggatgaacacaaatcagtggagttcgttgcactagagatggaggttggagaggtgtggtaggtgtcaatatggctttgatacaattttgccctacaatctttgtacggaacaagaaaaatgacattgtacgtggatactatattgtaattcaataattttttctaaataataaatatatttgtttatag

SEQ ID NO: 215135 - DNA, 611 bp, Zea Mays
cccccgtttgctttgtcgtcgtctctccgattgccatagatatgtgaacaccaaaaggggatgcaactgcgaactgtgagaaattttccacatactacgctcacattgtctggggcaatgggatatcatactcatacagtaatactgctgcctgtcgatcttaacaaatttcattcaagaactagggcatgctaatgttcaaaagagttgtcagcgattcatgacacctggtagcactacaaccagcaatgtatggatgaattgaaggaagtaaagaaggcagacaatcttacagaaactttacagaaactctgcatcttgaaactgccatgattgacaaagaagctggatgcatcatgtgcattggtgtcttcttatcaccatgcattaatgtgaagcaagttcatttgttgactaagaatggatgaacacaaatcagtggagttcgttgcactagagatggaggttggagaggtgtggtaggtgtcaatatggctttgatacaattttgccctacaatctttgtacggaacaagaaaaatgacattgtacgtggatactatattgtaattcaataattttttctaaataataaatatatttgtttatag

SEQ ID NO: 215136 - DNA, 760 bp, Zea Mays
cccccgtttgctttgtcgtcgtctctccgattgccatagctgatttgcacaacatataacttctatctggaacaggtatgctttctccggtaagcaaaatataacatgccttttccatattcacaacaaaaatacacaggttcattttttttccatcgtgtcccctaactgggaaaaaataagaaaagatatgtgaacaccaaaaggggatgcaactgcgaactgtgagaaattttccacatactacgctcacattgtctggggcaatgggatatcatactcatacagtaatactgctgcctgtcgatcttaacaaatttcattcaagaactagggcatgctaatgttcaaaagagttgtcagcgattcatgacacctggtagcactacaaccagcaatgtatggatgaattgaaggaagtaaagaaggcagacaatcttacagaaactttacagaaactctgcatcttgaaactgccatgattgacaaagaagctggatgcatcatgtgcattggtgtcttcttatcaccatgcattaatgtgaagcaagttcatttgttgactaagaatggatgaacacaaatcagtggagttcgttgcactagagatggaggttggagaggtgtggtaggtgtcaatatggctttgatacaattttgccctacaatctttgtacggaacaagaaaaatgacattgtacgtggatactatattgtaattcaataattttttctaaataataaatatatttgtttatag

SEQ ID NO: 215137 - DNA, 1919 bp, Zea Mays
cccctcgcctatatatagtttccccgcccctattccgtctcccgaccactggccggccgggcggcaccgccatcggagtacgtacacacgtcctgctgtcccgcatgccaccggccgggggagaaaaccaacagccaagccaagcccacattgtttccgcagctaggtagaggggcaaaggaggagtatagcggagaggttgatgcgtgacggaggaggcgccatggacgtcgacatgcaagcccgcggtggcggtgctagccatggcggcgaacttgacgacgacggcaaggagaagaggacagggacggtgtggacggcgtcggcgcacatcatcacggcggtgatcgggtccggcgtgctgtcgctggcgtgggcgatggcccagctgggctgggtggccgggcctgtgatcctgctgctcttcgcggccatcacctactacacctcctgcctcctcaccgactgctaccgcttcggcgaccctgtcaccgggaagcgcaactacacctacactgaggccgtcgagtcctacctaggcggcaggtatgtctggttctgcggcttctgccagtacgccaacatgttcggcaccggcatcggctacaccatcacggcttctgccagcgctgctgcagggctatcctcaagtccaactgcttccactggcacgggcacgacgccgactgcacccagaacacgggctcctacatcgtcggcttcggcgtggtgcaggtcatcttcagccagctctcaaacttccacgagctctggtggctctccgtgctcgcggccgccatgtccttctgctactccaccatcgccgtcgggctcgccctcggccagaccatctcaggtcccacgggcaagacgacgctctacggcacgcaggtcggggtggacgttggtagcgcggaggagaagatatggctgacgttccaggctctcggcaacatcgcgtttgcctactcctacaccattgttctcattgaaatccaggacacgctgcgatctccgccggccgagaacaagacgatgcggcaggcgtcggtcctgggcgtggcgacgaccacggcgttctacatgctgtgcggctgcctgggctactcggcgttcggcaacgcggcgccgggtgacatcctgtcgggcttctacgagccctactggctggtggacttcgccaacgtctgcatcgtgatccacctcgtgggcggcttccaggtgttcctgcagccgctgttcgccgcggtcgaggccgacgtggcggcgcgctggccggcctgctccgcgcgggagcgccgcggcggcgtcgacgtgttccgcctgctgtggcgcaccgcgttcgtcgcgctcatcaccctgtgcgccgtcctgctgcccttcttcaacagcatcctgggaatcctcggcagcatcggcttctggccgctcaccgtcttcttccccgtcgagatgtacatccgccagcagcagatcccgcggttcagcgccacgtggctggcgctgcaggccctcagcatcttctgcttcgtcatcaccgtcgcggccggggctgcctcggtacagggcgtgcgcgactcgctcaaaacctacgtgcccttccagaccaggtcgtgatgagcactgcacgtacggtcccatatgtagctcaaaaacttaattacgtgctcatcaagcagtcaggctccttcattcaattccaaagcaggattaatttgggatacgtggcttaattatattggtgtgtttgcgatggtatggtacgatgggtaggagcagatcctcttaggcgtgtttcgcaatcctcctccaacattattgtaaatatgtgaatgattgattgtattccaatacagggaatatgagtacatatatacagcgcacgggtagcatgcaaggcaacagtagatagcgcaatt

SEQ ID NO: 215138 - DNA, 1694 bp, Zea Mays
gttagactgtgtgtgtgggccgacaccactgttgggctgccggacctttagggttagggtcctgtgagtctatatattgtaccccatgtccccatctcctatgcaatacatcaagtactacagtttactacaataccatcctaattgcacaaatgcatgcagaaacgaatttacgttggccgtggaatgcatgaaagccaagtttcactttttaagtatacatttttttggattttgctgctatgctccaaattttcgtttagctactttgtccaaattcagcctctaataaaaccaacaaaggatgtaatgggtgttcataatattcattacgagtggcatgaattttttccaaatgcatcctataatattggtgccatcatgtctctatgggctcctgttctactggtctatttaatggatacacaaatttggtatgccatcttctctacgatatttggtggcatgactggagcacttgggcgacttggggagatacgaacattgggaatgctgagatcacgattccattctttgcctggagccttcaacacatatttggtgccttcagataaaagcaaaaataggcgcttttcactctcaaagcgctttgctgaggtttctcccaacaagagaactgaggccgccaagtttgctcaattgtggaatgaagtaatatgcagtttccgggaagaagatcttataagtgatggggagatggacttgttagtggttccttattcgtcagaccccagcctcaaattgatgcagtggcctctgttcttgcttgctagcaagatacctatagctttagacatggcggcacaatttagacctagagattcagatctttggaaacgtatatgtgctgatgagtacatgaaatgtgctgtactggaatgttatgaatcattcaaactcgttcttaatttattggtggttggagaaaatgaaaaaaggattattggtattataatcaaagaaatagaaggtaatattggaaagaatacattccttgccaattttagaatgagcgcactcccagttctttgcaagaaatttgtagagcttgtgtctaccttgaaagaaagagatgcctcaaagtttgataacgtggtgctgttgcttcaagacatgttagaagtgataacaagagatatgatggttaatgagattagagagctggctgagtttggtcatggtaataaggattcagttccaagaagacaactttttgctggttctggtacaaagcctgcaattgttttccctcctccggtttcagcacagtgggaagaacagattaagcgattgtaccttcttttgactgtgaaagaatctgcaatggacgtcccaacaaatttagaagctcgtcgaagaatagcatttttcactaattcactattcatggacatgcctcgtgcacctagagtacgcaaaatgctctcattcagtgttatgactccttactacagtgaagaaactgtatattcaaaaagtgatcttgatctggagaatgaagatggtgtatcaattatattctacctacaaaagatctttccagatgaatggaacaatttcatggaaagaaataattgcaaaagggaaagtgaagtatggggaaacgatgaaaatgtactgcaacttcgtcattgggcttctcttagagggcagacactctgtagaacaggtaa

SEQ ID NO: 215139 - DNA, 1559 bp, Zea Mays
gcagaaacgaatttacgttggccgtggaatgcatgaaagccaagtttcactttttaagtatacatttttttggattttgctgctatgctccaaattttcgtttagctactttgtccaaattcagcctctaataaaaccaacaaaggatgtaatgggtgttcataatattcattacgagtggcatgaattttttccaaatggtctatttaatggatacacaaatttggtatgccatcttctctacgatatttggtggcatgactggagcacttgggcgacttggggagatacgaacattgggaatgctgagatcacgattccattctttgcctggagccttcaacacatatttggtgccttcagataaaagcaaaaataggcgcttttcactctcaaagcgctttgctgaggtttctcccaacaagagaactgaggccgccaagtttgctcaattgtggaatgaagtaatatgcagtttccgggaagaagatcttataagtgatgggtgaggaactaacctcatgtttagtaagaaaatattattcttgcagtgcagctgagaactttttgttgcatagggagatggacttgttagtggttccttattcgtcagaccccagcctcaaattgatgcagtggcctctgttcttgcttgctagcaagatacctatagctttagacatggcggcacaatttagacctagagattcagatctttggaaacgtatatgtgctgatgagtacatgaaatgtgctgtactggaatgttatgaatcattcaaactcgttcttaatttattggtggttggagaaaatgaaaaaaggattattggtattataatcaaagaaatagaaggtaatattggaaagaatacattccttgccaattttagaatgagcgcactcccagttctttgcaagaaatttgtagagcttgtgtctaccttgaaagaaagagatgcctcaaagtttgataacgtggtgctgttgcttcaagacatgttagaagtgataacaagagatatgatggttaatgagattagagagctggctgagtttggtcatggtaataaggattcagttccaagaagacaactttttgctggttctggtacaaagcctgcaattgttttccctcctccggtttcagcacagtgggaagaacagattaagcgattgtaccttcttttgactgtgaaagaatctgcaatggacgtcccaacaaatttagaagctcgtcgaagaatagcatttttcactaattcactattcatggacatgcctcgtgcacctagagtacgcaaaatgctctcattcagtgttatgactccttactacagtgaagaaactgtatattcaaaaagtgatcttgatctggagaatgaagatggtgtatcaattatattctacctacaaaagatctttccagatgaatggaacaatttcatggaaagaaataattgcaaaagggaaagtgaagtatggggaaacgatgaaaatgtactgcaacttcgtcattgggcttctcttagagggcagacactctgtagaacaggtaa

SEQ ID NO: 215140 - DNA, 1397 bp, Zea Mays
cagcctctaataaaaccaacaaaggatgtaatgggtgttcataatattcattacgagtggcatgaattttttccaaatgcatcctataatattggtgccatcatgtctctatgggctcctgttctactggtctatttaatggatacacaaatttggtatgccatcttctctacgatatttggtggcatgactggagcacttgggcgacttggggaggggttcgagggttttctcgacctgtgtgagaaggtcttcttcttaatacaatgcccgggggctatcttacccctgcaggtttctcccaacaagagaactgaggccgccaagtttgctcaattgtggaatgaagtaatatgcagtttccgggaagaagatcttataagtgatggtgcagctgagaactttttgttgcatagggagatggacttgttagtggttccttattcgtcagaccccagcctcaaattgatgcagtggcctctgttcttgcttgctagcaagatacctatagctttagacatggcggcacaatttagacctagagattcagatctttggaaacgtatatgtgctgatgagtacatgaaatgtgctgtactggaatgttatgaatcattcaaactcgttcttaatttattggtggttggagaaaatgaaaaaaggattattggtattataatcaaagaaatagaaggtaatattggaaagaatacattccttgccaattttagaatgagcgcactcccagttctttgcaagaaatttgtagagcttgtgtctaccttgaaagaaagagatgcctcaaagtttgataacgtggtgctgttgcttcaagacatgttagaagtgataacaagagatatgatggttaatgagattagagagctggctgagtttggtcatggtaataaggattcagttccaagaagacaactttttgctggttctggtacaaagcctgcaattgttttccctcctccggtttcagcacagtgggaagaacagattaagcgattgtaccttcttttgactgtgaaagaatctgcaatggacgtcccaacaaatttagaagctcgtcgaagaatagcatttttcactaattcactattcatggacatgcctcgtgcacctagagtacgcaaaatgctctcattcagtgttatgactccttactacagtgaagaaactgtatattcaaaaagtgatcttgatctggagaatgaagatggtgtatcaattatattctacctacaaaagatctttccagatgaatggaacaatttcatggaaagaaataattgcaaaagggaaagtgaagtatggggaaacgatgaaaatgtactgcaacttcgtcattgggcttctcttagagggcagacactctgtagaacaggtaa

SEQ ID NO: 215141 - DNA, 1484 bp, Zea Mays
atggcttggctcatgaggggggcacgcgcgggtacggtggctcgacttgtgagagggcgcgtgctgggtaaggcggctcggttcgtgggcgaggcgcgggcgctgactcgtgtacgggcgcggggtggcagctcggctcgtggctggggcgcagggtgggacgtgggcaggggcgcgcggtcgggtgcctttggtcgggtctatttaatggatacacaaatttggtatgccatcttctctacgatatttggtggcatgactggagcacttgggcgacttggggagatacgaacattgggaatgctgagatcacgattccattctttgcctggagccttcaacacatatttggtgccttcagataaaagcaaaaataggcgcttttcactctcaaagcgctttgctgaggtttctcccaacaagagaactgaggccgccaagtttgctcaattgtggaatgaagtaatatgcagtttccgggaagaagatcttataagtgatggggagatggacttgttagtggttccttattcgtcagaccccagcctcaaattgatgcagtggcctctgttcttgcttgctagcaagatacctatagctttagacatggcggcacaatttagacctagagattcagatctttggaaacgtatatgtgctgatgagtacatgaaatgtgctgtactggaatgttatgaatcattcaaactcgttcttaatttattggtggttggagaaaatgaaaaaaggattattggtattataatcaaagaaatagaaggtaatattggaaagaatacattccttgccaattttagaatgagcgcactcccagttctttgcaagaaatttgtagagcttgtgtctaccttgaaagaaagagatgcctcaaagtttgataacgtggtgctgttgcttcaagacatgttagaagtgataacaagagatatgatggttaatgagattagagagctggctgagtttggtcatggtaataaggattcagttccaagaagacaactttttgctggttctggtacaaagcctgcaattgttttccctcctccggtttcagcacagtgggaagaacagattaagcgattgtaccttcttttgactgtgaaagaatctgcaatggacgtcccaacaaatttagaagctcgtcgaagaatagcatttttcactaattcactattcatggacatgcctcgtgcacctagagtacgcaaaatgctctcattcagtgttatgactccttactacagtgaagaaactgtatattcaaaaagtgatcttgatctggagaatgaagatggtgtatcaattatattctacctacaaaagatctttccagatgaatggaacaatttcatggaaagaaataattgcaaaagggaaagtgaagtatggggaaacgatgaaaatgtactgcaacttcgtcattgggcttctcttagagggcagacactctgtagaacaggtaa

SEQ ID NO: 215142 - DNA, 11536 bp, Zea Mays
cctccctcttcaccccaaacaacaatcacagccctctctccctctcccctcctttacgtcgccgcctccgaatccccacctctttgctcctccgccatcctcctccgcggccgatgtgtgtgccccgccggcccaaaaccctagaggttacgagcaggtaagggtttcgatcggagatggcggctgcggctgcggcgatggccgcacatagagccagcttcccgctgcgcctgcagcagatccttgctggcagccgcgccgtctcacctgcgatcaagatcgagtctgagccgcctgcaaacatcaaagcatttattgatcgagtagtcaatattccactacatgacattgccataccgctatcaggcttctgttgggagttcaataagggaaatttccaccattggaggcctttatttattcattttgacacctatttcaagacatacatttcttctcggaaggatcttcttttatctgatgatatgaccgaggctgaccctatgccaaagaatgccatcttgaaaatcttaagagttatgcagattattttggagaactgccagaatagaagttcttttactggtcttgcgcatcttaagcttctcctggcatcgtcagaccctgagatagttgtagcagctttggaaactcttgttgccttggtcaaaataaatccttcaaagttgcatatgaatggaaagctaattagctgcggacctataaacacccatcttctatcattggcccaaggatggggcagcaaggaggaaggtcttggcatatattcttgtgttgtggcaaatgaaggaaaccatcaggggggtttgtccttgttccctgtagacttggagaacaaatatggtggcacacaacatcgtcttggttcaactcttcattttgagtataatttgggtcctgcacagtatcctggccaaactagtgacaagggcaagtcatctaatttgtgtgtgatacatattccagacatgcatcttcagaaagaggatgacttgagcatactgaagcaatgtgtagacaagttcaatgtgcccccagagcacaggtttgcattgcttacaaggataagatatgcccgtgctttcaactctgcacggacttgtaggatctatagccgcataagtcttctttcgttcattgttcttgtgcaatcgagtgatgctcatgatgaactcacatatttctttacaaatgaaccagagtacataaacgagttaatcaggcttgttcggtcagaggattctgttcctgggtccattcgtgctctggctatgctagcactgggagcacagctggcagcatatgcatcatctcatgagcgtgctaggatattgagtggctcaagtattatctctgctggtggcaatcgtatggtcttgctcagtgtcctgcagaaagcaatatcctcactcaatagcctgaatgatacctcatctcctctaattgttgatgcccttcttcagttttttctgctccatgtactgtcttcatcaagttcagggactacggttagaggctcagggatggttcctcctctcttgcccttgctgcgagataatgatccttctcatatgcatcttgtctgcttggcagtgaagactctccaaaagcttatggagtacagcagccctgctgtttctctgtttaaagacttgggtggtgtagagcttttgtctcagaggttacatgtagaagttcagcgtgttattggtactgctgatggacataattcaatggttactgatgcagtgaaatcagatgataaccacatgtactctcagaagcgattgattaaagctttgctcaaggctttggggtctgctacttattcccctgggaatcctgctcgttctcaaagctcccaagataactcattgcctgtctcactttcccttatatttcagaatgtagataagtttgggggtgacatttatttttcagcagttactgttatgagcgaaataatccataaagatcctacatgctttattactttgaaggaactcggtgttccagatgcttttatctcatcagtgactgctggggtaataccatcttgtaaagcccttatctgtgttcctaatggcctgggtgcaatatgcctcaataatcaaggacttgaggctgtcagggaaacttcagcactgcgatttcttgtagataccttcactagcaggaaatacttgataccaatgaatgagggtgtggtccttctagctaatgcagtggaagagcttcttcgtcatgtgcaatccctgagaagtattggtgttgacatcattattgaaataatcaataaactaagttcgtctcaggaatataaaaacaatgaaacagccaccttgcaagaaaaaacagatatggaaactgatgttgaagggcgtgatttggtaagtgctatggactcaagcgtggatggaagtaatgatgaacagttttctcatctgagcattttccatgtgatggtattggtgcaccggacaatggaaaactcggaaacctgccggttatttgtagaaaagggagggctacatgctcttttgacactcttgttgaggcctagcatcacacagtcatctggagggatgcctattgctttgcatagcacgatggtgttcaagggttttactcagcatcactctactccacttgcacgtgcattttgctcatctttaaaggagcatttgaagagtgcattgaaggaacttgataaagtttccaactcatttgatatgaccaagattgaaaaaggagcgatcccatctttgtttgttgttgaatttttgctattcctagctgcctcaaaagataatcgttggatgaatgctttgctctcagaatttggcgatgccagcagggaggtcctggaagatgttgggcaagttcaccgggaagtgctttggaaaatttcgctttttgaaaaaaacaagattgtcgctgaaaccagttcatcttcttccacatctgaagctcagcagcctgacatgtctgccagcgacattggtgatagcagatacacttctttcaggcaatatcttgatccaattttaaggcgaaggggttctgggtggaacatagagtctcaagtgtctgacctcattaatatgtatcgagacattggccgtgcagctagtgactcgcagagggttggttctgatagatattctagtctaggtttgccctcaagttcccaggaccagttttccagttcatctgatgcaaatgccagcacaaggtcagaagaggacaagaaaaaatctgagcattcctcctgctttgacatgatgagatctctctcctaccatatcaaccatctttttttggagcttggtaaagcaatgctttttgcatctcgtcgggagaatagtcctgtaaacctatccccagccgttatatctgttgctaacaatattgcttctattgtgttggagcacctcaactttgaaggtcattcggtaagttttgagagggacatgactgttaccacaaaatgcagatatcttggaaaggtggttgaatttgttgatgggatgttattagaccggccagaatcatgtaattcgattatggtgaattcattttattgccgtggtgtcattcaggccatcctgaccacatttcaggccaccagtgagttgctcttcacaatgagcaggccaccgtcttcacctatggagacggatagtaaaaccggaaaggatggaaaggagatggattcttcatggatctatggtcccctcaccagttatggggcaattatggatcatcttgtgacctcatcttttattctctcttcatcaactagacaattacttgagcaacctatttttaatggatctgtaaggttccctcaagatgctgagacgttcatgaagttacttcagtcaaaggtgttgaagacagttcttcccatctgggcccatccccagttcccagaatgcaacatcgagctgattagttcagtcatgtccatcatgaggcatgtttgctctggggtggaagtgaaagacactgttggcaatggtggtgctcgtttggctggtccacctcctgatgagagtgcaatttcacttattgtagagatgggtttttctcgtgccagggctgaagaagcattaagacaagttggaacaaacagtgttgaaatagcaactgattggttattcgcacacccagaggaaccacaagaggaggatgatgaacttgctcgggcgcttgcaatgtctcttgggaattctgttacccctgcacaagagggagatagtaggtccaatgatcttgagctggaagaagcaacagttcagccgcctcctatagatgaaatgttacgttcatgtcttcagctacttcagagaaaggaagcattagctttctctgtcagggatatgcttgttactatcagctcacagaatgatggccaaaaccgagtaaaggtgcttacatatttgattgataatctgaaacaatgtgtggtggcatctgagccttcaaatgatactgcattgtctgctcttttacatgttcttgctttgattcttcatggagatactgctgcccgtgaagttgcctcaaaggcaggacttgtgaaggttgctttggatctgctgtgcagctgggaggtgcaaattagggaaagtagcatgattgaggttcctaattgggtaatttcctgtttcctttctgttgatcagatgctccagttggaaccaaagttgccagatgttacagagctacatgtcctgaaaagggataactcaaatataaaaacatcacttgtgattgatgacagcaagagaaaagattcagaatccttgccaaatgttgggttactagacatggaggaccagtttcaacttttgaagatctgttgtaagtgcataggaaaacagttaccttcggcttccatgcatgctattctccagctctctgcaacactgacaaaagtccatgcagctgctatttgtttccttgaatctggtggtttgaatgcattactatcactgccgacaagtagtttgttttctgggttcaacaatatggcttctacaataattcgtcacattttggaggaccctcacacccttcagcaagcaatggaattagagatacgtcacagtcttgttacagctgctaatcgacatgcaaatcccagggttacaccacgcaattttatccagaatttggcttttgtcgtgtatagggacccagtgatatttatgaaagctgcccagtctgtgtgccagattgagatggttggagataggccatatgttgttctgttaaaggatcgtgagaaggaaaggatcaaggagaaagataaggacaagtcagttgataaggataaagcaacagtcgcagtcactaaggtagtttctggggacacagctgcaggatctcctgcaaattctcatggaaaacagtctgatttgaattcaagaaacgtgaaatctcaccgcaagccaccacaaagttttgtcactgttatagagcatctcttagatctgctgatgtcctttgttccgccaccccgtccagaggatcaagttgatgtctctggtactgccttatcttcagacatggatattgactgcagttctgcaaaagggaaagggaaagctgtgtctgtcccacctgaagagagcaagcatgctatccaagagtctactgcatcccttgccaaaactgcatttttccttaagttgctgacagatgtattgttaacttacgcatcatccattcatgttgttcttcgtcatgatgctgagctgagtaacatgcacggtccaaatcgaacaagtgccagactaactagtggtggaatctttaaccatatcctgcagcatttccttcctcatgctacaaggcaaaagaaagagagaaaaaatgatggagattggatgtataaattggcaacaagggctaatcagttcttggtggcttcatctattcgttctgcagaggcccgaaaaaggattttctctgaaatctgcagtatatttcttgatttcactgactcgtctgcagggtacaatgccccagtaccaaggatgaatgtgtatgtcgatttactgaatgatattctgtcagcccgatcaccaactggctcctcgctgtcagcagaatctgcagttatatttgttgaagctggtcttgttcattcattatcgacaatgcttcaagttcttgatttggatcaccctgattctgcaaagattgttactgctgttgttaaggccttggaactcgtcagtaaggaacatattcattcagcagataatgcgaaaggagtgaactcgtcaaagattgcttctgacagcaacaacgtgaattcatcatctaatagattccaggctcttgacatgacttctcagcccacagagatggttactgatcacagggaaacgtttaatgctgtccgaacttcacaaatatcagattcagtggcagatgagatggatcatgatcgtgatatggatggcggctttgctcgtgatggtgaagatgattttatgcatgagatggctgaagatggaactggtgatggatctacaatggaaattagaattgaaattccacgcaatagagaggatgatatggcccctgctgctgatgacactgatgaagatatatctgccgaggatggtgaagatgatgaagacgaagatgaggagaacaacaatctggaggaagatgatgcccatcggatgtctcatcctgacacagatcaggaagaccgtgaaatggatgaagaggaatttgatgaggatctgctagaagaagacgatgaagatgaggatgaggaaggagtcatccttcgcctggaggaggggattaatggcattaatgtgttggaccatgttgaagtatttggtgggagcaacaatttgtctggggatacgctgcgtgtgatgcctctagacatttttggtacaagaaggcaaggccgaagtacctccatatacaatcttcttggtagggctagtgatcatggtgttcttgatcatccacttctcgaagagccttcttcaacaacgaatttttcagaccaagggcatccagagaatcttgttgagatggctttctctgatcgaaaccatgaaagtagctcctctcgtttggatgctatattccgcagcttgcgaagtggacgtaatggacaccgctttaatatgtggctagatgacggtccacaacgtaatggatctgctgcccctgcagtacctgaaggcattgaagaattgctgatctctcatctgagacggcccactcctcaacctgatggccagagaacacctgttggtggtgctcaagaaaatgaccagcccaaccatggatcagatgctgaggcaagggaagtagcaccagctcagcaaaatgagaacagtgaaagtacactgaatcctctagatctgtcagaatgtgctggccctgcacctcctgatagtgatgcacttcaaagagatgtgtccaatgcaagtgagcttgctacagagatgcagtatgaacgtagtgatgctataacacgtgacgttgaagcagtgagccaagcaagcagtggcagtggtgctactttaggggagagcctcagaagtttagaggttgaaataggaagtgttgaagggcatgatgatggtgaccggcatggaacttcaggcacctcagaacgtttacctttgggtgatattcaagcagctgctcgatcacggaggccatctggaaatgctgtgccagtaagcagtagagatatgtctctggagagtgttagtgaggttcctcaaaatccagaccaagaacctgatcagaatgctagtgaggggaatcaggagcctaccagagcggcaggtgctgactcaattgatcctacatttttggaggctcttcctgaggacttgcgagctgaagttctttcttcacgtcaaaatcaagtaactcagacttctaatgaccaacctcaggatgatggtgatattgatcctgaattccttgctgcacttccccctgatataagagaggaggtgctagctcagcaacgtactcaaaggatgcaacaacaatcacaagaattagaaggacaacctgttgaaatggatgctgtttcaattattgcaacattcccttcagaaatccgggaagaggtgcttttgacatctcctgacacactactagccacactcacgcctgcactagttgctgaggccaacatgttaagggagagatttgctcatcggtatcacagtagctccctttttggtatgaactccaggaacaggagaggtgagtcctcccgacgtgacataatggcagcaggacttgatagaaacacaggtgatccctccagatcaactagcaagccaattgagactgaaggtgctcctcttgtcgatgaagatggccttaaagctcttattcggttacttcgagttgttcagcctctatacaagggtcagctgcagaagctacttgtgaatctttgtactcatcggggtagcagacaggccttggttcaaattctagtggacatgcttatgcttgatctgcaggggttttcaaagaaatcaatagatgcacctgagccaccatttaggttgtatggttgccatgcaaatatcgcatattcacgccctcaatcttcggatggtcttcctccattagtctcacgtcgtgtgctcgaaacgctcacgaacttggcaagaagccatccaaatgttgctaaactcttgctctttcttgaattcccttgcccatcaagatgtttccccgaagcacatgatcataggcatggcaaggctgttctcctagatgatggtgaagaacagaaaacctttgcacttgttcttctgttaaatctgttggatcagccactttatatgagaagtgtagctcatcttgaacagttactaaaccttcttgacgttgtcatgcacaatgctgagaatgaaattaagcaagctaagctagaagcatcatctgagaagccatctgcacctgataatgcagtgcaagatggtaaaaataactccgacatttctgtatcatatggatcagagttgaatcctgaggatggcagcaaagcccctgctgttgacaacagaagtaacttgcaagctgttttgcgaagtcttcctcaaccagagcttagattgctatgttcattgcttgcgcatgatggattgtcggacagcgcttatctccttgtaggtgaagtgttgaaaaagattgtggctcttgcccctttcttctgttgccatttcataaatgagcttgcacgttcaatgcaaaacttgacacttcgtgcaatgaaggagcttcatttgtacgagaattctgaaaaggctcttcttagctcttcatcagccaatggtactgcagttcttagagtagtgcaggctttgagctctcttgtcaatactcttcaagagagaaaggatccagaacagcctgctgaaaaggaccattcggacgcagtttcccagatttctgaaattaacacagcattggattctctgtggttggaattgagcaactgcataagcaagatagaaagctcttcagagtatgcatcaaatctaagtcctgcttctgcaagtgcagctatgttaacaacaggagtagcacctccattgcctgcaggaactcaaaacttattaccatatatagaatcattttttgtgacatgtgagaagttgcgtcctgggcaacctgatgctgtacaagatgcttcaacttctgatatggaagatgcttcgacatctagtggtgggcagagatcatctgcttgtcaagctagtcttgatgaaaagcaaaatgcttttgtgaaattctcagagaagcacagaagattgctgaatgcattcatccgtcaaaactctggattgctggaaaagtcattctcgctgatgttgaaaattcctcgcctgattgattttgacaataaacgtgcatattttcggtctaaaatcaagcatcagtatgatcatcatcatcatagccctgttagaatttctgtgcgtcgtccatatattcttgaggactcctacaatcagcttaggatgcgatctcctcaggatttgaagggtaggctcactgtccaatttcaaggagaagaaggaattgatgctggtgggctgacaagggaatggtaccagtcgatatcacgagtcattgttgacaagagtgcccttctgtttacgacagtcgggaatgatttgacgtttcaaccgaatcctaattctgtgtatcaaactgagcacctctcatacttcaaatttgttggacgagtggttggcaaagctctcttcgatggtcagcttttagatgcccacttcactagatctttctacaaacacatacttggtgtcaaggttacataccatgacattgaagccatcgatccttcgtactacaaaaacttgaaatggatgcttgagaatgacataagtgatgttttggatctcacctttagcatggatgcagacgaagagaaactgatattgtacgagaaggcagagggttactgaggagaataagcatgaatatgtcgaccgggtagcagagcatagattgaccactgccatcaggcctcagattaatgccttcctggaagggtttaatgaactcattccacgggagctgatatctatcttcaacgacaaagagcttgagcttctgattagtggtcttccagatattgacttggacgatttgaaaacaaatacagaatattctggctacagcatagcctctccagtcgtccagtggttctgggaaatcgttcaggggttcagcaaggaagacaaagctcggttcctccagttcgtcactggcacttcaaaggtaccgttggaaggttttagtgaacttcaagggatctctgggccacaaaggtttcagatacacaaggcatacggcagcacgaaccatctgccttcagctcatacttgctttaaccaactagacttgcctgagtacacgtccaaagagcagctccaggagaggttactgttggcaatccacgaagcaaatgaaggtttcggatttggctaatcagtcatgctcgtttgtccgtgagagtctgtacagatactgagcattgcaatgggcgagcagcacgtgtgtgctgatccttaccacattctgaactccacgtgtttgatggccggggagaacatagaagaatctccgtgggagaggtactgatgagagagagcgactattttgtgttcataatattcattacctttttttagcttttttcggtcgttgccccgttcgtagtttttgccttacattggacttcgctccgattttttttctctgcttttccttcatagactggtgtaagatgtaaccgaacactatgtcaaatgcaaatcatcttagggccccttcgattattactgaatggaggcatggaataatttctagccgtactgtttctctactatattaaagcatcagttttagttacacgattgtcctgcatctataaaaaaactaaaattatacataattagct

SEQ ID NO: 215143 - DNA, 11571 bp, Zea Mays
gaaaaaagcgaaccgacccaactctgaaccctccaagtttcctccctcttcaccccaaacaacaatcacagccctctctccctctcccctcctttacgtcgccgcctccgaatccccacctctttgctcctccgccatcctcctccgcggccgatgtgtgtgccccgccggcccaaaaccctagaggttacgagcaggtaagggtttcgatcggagatggcggctgcggctgcggcgatggccgcacatagagccagcttcccgctgcgcctgcagcagatccttgctggcagccgcgccgtctcacctgcgatcaagatcgagtctgagccgcctgcaaacatcaaagcatttattgatcgagtagtcaatattccactacatgacattgccataccgctatcaggcttctgttgggagttcaataagggaaatttccaccattggaggcctttatttattcattttgacacctatttcaagacatacatttcttctcggaaggatcttcttttatctgatgatatgaccgaggctgaccctatgccaaagaatgccatcttgaaaatcttaagagttatgcagattattttggagaactgccagaatagaagttcttttactggtcttgcgcatcttaagcttctcctggcatcgtcagaccctgagatagttgtagcagctttggaaactcttgttgccttggtcaaaataaatccttcaaagttgcatatgaatggaaagctaattagctgcggacctataaacacccatcttctatcattggcccaaggatggggcagcaaggaggaaggtcttggcatatattcttgtgttgtggcaaatgaaggaaaccatcaggggggtttgtccttgttccctgtagacttggagaacaaatatggtggcacacaacatcgtcttggttcaactcttcattttgagtataatttgggtcctgcacagtatcctggccaaactagtgacaagggcaagtcatctaatttgtgtgtgatacatattccagacatgcatcttcagaaagaggatgacttgagcatactgaagcaatgtgtagacaagttcaatgtgcccccagagcacaggtttgcattgcttacaaggataagatatgcccgtgctttcaactctgcacggacttgtaggatctatagccgcataagtcttctttcgttcattgttcttgtgcaatcgagtgatgctcatgatgaactcacatatttctttacaaatgaaccagagtacataaacgagttaatcaggcttgttcggtcagaggattctgttcctgggtccattcgtgctctggctatgctagcactgggagcacagctggcagcatatgcatcatctcatgagcgtgctaggatattgagtggctcaagtattatctctgctggtggcaatcgtatggtcttgctcagtgtcctgcagaaagcaatatcctcactcaatagcctgaatgatacctcatctcctctaattgttgatgcccttcttcagttttttctgctccatgtactgtcttcatcaagttcagggactacggttagaggctcagggatggttcctcctctcttgcccttgctgcgagataatgatccttctcatatgcatcttgtctgcttggcagtgaagactctccaaaagcttatggagtacagcagccctgctgtttctctgtttaaagacttgggtggtgtagagcttttgtctcagaggttacatgtagaagttcagcgtgttattggtactgctgatggacataattcaatggttactgatgcagtgaaatcagatgataaccacatgtactctcagaagcgattgattaaagctttgctcaaggctttggggtctgctacttattcccctgggaatcctgctcgttctcaaagctcccaagataactcattgcctgtctcactttcccttatatttcagaatgtagataagtttgggggtgacatttatttttcagcagttactgttatgagcgaaataatccataaagatcctacatgctttattactttgaaggaactcggtgttccagatgcttttatctcatcagtgactgctggggtaataccatcttgtaaagcccttatctgtgttcctaatggcctgggtgcaatatgcctcaataatcaaggacttgaggctgtcagggaaacttcagcactgcgatttcttgtagataccttcactagcaggaaatacttgataccaatgaatgagggtgtggtccttctagctaatgcagtggaagagcttcttcgtcatgtgcaatccctgagaagtattggtgttgacatcattattgaaataatcaataaactaagttcgtctcaggaatataaaaacaatgaaacagccaccttgcaagaaaaaacagatatggaaactgatgttgaagggcgtgatttggtaagtgctatggactcaagcgtggatggaagtaatgatgaacagttttctcatctgagcattttccatgtgatggtattggtgcaccggacaatggaaaactcggaaacctgccggttatttgtagaaaagggagggctacatgctcttttgacactcttgttgaggcctagcatcacacagtcatctggagggatgcctattgctttgcatagcacgatggtgttcaagggttttactcagcatcactctactccacttgcacgtgcattttgctcatctttaaaggagcatttgaagagtgcattgaaggaacttgataaagtttccaactcatttgatatgaccaagattgaaaaaggagcgatcccatctttgtttgttgttgaatttttgctattcctagctgcctcaaaagataatcgttggatgaatgctttgctctcagaatttggcgatgccagcagggaggtcctggaagatgttgggcaagttcaccgggaagtgctttggaaaatttcgctttttgaaaaaaacaagattgtcgctgaaaccagttcatcttcttccacatctgaagctcagcagcctgacatgtctgccagcgacattggtgatagcagatacacttctttcaggcaatatcttgatccaattttaaggcgaaggggttctgggtggaacatagagtctcaagtgtctgacctcattaatatgtatcgagacattggccgtgcagctagtgactcgcagagggttggttctgatagatattctagtctaggtttgccctcaagttcccaggaccagttttccagttcatctgatgcaaatgccagcacaaggtcagaagaggacaagaaaaaatctgagcattcctcctgctttgacatgatgagatctctctcctaccatatcaaccatctttttttggagcttggtaaagcaatgctttttgcatctcgtcgggagaatagtcctgtaaacctatccccagccgttatatctgttgctaacaatattgcttctattgtgttggagcacctcaactttgaaggtcattcggtaagttttgagagggacatgactgttaccacaaaatgcagatatcttggaaaggtggttgaatttgttgatgggatgttattagaccggccagaatcatgtaattcgattatggtgaattcattttattgccgtggtgtcattcaggccatcctgaccacatttcaggccaccagtgagttgctcttcacaatgagcaggccaccgtcttcacctatggagacggatagtaaaaccggaaaggatggaaaggagatggattcttcatggatctatggtcccctcaccagttatggggcaattatggatcatcttgtgacctcatcttttattctctcttcatcaactagacaattacttgagcaacctatttttaatggatctgtaaggttccctcaagatgctgagacgttcatgaagttacttcagtcaaaggtgttgaagacagttcttcccatctgggcccatccccagttcccagaatgcaacatcgagctgattagttcagtcatgtccatcatgaggcatgtttgctctggggtggaagtgaaagacactgttggcaatggtggtgctcgtttggctggtccacctcctgatgagagtgcaatttcacttattgtagagatgggtttttctcgtgccagggctgaagaagcattaagacaagttggaacaaacagtgttgaaatagcaactgattggttattcgcacacccagaggaaccacaagaggaggatgatgaacttgctcgggcgcttgcaatgtctcttgggaattctgttacccctgcacaagagggagatagtaggtccaatgatcttgagctggaagaagcaacagttcagccgcctcctatagatgaaatgttacgttcatgtcttcagctacttcagagaaaggaagcattagctttctctgtcagggatatgcttgttactatcagctcacagaatgatggccaaaaccgagtaaaggtgcttacatatttgattgataatctgaaacaatgtgtggtggcatctgagccttcaaatgatactgcattgtctgctcttttacatgttcttgctttgattcttcatggagatactgctgcccgtgaagttgcctcaaaggcaggacttgtgaaggttgctttggatctgctgtgcagctgggaggtgcaaattagggaaagtagcatgattgaggttcctaattgggtaatttcctgtttcctttctgttgatcagatgctccagttggaaccaaagttgccagatgttacagagctacatgtcctgaaaagggataactcaaatataaaaacatcacttgtgattgatgacagcaagagaaaagattcagaatccttgccaaatgttgggttactagacatggaggaccagtttcaacttttgaagatctgttgtaagtgcataggaaaacagttaccttcggcttccatgcatgctattctccagctctctgcaacactgacaaaagtccatgcagctgctatttgtttccttgaatctggtggtttgaatgcattactatcactgccgacaagtagtttgttttctgggttcaacaatatggcttctacaataattcgtcacattttggaggaccctcacacccttcagcaagcaatggaattagagatacgtcacagtcttgttacagctgctaatcgacatgcaaatcccagggttacaccacgcaattttatccagaatttggcttttgtcgtgtatagggacccagtgatatttatgaaagctgcccagtctgtgtgccagattgagatggttggagataggccatatgttgttctgttaaaggatcgtgagaaggaaaggatcaaggagaaagataaggacaagtcagttgataaggataaagcaacagtcgcagtcactaaggtagtttctggggacacagctgcaggatctcctgcaaattctcatggaaaacagtctgatttgaattcaagaaacgtgaaatctcaccgcaagccaccacaaagttttgtcactgttatagagcatctcttagatctgctgatgtcctttgttccgccaccccgtccagaggatcaagttgatgtctctggtactgccttatcttcagacatggatattgactgcagttctgcaaaagggaaagggaaagctgtgtctgtcccacctgaagagagcaagcatgctatccaagagtctactgcatcccttgccaaaactgcatttttccttaagttgctgacagatgtattgttaacttacgcatcatccattcatgttgttcttcgtcatgatgctgagctgagtaacatgcacggtccaaatcgaacaagtgccagactaactagtggtggaatctttaaccatatcctgcagcatttccttcctcatgctacaaggcaaaagaaagagagaaaaaatgatggagattggatgtataaattggcaacaagggctaatcagttcttggtggcttcatctattcgttctgcagaggcccgaaaaaggattttctctgaaatctgcagtatatttcttgatttcactgactcgtctgcagggtacaatgccccagtaccaaggatgaatgtgtatgtcgatttactgaatgatattctgtcagcccgatcaccaactggctcctcgctgtcagcagaatctgcagttatatttgttgaagctggtcttgttcattcattatcgacaatgcttcaagttcttgatttggatcaccctgattctgcaaagattgttactgctgttgttaaggccttggaactcgtcagtaaggaacatattcattcagcagataatgcgaaaggagtgaactcgtcaaagattgcttctgacagcaacaacgtgaattcatcatctaatagattccaggctcttgacatgacttctcagcccacagagatggttactgatcacagggaaacgtttaatgctgtccgaacttcacaaatatcagattcagtggcagatgagatggatcatgatcgtgatatggatggcggctttgctcgtgatggtgaagatgattttatgcatgagatggctgaagatggaactggtgatggatctacaatggaaattagaattgaaattccacgcaatagagaggatgatatggcccctgctgctgatgacactgatgaagatatatctgccgaggatggtgaagatgatgaagacgaagatgaggagaacaacaatctggaggaagatgatgcccatcggatgtctcatcctgacacagatcaggaagaccgtgaaatggatgaagaggaatttgatgaggatctgctagaagaagacgatgaagatgaggatgaggaaggagtcatccttcgcctggaggaggggattaatggcattaatgtgttggaccatgttgaagtatttggtgggagcaacaatttgtctggggatacgctgcgtgtgatgcctctagacatttttggtacaagaaggcaaggccgaagtacctccatatacaatcttcttggtagggctagtgatcatggtgttcttgatcatccacttctcgaagagccttcttcaacaacgaatttttcagaccaagggcatccagagaatcttgttgagatggctttctctgatcgaaaccatgaaagtagctcctctcgtttggatgctatattccgcagcttgcgaagtggacgtaatggacaccgctttaatatgtggctagatgacggtccacaacgtaatggatctgctgcccctgcagtacctgaaggcattgaagaattgctgatctctcatctgagacggcccactcctcaacctgatggccagagaacacctgttggtggtgctcaagaaaatgaccagcccaaccatggatcagatgctgaggcaagggaagtagcaccagctcagcaaaatgagaacagtgaaagtacactgaatcctctagatctgtcagaatgtgctggccctgcacctcctgatagtgatgcacttcaaagagatgtgtccaatgcaagtgagcttgctacagagatgcagtatgaacgtagtgatgctataacacgtgacgttgaagcagtgagccaagcaagcagtggcagtggtgctactttaggggagagcctcagaagtttagaggttgaaataggaagtgttgaagggcatgatgatggtgaccggcatggaacttcaggcacctcagaacgtttacctttgggtgatattcaagcagctgctcgatcacggaggccatctggaaatgctgtgccagtaagcagtagagatatgtctctggagagtgttagtgaggttcctcaaaatccagaccaagaacctgatcagaatgctagtgaggggaatcaggagcctaccagagcggcaggtgctgactcaattgatcctacatttttggaggctcttcctgaggacttgcgagctgaagttctttcttcacgtcaaaatcaagtaactcagacttctaatgaccaacctcaggatgatggtgatattgatcctgaattccttgctgcacttccccctgatataagagaggaggtgctagctcagcaacgtactcaaaggatgcaacaacaatcacaagaattagaaggacaacctgttgaaatggatgctgtttcaattattgcaacattcccttcagaaatccgggaagaggtgcttttgacatctcctgacacactactagccacactcacgcctgcactagttgctgaggccaacatgttaagggagagatttgctcatcggtatcacagtagctccctttttggtatgaactccaggaacaggagaggtgagtcctcccgacgtgacataatggcagcaggacttgatagaaacacaggtgatccctccagatcaactagcaagccaattgagactgaaggtgctcctcttgtcgatgaagatggccttaaagctcttattcggttacttcgagttgttcagcctctatacaagggtcagctgcagaagctacttgtgaatctttgtactcatcggggtagcagacaggccttggttcaaattctagtggacatgcttatgcttgatctgcaggggttttcaaagaaatcaatagatgcacctgagccaccatttaggttgtatggttgccatgcaaatatcgcatattcacgccctcaatcttcggatggtcttcctccattagtctcacgtcgtgtgctcgaaacgctcacgaacttggcaagaagccatccaaatgttgctaaactcttgctctttcttgaattcccttgcccatcaagatgtttccccgaagcacatgatcataggcatggcaaggctgttctcctagatgatggtgaagaacagaaaacctttgcacttgttcttctgttaaatctgttggatcagccactttatatgagaagtgtagctcatcttgaacagttactaaaccttcttgacgttgtcatgcacaatgctgagaatgaaattaagcaagctaagctagaagcatcatctgagaagccatctgcacctgataatgcagtgcaagatggtaaaaataactccgacatttctgtatcatatggatcagagttgaatcctgaggatggcagcaaagcccctgctgttgacaacagaagtaacttgcaagctgttttgcgaagtcttcctcaaccagagcttagattgctatgttcattgcttgcgcatgatggattgtcggacagcgcttatctccttgtaggtgaagtgttgaaaaagattgtggctcttgcccctttcttctgttgccatttcataaatgagcttgcacgttcaatgcaaaacttgacacttcgtgcaatgaaggagcttcatttgtacgagaattctgaaaaggctcttcttagctcttcatcagccaatggtactgcagttcttagagtagtgcaggctttgagctctcttgtcaatactcttcaagagagaaaggatccagaacagcctgctgaaaaggaccattcggacgcagtttcccagatttctgaaattaacacagcattggattctctgtggttggaattgagcaactgcataagcaagatagaaagctcttcagagtatgcatcaaatctaagtcctgcttctgcaagtgcagctatgttaacaacaggagtagcacctccattgcctgcaggaactcaaaacttattaccatatatagaatcattttttgtgacatgtgagaagttgcgtcctgggcaacctgatgctgtacaagatgcttcaacttctgatatggaagatgcttcgacatctagtggtgggcagagatcatctgcttgtcaagctagtcttgatgaaaagcaaaatgcttttgtgaaattctcagagaagcacagaagattgctgaatgcattcatccgtcaaaactctggattgctggaaaagtcattctcgctgatgttgaaaattcctcgcctgattgattttgacaataaacgtgcatattttcggtctaaaatcaagcatcagtatgatcatcatcatcatagccctgttagaatttctgtgcgtcgtccatatattcttgaggactcctacaatcagcttaggatgcgatctcctcaggatttgaagggtaggctcactgtccaatttcaaggagaagaaggaattgatgctggtgggctgacaagggaatggtaccagtcgatatcacgagtcattgttgacaagagtgcccttctgtttacgacagtcgggaatgatttgacgtttcaaccgaatcctaattctgtgtatcaaactgagcacctctcatacttcaaatttgttggacgagtggttggcaaagctctcttcgatggtcagcttttagatgcccacttcactagatctttctacaaacacatacttggtgtcaaggttacataccatgacattgaagccatcgatccttcgtactacaaaaacttgaaatggatgcttgagacgaagagaaactgatattgtacgagaaggcagaggtcactgattgtgagttgattcctggagggcgtaacatcagggttactgaggagaataagcatgaatatgtcgaccgggtagcagagcatagattgaccactgccatcaggcctcagattaatgccttcctggaagggtttaatgaactcattccacgggagctgatatctatcttcaacgacaaagagcttgagcttctgattagtggtcttccagatattgacttggacgatttgaaaacaaatacagaatattctggctacagcatagcctctccagtcgtccagtggttctgggaaatcgttcaggggttcagcaaggaagacaaagctcggttcctccagttcgtcactggcacttcaaaggtaccgttggaaggttttagtgaacttcaagggatctctgggccacaaaggtttcagatacacaaggcatacggcagcacgaaccatctgccttcagctcatacttgctttaaccaactagacttgcctgagtacacgtccaaagagcagctccaggagaggttactgttggcaatccacgaagcaaatgaaggtttcggatttggctaatcagtcatgctcgtttgtccgtgagagtctgtacagatactgagcattgcaatgggcgagcagcacgtgtgtgctgatccttaccacattctgaactccacgtgtttgatggccggggagaacatagaagaatctccgtgggagaggtactgatgagagagagcgactattttgtgttcataatattcattacctttttttagcttttttcggtcgttgccccgttcgtagtttttgccttacattggacttcgctccgattttttttctctgcttttccttcatagactggtgtaagatgtaaccgaacactatgtcaaatgcaaatcatcttagggccccttcgattattactgaatggaggcatggaataatttctagccgtactgtttctctactatattaaagcatcagttttagttacacgattgtcctgcatctataaaaaaactaaaattatacataattagct

SEQ ID NO: 215144 - DNA, 11613 bp, Zea Mays
cttccccaggaaaaaagcgaaccgacccaactctgaaccctccaagtttcctccctcttcaccccaaacaacaatcacagccctctctccctctcccctcctttacgtcgccgcctccgaatccccacctctttgctcctccgccatcctcctccgcggccgatgtgtgtgccccgccggcccaaaaccctagaggttacgagcaggtaagggtttcgatcggagatggcggctgcggctgcggcgatggccgcacatagagccagcttcccgctgcgcctgcagcagatccttgctggcagccgcgccgtctcacctgcgatcaagatcgagtctgagccgcctgcaaacatcaaagcatttattgatcgagtagtcaatattccactacatgacattgccataccgctatcaggcttctgttgggagttcaataagggaaatttccaccattggaggcctttatttattcattttgacacctatttcaagacatacatttcttctcggaaggatcttcttttatctgatgatatgaccgaggctgaccctatgccaaagaatgccatcttgaaaatcttaagagttatgcagattattttggagaactgccagaatagaagttcttttactggtcttgcgcatcttaagcttctcctggcatcgtcagaccctgagatagttgtagcagctttggaaactcttgttgccttggtcaaaataaatccttcaaagttgcatatgaatggaaagctaattagctgcggacctataaacacccatcttctatcattggcccaaggatggggcagcaaggaggaaggtcttggcatatattcttgtgttgtggcaaatgaaggaaaccatcaggggggtttgtccttgttccctgtagacttggagaacaaatatggtggcacacaacatcgtcttggttcaactcttcattttgagtataatttgggtcctgcacagtatcctggccaaactagtgacaagggcaagtcatctaatttgtgtgtgatacatattccagacatgcatcttcagaaagaggatgacttgagcatactgaagcaatgtgtagacaagttcaatgtgcccccagagcacaggtttgcattgcttacaaggataagatatgcccgtgctttcaactctgcacggacttgtaggatctatagccgcataagtcttctttcgttcattgttcttgtgcaatcgagtgatgctcatgatgaactcacatatttctttacaaatgaaccagagtacataaacgagttaatcaggcttgttcggtcagaggattctgttcctgggtccattcgtgctctggctatgctagcactgggagcacagctggcagcatatgcatcatctcatgagcgtgctaggatattgagtggctcaagtattatctctgctggtggcaatcgtatggtcttgctcagtgtcctgcagaaagcaatatcctcactcaatagcctgaatgatacctcatctcctctaattgttgatgcccttcttcagttttttctgctccatgtactgtcttcatcaagttcagggactacggttagaggctcagggatggttcctcctctcttgcccttgctgcgagataatgatccttctcatatgcatcttgtctgcttggcagtgaagactctccaaaagcttatggagtacagcagccctgctgtttctctgtttaaagacttgggtggtgtagagcttttgtctcagaggttacatgtagaagttcagcgtgttattggtactgctgatggacataattcaatggttactgatgcagtgaaatcagatgataaccacatgtactctcagaagcgattgattaaagctttgctcaaggctttggggtctgctacttattcccctgggaatcctgctcgttctcaaagctcccaagataactcattgcctgtctcactttcccttatatttcagaatgtagataagtttgggggtgacatttatttttcagcagttactgttatgagcgaaataatccataaagatcctacatgctttattactttgaaggaactcggtgttccagatgcttttatctcatcagtgactgctggggtaataccatcttgtaaagcccttatctgtgttcctaatggcctgggtgcaatatgcctcaataatcaaggacttgaggctgtcagggaaacttcagcactgcgatttcttgtagataccttcactagcaggaaatacttgataccaatgaatgagggtgtggtccttctagctaatgcagtggaagagcttcttcgtcatgtgcaatccctgagaagtattggtgttgacatcattattgaaataatcaataaactaagttcgtctcaggaatataaaaacaatgaaacagccaccttgcaagaaaaaacagatatggaaactgatgttgaagggcgtgatttggtaagtgctatggactcaagcgtggatggaagtaatgatgaacagttttctcatctgagcattttccatgtgatggtattggtgcaccggacaatggaaaactcggaaacctgccggttatttgtagaaaagggagggctacatgctcttttgacactcttgttgaggcctagcatcacacagtcatctggagggatgcctattgctttgcatagcacgatggtgttcaagggttttactcagcatcactctactccacttgcacgtgcattttgctcatctttaaaggagcatttgaagagtgcattgaaggaacttgataaagtttccaactcatttgatatgaccaagattgaaaaaggagcgatcccatctttgtttgttgttgaatttttgctattcctagctgcctcaaaagataatcgttggatgaatgctttgctctcagaatttggcgatgccagcagggaggtcctggaagatgttgggcaagttcaccgggaagtgctttggaaaatttcgctttttgaaaaaaacaagattgtcgctgaaaccagttcatcttcttccacatctgaagctcagcagcctgacatgtctgccagcgacattggtgatagcagatacacttctttcaggcaatatcttgatccaattttaaggcgaaggggttctgggtggaacatagagtctcaagtgtctgacctcattaatatgtatcgagacattggccgtgcagctagtgactcgcagagggttggttctgatagatattctagtctaggtttgccctcaagttcccaggaccagttttccagttcatctgatgcaaatgccagcacaaggtcagaagaggacaagaaaaaatctgagcattcctcctgctttgacatgatgagatctctctcctaccatatcaaccatctttttttggagcttggtaaagcaatgctttttgcatctcgtcgggagaatagtcctgtaaacctatccccagccgttatatctgttgctaacaatattgcttctattgtgttggagcacctcaactttgaaggtcattcggtaagttttgagagggacatgactgttaccacaaaatgcagatatcttggaaaggtggttgaatttgttgatgggatgttattagaccggccagaatcatgtaattcgattatggtgaattcattttattgccgtggtgtcattcaggccatcctgaccacatttcaggccaccagtgagttgctcttcacaatgagcaggccaccgtcttcacctatggagacggatagtaaaaccggaaaggatggaaaggagatggattcttcatggatctatggtcccctcaccagttatggggcaattatggatcatcttgtgacctcatcttttattctctcttcatcaactagacaattacttgagcaacctatttttaatggatctgtaaggttccctcaagatgctgagacgttcatgaagttacttcagtcaaaggtgttgaagacagttcttcccatctgggcccatccccagttcccagaatgcaacatcgagctgattagttcagtcatgtccatcatgaggcatgtttgctctggggtggaagtgaaagacactgttggcaatggtggtgctcgtttggctggtccacctcctgatgagagtgcaatttcacttattgtagagatgggtttttctcgtgccagggctgaagaagcattaagacaagttggaacaaacagtgttgaaatagcaactgattggttattcgcacacccagaggaaccacaagaggaggatgatgaacttgctcgggcgcttgcaatgtctcttgggaattctgttacccctgcacaagagggagatagtaggtccaatgatcttgagctggaagaagcaacagttcagccgcctcctatagatgaaatgttacgttcatgtcttcagctacttcagagaaaggaagcattagctttctctgtcagggatatgcttgttactatcagctcacagaatgatggccaaaaccgagtaaaggtgcttacatatttgattgataatctgaaacaatgtgtggtggcatctgagccttcaaatgatactgcattgtctgctcttttacatgttcttgctttgattcttcatggagatactgctgcccgtgaagttgcctcaaaggcaggacttgtgaaggttgctttggatctgctgtgcagctgggaggtgcaaattagggaaagtagcatgattgaggttcctaattgggtaatttcctgtttcctttctgttgatcagatgctccagttggaaccaaagttgccagatgttacagagctacatgtcctgaaaagggataactcaaatataaaaacatcacttgtgattgatgacagcaagagaaaagattcagaatccttgccaaatgttgggttactagacatggaggaccagtttcaacttttgaagatctgttgtaagtgcataggaaaacagttaccttcggcttccatgcatgctattctccagctctctgcaacactgacaaaagtccatgcagctgctatttgtttccttgaatctggtggtttgaatgcattactatcactgccgacaagtagtttgttttctgggttcaacaatatggcttctacaataattcgtcacattttggaggaccctcacacccttcagcaagcaatggaattagagatacgtcacagtcttgttacagctgctaatcgacatgcaaatcccagggttacaccacgcaattttatccagaatttggcttttgtcgtgtatagggacccagtgatatttatgaaagctgcccagtctgtgtgccagattgagatggttggagataggccatatgttgttctgttaaaggatcgtgagaaggaaaggatcaaggagaaagataaggacaagtcagttgataaggataaagcaacagtcgcagtcactaaggtagtttctggggacacagctgcaggatctcctgcaaattctcatggaaaacagtctgatttgaattcaagaaacgtgaaatctcaccgcaagccaccacaaagttttgtcactgttatagagcatctcttagatctgctgatgtcctttgttccgccaccccgtccagaggatcaagttgatgtctctggtactgccttatcttcagacatggatattgactgcagttctgcaaaagggaaagggaaagctgtgtctgtcccacctgaagagagcaagcatgctatccaagagtctactgcatcccttgccaaaactgcatttttccttaagttgctgacagatgtattgttaacttacgcatcatccattcatgttgttcttcgtcatgatgctgagctgagtaacatgcacggtccaaatcgaacaagtgccagactaactagtggtggaatctttaaccatatcctgcagcatttccttcctcatgctacaaggcaaaagaaagagagaaaaaatgatggagattggatgtataaattggcaacaagggctaatcagttcttggtggcttcatctattcgttctgcagaggcccgaaaaaggattttctctgaaatctgcagtatatttcttgatttcactgactcgtctgcagggtacaatgccccagtaccaaggatgaatgtgtatgtcgatttactgaatgatattctgtcagcccgatcaccaactggctcctcgctgtcagcagaatctgcagttatatttgttgaagctggtcttgttcattcattatcgacaatgcttcaagttcttgatttggatcaccctgattctgcaaagattgttactgctgttgttaaggccttggaactcgtcagtaaggaacatattcattcagcagataatgcgaaaggagtgaactcgtcaaagattgcttctgacagcaacaacgtgaattcatcatctaatagattccaggctcttgacatgacttctcagcccacagagatggttactgatcacagggaaacgtttaatgctgtccgaacttcacaaatatcagattcagtggcagatgagatggatcatgatcgtgatatggatggcggctttgctcgtgatggtgaagatgattttatgcatgagatggctgaagatggaactggtgatggatctacaatggaaattagaattgaaattccacgcaatagagaggatgatatggcccctgctgctgatgacactgatgaagatatatctgccgaggatggtgaagatgatgaagacgaagatgaggagaacaacaatctggaggaagatgatgcccatcggatgtctcatcctgacacagatcaggaagaccgtgaaatggatgaagaggaatttgatgaggatctgctagaagaagacgatgaagatgaggatgaggaaggagtcatccttcgcctggaggaggggattaatggcattaatgtgttggaccatgttgaagtatttggtgggagcaacaatttgtctggggatacgctgcgtgtgatgcctctagacatttttggtacaagaaggcaaggccgaagtacctccatatacaatcttcttggtagggctagtgatcatggtgttcttgatcatccacttctcgaagagccttcttcaacaacgaatttttcagaccaagggcatccagagaatcttgttgagatggctttctctgatcgaaaccatgaaagtagctcctctcgtttggatgctatattccgcagcttgcgaagtggacgtaatggacaccgctttaatatgtggctagatgacggtccacaacgtaatggatctgctgcccctgcagtacctgaaggcattgaagaattgctgatctctcatctgagacggcccactcctcaacctgatggccagagaacacctgttggtggtgctcaagaaaatgaccagcccaaccatggatcagatgctgaggcaagggaagtagcaccagctcagcaaaatgagaacagtgaaagtacactgaatcctctagatctgtcagaatgtgctggccctgcacctcctgatagtgatgcacttcaaagagatgtgtccaatgcaagtgagcttgctacagagatgcagtatgaacgtagtgatgctataacacgtgacgttgaagcagtgagccaagcaagcagtggcagtggtgctactttaggggagagcctcagaagtttagaggttgaaataggaagtgttgaagggcatgatgatggtgaccggcatggaacttcaggcacctcagaacgtttacctttgggtgatattcaagcagctgctcgatcacggaggccatctggaaatgctgtgccagtaagcagtagagatatgtctctggagagtgttagtgaggttcctcaaaatccagaccaagaacctgatcagaatgctagtgaggggaatcaggagcctaccagagcggcaggtgctgactcaattgatcctacatttttggaggctcttcctgaggacttgcgagctgaagttctttcttcacgtcaaaatcaagtaactcagacttctaatgaccaacctcaggatgatggtgatattgatcctgaattccttgctgcacttccccctgatataagagaggaggtgctagctcagcaacgtactcaaaggatgcaacaacaatcacaagaattagaaggacaacctgttgaaatggatgctgtttcaattattgcaacattcccttcagaaatccgggaagaggtgcttttgacatctcctgacacactactagccacactcacgcctgcactagttgctgaggccaacatgttaagggagagatttgctcatcggtatcacagtagctccctttttggtatgaactccaggaacaggagaggtgagtcctcccgacgtgacataatggcagcaggacttgatagaaacacaggtgatccctccagatcaactagcaagccaattgagactgaaggtgctcctcttgtcgatgaagatggccttaaagctcttattcggttacttcgagttgttcagcctctatacaagggtcagctgcagaagctacttgtgaatctttgtactcatcggggtagcagacaggccttggttcaaattctagtggacatgcttatgcttgatctgcaggggttttcaaagaaatcaatagatgcacctgagccaccatttaggttgtatggttgccatgcaaatatcgcatattcacgccctcaatcttcggatggtcttcctccattagtctcacgtcgtgtgctcgaaacgctcacgaacttggcaagaagccatccaaatgttgctaaactcttgctctttcttgaattcccttgcccatcaagatgtttccccgaagcacatgatcataggcatggcaaggctgttctcctagatgatggtgaagaacagaaaacctttgcacttgttcttctgttaaatctgttggatcagccactttatatgagaagtgtagctcatcttgaacagttactaaaccttcttgacgttgtcatgcacaatgctgagaatgaaattaagcaagctaagctagaagcatcatctgagaagccatctgcacctgataatgcagtgcaagatggtaaaaataactccgacatttctgtatcatatggatcagagttgaatcctgaggatggcagcaaagcccctgctgttgacaacagaagtaacttgcaagctgttttgcgaagtcttcctcaaccagagcttagattgctatgttcattgcttgcgcatgatggattgtcggacagcgcttatctccttgtaggtgaagtgttgaaaaagattgtggctcttgcccctttcttctgttgccatttcataaatgagcttgcacgttcaatgcaaaacttgacacttcgtgcaatgaaggagcttcatttgtacgagaattctgaaaaggctcttcttagctcttcatcagccaatggtactgcagttcttagagtagtgcaggctttgagctctcttgtcaatactcttcaagagagaaaggatccagaacagcctgctgaaaaggaccattcggacgcagtttcccagatttctgaaattaacacagcattggattctctgtggttggaattgagcaactgcataagcaagatagaaagctcttcagagtatgcatcaaatctaagtcctgcttctgcaagtgcagctatgttaacaacaggagtagcacctccattgcctgcaggaactcaaaacttattaccatatatagaatcattttttgtgacatgtgagaagttgcgtcctgggcaacctgatgctgtacaagatgcttcaacttctgatatggaagatgcttcgacatctagtggtgggcagagatcatctgcttgtcaagctagtcttgatgaaaagcaaaatgcttttgtgaaattctcagagaagcacagaagattgctgaatgcattcatccgtcaaaactctggattgctggaaaagtcattctcgctgatgttgaaaattcctcgcctgattgattttgacaataaacgtgcatattttcggtctaaaatcaagcatcagtatgatcatcatcatcatagccctgttagaatttctgtgcgtcgtccatatattcttgaggactcctacaatcagcttaggatgcgatctcctcaggatttgaagggtaggctcactgtccaatttcaaggagaagaaggaattgatgctggtgggctgacaagggaatggtaccagtcgatatcacgagtcattgttgacaagagtgcccttctgtttacgacagtcgggaatgatttgacgtttcaaccgaatcctaattctgtgtatcaaactgagcacctctcatacttcaaatttgttggacgagtggttggcaaagctctcttcgatggtcagcttttagatgcccacttcactagatctttctacaaacacatacttggtgtcaaggttacataccatgacattgaagccatcgatccttcgtactacaaaaacttgaaatggatgcttgagaatgacataagtgatgttttggatctcacctttagcatggatgcagacgaagagaaactgatattgtacgagaaggcagaggtcactgattgtgagttgattcctggagggcgtaacatcagggttactgaggagaataagcatgaatatgtcgaccgggtagcagagcatagattgaccactgccatcaggcctcagattaatgccttcctggaagggtttaatgaactcattccacgggagctgatatctatcttcaacgacaaagagcttgagcttctgattagtggtcttccagatattgacttggacgatttgaaaacaaatacagaatattctggctacagcatagcctctccagtcgtccagtggttctgggaaatcgttcaggggttcagcaaggaagacaaagctcggttcctccagttcgtcactggcacttcaaaggttttagtgaacttcaagggatctctgggccacaaaggtttcagatacacaaggcatacggcagcacgaaccatctgccttcagctcatacttgctttaaccaactagacttgcctgagtacacgtccaaagagcagctccaggagaggttactgttggcaatccacgaagcaaatgaaggtttcggatttggctaatcagtcatgctcgtttgtccgtgagagtctgtacagatactgagcattgcaatgggcgagcagcacgtgtgtgctgatccttaccacattctgaactccacgtgtttgatggccggggagaacatagaagaatctccgtgggagaggtactgatgagagagagcgactattttgtgttcataatattcattacctttttttagcttttttcggtcgttgccccgttcgtagtttttgccttacattggacttcgctccgattttttttctctgcttttccttcatagactggtgtaagatgtaaccgaacactatgtcaaatgcaaatcatcttagggccccttcgattattactgaatggaggcatggaataatttctagccgtactgtttctctactatattaaagcatcagttttagttacacgattgtcctgcatctataaaaaaactaaaattatacataattagct

SEQ ID NO: 215145 - DNA, 11479 bp, Zea Mays
cgccaagtgtccatccttttccttccccaggaaaaaagcgaaccgacccaactctgaaccctccaagtttcctccctcttcaccccaaacaacaatcacagccctctctccctctcccctcctttacgtcgccgcctccgaatccccacctctttgctcctccgccatcctcctccgcggccgatgtgtgtgccccgccggcccaaaaccctagaggttacgagcaggtaagggtttcgatcggagatggcggctgcggctgcggcgatggccgcacatagagccagcttcccgctgcgcctgcagcagatccttgctggcagccgcgccgtctcacctgcgatcaagatcgagtctgagccgcctgcaaacatcaaagcatttattgatcgagtagtcaatattccactacatgacattgccataccgctatcaggcttctgttgggagttcaataagggaaatttccaccattggaggcctttatttattcattttgacacctatttcaagacatacatttcttctcggaaggatcttcttttatctgatgatatgaccgaggctgaccctatgccaaagaatgccatcttgaaaatcttaagagttatgcagattattttggagaactgccagaatagaagttcttttactggtcttgcgcatcttaagcttctcctggcatcgtcagaccctgagatagttgtagcagctttggaaactcttgttgccttggtcaaaataaatccttcaaagttgcatatgaatggaaagctaattagctgcggacctataaacacccatcttctatcattggcccaaggatggggcagcaaggaggaaggtcttggcatatattcttgtgttgtggcaaatgaaggaaaccatcaggggggtttgtccttgttccctgtagacttggagaacaaatatggtggcacacaacatcgtcttggttcaactcttcattttgagtataatttgggtcctgcacagtatcctggccaaactagtgacaagggcaagtcatctaatttgtgtgtgatacatattccagacatgcatcttcagaaagaggatgacttgagcatactgaagcaatgtgtagacaagttcaatgtgcccccagagcacaggtttgcattgcttacaaggataagatatgcccgtgctttcaactctgcacggacttgtaggatctatagccgcataagtcttctttcgttcattgttcttgtgcaatcgagtgatgctcatgatgaactcacatatttctttacaaatgaaccagagtacataaacgagttaatcaggcttgttcggtcagaggattctgttcctgggtccattcgtgctctggctatgctagcactgggagcacagctggcagcatatgcatcatctcatgagcgtgctaggatattgagtggctcaagtattatctctgctggtggcaatcgtatggtcttgctcagtgtcctgcagaaagcaatatcctcactcaatagcctgaatgatacctcatctcctctaattgttgatgcccttcttcagttttttctgctccatgtactgtcttcatcaagttcagggactacggttagaggctcagggatggttcctcctctcttgcccttgctgcgagataatgatccttctcatatgcatcttgtctgcttggcagtgaagactctccaaaagcttatggagtacagcagccctgctgtttctctgtttaaagacttgggtggtgtagagcttttgtctcagaggttacatgtagaagttcagcgtgttattggtactgctgatggacataattcaatggttactgatgcagtgaaatcagatgataaccacatgtactctcagaagcgattgattaaagctttgctcaaggctttggggtctgctacttattcccctgggaatcctgctcgttctcaaagctcccaagataactcattgcctgtctcactttcccttatatttcagaatgtagataagtttgggggtgacatttatttttcagcagttactgttatgagcgaaataatccataaagatcctacatgctttattactttgaaggaactcggtgttccagatgcttttatctcatcagtgactgctggggtaataccatcttgtaaagcccttatctgtgttcctaatggcctgggtgcaatatgcctcaataatcaaggacttgaggctgtcagggaaacttcagcactgcgatttcttgtagataccttcactagcaggaaatacttgataccaatgaatgagggtgtggtccttctagctaatgcagtggaagagcttcttcgtcatgtgcaatccctgagaagtattggtgttgacatcattattgaaataatcaataaactaagttcgtctcaggaatataaaaacaatgaaacagccaccttgcaagaaaaaacagatatggaaactgatgttgaagggcgtgatttggtaagtgctatggactcaagcgtggatggaagtaatgatgaacagttttctcatctgagcattttccatgtgatggtattggtgcaccggacaatggaaaactcggaaacctgccggttatttgtagaaaagggagggctacatgctcttttgacactcttgttgaggcctagcatcacacagtcatctggagggatgcctattgctttgcatagcacgatggtgttcaagggttttactcagcatcactctactccacttgcacgtgcattttgctcatctttaaaggagcatttgaagagtgcattgaaggaacttgataaagtttccaactcatttgatatgaccaagattgaaaaaggagcgatcccatctttgtttgttgttgaatttttgctattcctagctgcctcaaaagataatcgttggatgaatgctttgctctcagaatttggcgatgccagcagggaggtcctggaagatgttgggcaagttcaccgggaagtgctttggaaaatttcgctttttgaaaaaaacaagattgtcgctgaaaccagttcatcttcttccacatctgaagctcagcagcctgacatgtctgccagcgacattggtgatagcagatacacttctttcaggcaatatcttgatccaattttaaggcgaaggggttctgggtggaacatagagtctcaagtgtctgacctcattaatatgtatcgagacattggccgtgcagctagtgactcgcagagggttggttctgatagatattctagtctaggtttgccctcaagttcccaggaccagttttccagttcatctgatgcaaatgccagcacaaggtcagaagaggacaagaaaaaatctgagcattcctcctgctttgacatgatgagatctctctcctaccatatcaaccatctttttttggagcttggtaaagcaatgctttttgcatctcgtcgggagaatagtcctgtaaacctatccccagccgttatatctgttgctaacaatattgcttctattgtgttggagcacctcaactttgaaggtcattcggccaccagtgagttgctcttcacaatgagcaggccaccgtcttcacctatggagacggatagtaaaaccggaaaggatggaaaggagatggattcttcatggatctatggtcccctcaccagttatggggcaattatggatcatcttgtgacctcatcttttattctctcttcatcaactagacaattacttgagcaacctatttttaatggatctgtaaggttccctcaagatgctgagacgttcatgaagttacttcagtcaaaggtgttgaagacagttcttcccatctgggcccatccccagttcccagaatgcaacatcgagctgattagttcagtcatgtccatcatgaggcatgtttgctctggggtggaagtgaaagacactgttggcaatggtggtgctcgtttggctggtccacctcctgatgagagtgcaatttcacttattgtagagatgggtttttctcgtgccagggctgaagaagcattaagacaagttggaacaaacagtgttgaaatagcaactgattggttattcgcacacccagaggaaccacaagaggaggatgatgaacttgctcgggcgcttgcaatgtctcttgggaattctgttacccctgcacaagagggagatagtaggtccaatgatcttgagctggaagaagcaacagttcagccgcctcctatagatgaaatgttacgttcatgtcttcagctacttcagagaaaggaagcattagctttctctgtcagggatatgcttgttactatcagctcacagaatgatggccaaaaccgagtaaaggtgcttacatatttgattgataatctgaaacaatgtgtggtggcatctgagccttcaaatgatactgcattgtctgctcttttacatgttcttgctttgattcttcatggagatactgctgcccgtgaagttgcctcaaaggcaggacttgtgaaggttgctttggatctgctgtgcagctgggaggtgcaaattagggaaagtagcatgattgaggttcctaattgggtaatttcctgtttcctttctgttgatcagatgctccagttggaaccaaagttgccagatgttacagagctacatgtcctgaaaagggataactcaaatataaaaacatcacttgtgattgatgacagcaagagaaaagattcagaatccttgccaaatgttgggttactagacatggaggaccagtttcaacttttgaagatctgttgtaagtgcataggaaaacagttaccttcggcttccatgcatgctattctccagctctctgcaacactgacaaaagtccatgcagctgctatttgtttccttgaatctggtggtttgaatgcattactatcactgccgacaagtagtttgttttctgggttcaacaatatggcttctacaataattcgtcacattttggaggaccctcacacccttcagcaagcaatggaattagagatacgtcacagtcttgttacagctgctaatcgacatgcaaatcccagggttacaccacgcaattttatccagaatttggcttttgtcgtgtatagggacccagtgatatttatgaaagctgcccagtctgtgtgccagattgagatggttggagataggccatatgttgttctgttaaaggatcgtgagaaggaaaggatcaaggagaaagataaggacaagtcagttgataaggataaagcaacagtcgcagtcactaaggtagtttctggggacacagctgcaggatctcctgcaaattctcatggaaaacagtctgatttgaattcaagaaacgtgaaatctcaccgcaagccaccacaaagttttgtcactgttatagagcatctcttagatctgctgatgtcctttgttccgccaccccgtccagaggatcaagttgatgtctctggtactgccttatcttcagacatggatattgactgcagttctgcaaaagggaaagggaaagctgtgtctgtcccacctgaagagagcaagcatgctatccaagagtctactgcatcccttgccaaaactgcatttttccttaagttgctgacagatgtattgttaacttacgcatcatccattcatgttgttcttcgtcatgatgctgagctgagtaacatgcacggtccaaatcgaacaagtgccagactaactagtggtggaatctttaaccatatcctgcagcatttccttcctcatgctacaaggcaaaagaaagagagaaaaaatgatggagattggatgtataaattggcaacaagggctaatcagttcttggtggcttcatctattcgttctgcagaggcccgaaaaaggattttctctgaaatctgcagtatatttcttgatttcactgactcgtctgcagggtacaatgccccagtaccaaggatgaatgtgtatgtcgatttactgaatgatattctgtcagcccgatcaccaactggctcctcgctgtcagcagaatctgcagttatatttgttgaagctggtcttgttcattcattatcgacaatgcttcaagttcttgatttggatcaccctgattctgcaaagattgttactgctgttgttaaggccttggaactcgtcagtaaggaacatattcattcagcagataatgcgaaaggagtgaactcgtcaaagattgcttctgacagcaacaacgtgaattcatcatctaatagattccaggctcttgacatgacttctcagcccacagagatggttactgatcacagggaaacgtttaatgctgtccgaacttcacaaatatcagattcagtggcagatgagatggatcatgatcgtgatatggatggcggctttgctcgtgatggtgaagatgattttatgcatgagatggctgaagatggaactggtgatggatctacaatggaaattagaattgaaattccacgcaatagagaggatgatatggcccctgctgctgatgacactgatgaagatatatctgccgaggatggtgaagatgatgaagacgaagatgaggagaacaacaatctggaggaagatgatgcccatcggatgtctcatcctgacacagatcaggaagaccgtgaaatggatgaagaggaatttgatgaggatctgctagaagaagacgatgaagatgaggatgaggaaggagtcatccttcgcctggaggaggggattaatggcattaatgtgttggaccatgttgaagtatttggtgggagcaacaatttgtctggggatacgctgcgtgtgatgcctctagacatttttggtacaagaaggcaaggccgaagtacctccatatacaatcttcttggtagggctagtgatcatggtgttcttgatcatccacttctcgaagagccttcttcaacaacgaatttttcagaccaagggcatccagagaatcttgttgagatggctttctctgatcgaaaccatgaaagtagctcctctcgtttggatgctatattccgcagcttgcgaagtggacgtaatggacaccgctttaatatgtggctagatgacggtccacaacgtaatggatctgctgcccctgcagtacctgaaggcattgaagaattgctgatctctcatctgagacggcccactcctcaacctgatggccagagaacacctgttggtggtgctcaagaaaatgaccagcccaaccatggatcagatgctgaggcaagggaagtagcaccagctcagcaaaatgagaacagtgaaagtacactgaatcctctagatctgtcagaatgtgctggccctgcacctcctgatagtgatgcacttcaaagagatgtgtccaatgcaagtgagcttgctacagagatgcagtatgaacgtagtgatgctataacacgtgacgttgaagcagtgagccaagcaagcagtggcagtggtgctactttaggggagagcctcagaagtttagaggttgaaataggaagtgttgaagggcatgatgatggtgaccggcatggaacttcaggcacctcagaacgtttacctttgggtgatattcaagcagctgctcgatcacggaggccatctggaaatgctgtgccagtaagcagtagagatatgtctctggagagtgttagtgaggttcctcaaaatccagaccaagaacctgatcagaatgctagtgaggggaatcaggagcctaccagagcggcaggtgctgactcaattgatcctacatttttggaggctcttcctgaggacttgcgagctgaagttctttcttcacgtcaaaatcaagtaactcagacttctaatgaccaacctcaggatgatggtgatattgatcctgaattccttgctgcacttccccctgatataagagaggaggtgctagctcagcaacgtactcaaaggatgcaacaacaatcacaagaattagaaggacaacctgttgaaatggatgctgtttcaattattgcaacattcccttcagaaatccgggaagaggtgcttttgacatctcctgacacactactagccacactcacgcctgcactagttgctgaggccaacatgttaagggagagatttgctcatcggtatcacagtagctccctttttggtatgaactccaggaacaggagaggtgagtcctcccgacgtgacataatggcagcaggacttgatagaaacacaggtgatccctccagatcaactagcaagccaattgagactgaaggtgctcctcttgtcgatgaagatggccttaaagctcttattcggttacttcgagttgttcagcctctatacaagggtcagctgcagaagctacttgtgaatctttgtactcatcggggtagcagacaggccttggttcaaattctagtggacatgcttatgcttgatctgcaggggttttcaaagaaatcaatagatgcacctgagccaccatttaggttgtatggttgccatgcaaatatcgcatattcacgccctcaatcttcggatggtcttcctccattagtctcacgtcgtgtgctcgaaacgctcacgaacttggcaagaagccatccaaatgttgctaaactcttgctctttcttgaattcccttgcccatcaagatgtttccccgaagcacatgatcataggcatggcaaggctgttctcctagatgatggtgaagaacagaaaacctttgcacttgttcttctgttaaatctgttggatcagccactttatatgagaagtgtagctcatcttgaacagttactaaaccttcttgacgttgtcatgcacaatgctgagaatgaaattaagcaagctaagctagaagcatcatctgagaagccatctgcacctgataatgcagtgcaagatggtaaaaataactccgacatttctgtatcatatggatcagagttgaatcctgaggatggcagcaaagcccctgctgttgacaacagaagtaacttgcaagctgttttgcgaagtcttcctcaaccagagcttagattgctatgttcattgcttgcgcatgatggattgtcggacagcgcttatctccttgtaggtgaagtgttgaaaaagattgtggctcttgcccctttcttctgttgccatttcataaatgagcttgcacgttcaatgcaaaacttgacacttcgtgcaatgaaggagcttcatttgtacgagaattctgaaaaggctcttcttagctcttcatcagccaatggtactgcagttcttagagtagtgcaggctttgagctctcttgtcaatactcttcaagagagaaaggatccagaacagcctgctgaaaaggaccattcggacgcagtttcccagatttctgaaattaacacagcattggattctctgtggttggaattgagcaactgcataagcaagatagaaagctcttcagagtatgcatcaaatctaagtcctgcttctgcaagtgcagctatgttaacaacaggagtagcacctccattgcctgcaggaactcaaaacttattaccatatatagaatcattttttgtgacatgtgagaagttgcgtcctgggcaacctgatgctgtacaagatgcttcaacttctgatatggaagatgcttcgacatctagtggtgggcagagatcatctgcttgtcaagctagtcttgatgaaaagcaaaatgcttttgtgaaattctcagagaagcacagaagattgctgaatgcattcatccgtcaaaactctggattgctggaaaagtcattctcgctgatgttgaaaattcctcgcctgattgattttgacaataaacgtgcatattttcggtctaaaatcaagcatcagtatgatcatcatcatcatagccctgttagaatttctgtgcgtcgtccatatattcttgaggactcctacaatcagcttaggatgcgatctcctcaggatttgaagggtaggctcactgtccaatttcaaggagaagaaggaattgatgctggtgggctgacaagggaatggtaccagtcgatatcacgagtcattgttgacaagagtgcccttctgtttacgacagtcgggaatgatttgacgtttcaaccgaatcctaattctgtgtatcaaactgagcacctctcatacttcaaatttgttggacgagtggttggcaaagctctcttcgatggtcagcttttagatgcccacttcactagatctttctacaaacacatacttggtgtcaaggttacataccatgacattgaagccatcgatccttcgtactacaaaaacttgaaatggatgcttgagaatgacataagtgatgttttggatctcacctttagcatggatgcagacgaagagaaactgatattgtacgagaaggcagaggtcactgattgtgagttgattcctggagggcgtaacatcagggttactgaggagaataagcatgaatatgtcgaccgggtagcagagcatagattgaccactgccatcaggcctcagattaatgccttcctggaagggtttaatgaactcattccacgggagctgatatctatcttcaacgacaaagagcttgagcttctgattagtggtcttccagatattgacttggacgatttgaaaacaaatacagaatattctggctacagcatagcctctccagtcgtccagtggttctgggaaatcgttcaggggttcagcaaggaagacaaagctcggttcctccagttcgtcactggcacttcaaaggtaccgttggaaggttttagtgaacttcaagggatctctgggccacaaaggtttcagatacacaaggcatacggcagcacgaaccatctgccttcagctcatacttgctttaaccaactagacttgcctgagtacacgtccaaagagcagctccaggagaggttactgttggcaatccacgaagcaaatgaaggtttcggatttggctaatcagtcatgctcgtttgtccgtgagagtctgtacagatactgagcattgcaatgggcgagcagcacgtgtgtgctgatccttaccacattctgaactccacgtgtttgatggccggggagaacatagaagaatctccgtgggagaggtactgatgagagagagcgactattttgtgttcataatattcattacctttttttagcttttttcggtcgttgccccgttcgtagtttttgccttacattggacttcgctccgattttttttctctgcttttccttcatagactggtgtaagatgtaaccgaacactatgtcaaatgcaaatcatcttagggccccttcgattattactgaatggaggcatggaataatttctagccgtactgtttctctactatattaaagcatcagttttagttacacgattgtcctgcatctataaaaaaactaaaattatacataattagct

SEQ ID NO: 215146 - DNA, 5152 bp, Zea Mays
cgcaaagccacctttcacttttccttgctccgcctctcctgggtccctccctgcccccctttccaactagggtttatcactggccgggctcgtcactgcatagagttccacaagcttcgcggggcgatggtgtcgccgccggcctttgcggcggcggtcgcggtggtggccgtgctgctatgcgcctcggctgccgccaaccccgcaggcgggccccacatggcggacctgagcgtgctgttgcccccgcggatgacaaagcctgtcgagtaccgtctcatcggcggggatggatgcttctcctggtcatgggatcatcatgaccttatttcagttaaaccagagtataatgatagcagcagatgctcgactagtgctcgtttggcatcaattgccccatactctggccggagggagacttctgtctatgcgactgatatcatcagtggaatcacgatacactgcaaagtattcgtagacaagatctcccggatcagtattttccaccatgctgttaaaattgatctagatgaaattgctacattacgtatacatgccttcgatgatgaagaaaatgtgttctcgacattggtgggcttgcagtttttgtggcaccttaccccgaggttggttgataacagtagccatcatcttattcgtattccactgaaagaaacacatttgagtgactgtggtggcttctgcggtgatatgaatattcggtttgagctagaagacaagaatcttggttcagatttctctgtggtgaagggtattgagattggccaagaggttgttaaagctcagttgtttgagcctcagtttgaacatgtgattgacacaatcacattaactgttgctgaatccatgtcactagagccatcatcaccagttctcgtgactgttggtgttttggtgaagtttaaactcaaggtattccgacagaaagttgctcaagtggttaaattaccatcacaatatcatcgctggtatgcgacaaactcttctgtggcccaagtggattccttgggtatcttgcatgcattgagtctagggtttactaaggtggttgttgaagacacaagagtttctggtcatgaacaagtatcatctctacatgttgttattccacggacacttttcctttatctggtccctattatggatgattctgcccatcttcatgggattacaaacattccatcctcaaaagtatggtatgtttatcctggaagaaaatacatggtccttgccaaagcttttgcagagggatttgatgctagggaaatatatattacagaggaaaatgagcttaaactggagagtagtaccatggaattctggaacttatcgcaggtgccagacagttctacaagttcctatgaagtgcaaacttctagattgttaagtcctattttccaggggcaagggcatttagatgcttccttaacttacctaacgggggcatctggaccaacaaaggtgctcaagcttgtgcaagaagttaatgtttgtagtaaggtgaaggcattctgggatgaaggattggagaactccaacgttatttacctgccctgggttcctggagttcaccaggaagttgaaatgatggcaattggagggtgtggtaagacgctggatgactacaagttattttcctctgatgaggatgttgcttctgtgtctgattcccgtatcgtgcgtgcaaaaaagcctggtcaagctgtcatccgagtagtttctgctttcgatttcttgaattttgatgaggtaattgttgaagtttccattccttcagtactgtctatcttgccaatctttcctgtggaggtgcctgttggaacacgacttcattctgctgcagtgttaaaaacatctgctggacacccattctcacaatgtacccattttaatgcttttataaggtggagtctactatccgaggatgaggcctttcacattcttaacaccgctgaggcctcaagcatcgacgacataaaacataattctggttattggggacaaaatggcaatccttgtgcctgggtctctctgagtgcatttgctgctggcagatcaacaatagttgcaacatttgctgttgattcagattcagatattgagacatttggtggacccatttctctggaggcaacttcaaaaatttctgcatattatcctcttgtagttctccaaggggggaatggaaatcattttggtgggtactggtttgacttatctggaattcatagtaggattaagaacatggataacaactctcccaaggagctgtacttagttcctggatcaacaatggatgtccttatcttcggaggacctgagcgttgggaccaagttattgattttgttgaaacagttgatgttattgatccatccaaaaatcatattattagttctaccgctgtgaagaaactatctagtggactatatcgagtatcttgcctaagcaaagtgagctataaattgctgttttcacgtgggaacatggttggtaaagatcatcctgtgcctgcaatttccaaatcagagttcactgttatttgtgacttcccatcagaaataacattgatagcaaatgaaaatgaaaaccgacttgatatattggaagctgctaggaaagctgaccgtggtccagatagattgcaagcatcacccattgtaatctccaacggaagaaatatacgtctagctgctgcgagtatacatgtaaatggaagatttttcgctaattcatcttctcttcgcttgaaatgggaagccactggatgtgaagggcttgcttactttgaagaaaccaaatctgttgaaatgcttgatgagtcagcttgggagagatctcttgtcctacagaattctacaggagtgtgcactgtacgtgctacagttgatgacttttctaccaaatatgctggccaaactcatgaggaagaatacacattccatagtctcacagatgctattcagttgcagattgtttcttctttaagagtcacccctgaatatgtcttattagttttccatcctgaagcacaggaaaacctgattgtaagtggtggaacatgctccctagatgcttctaccaatgacacacatgtggtgcaaatagttacacatccaggaaaagccttatgttctcaattgattcttgcggctaaaggtttaggcgaagctataatcataatccaggatgttggcctttctccaagagcaactactcattctttggttagagttgcaaatgttgactggattaagataacagcagaagagcaaatcagtcttatggaaggaagcacaaaagatttccaaatattagctggcacccaagatggacaaatatttggtgattctcagttcaaatatatggacattgagttgcatcttgacgatgagattctggagcttattggtccaagcgaatcaatggatggacccgaattttcaattaaagctgcaaaaatcggcattacatctctatatgtcagtactaaacaaagctctggacacagagttttaagtcaggttgtcaaggtggaagtgtatggaccattgcaaatacatcctgagtatatttacctcactccaggcgcctcttttgtgctttctgttaaaggtggtccaaaaactggagtttccattgaatactcaagtctgaacatgggaattgtagaagttcaaaataccactgggaaactatctgcaaaatctgtggggaactctactgtacgtgctgctgttttagcaaatggaggtatcttagtctgtgaagcttttggaagagttgaagtggatatcccagtggctatgacattgaatactcaaagtgaacgtctttgtattggctgtagcatgccagtttatccatctctgcctaagggagatctattttccttctatgaaacttgccaaagttacagttggatgatagcagatgagaaggttgtgacattccaatcagctaaatcctggcgatacagacttgaccaaggactatattcagatggaaaaaagagtccatggttttccaatggcagcagcaaattttttatcagtcatatgcttggaaggtctgctggcaaaaccaaaatttccatttcagttgtttgtgatttcttgctacctggcacctctggatctgttgtatcatacaatgcctccaagatcattcttgtggttccagatcctccccttgcacttgcgctaccgatgacttggttattcccacccttctataccactatgagccttttgcctagatcagcaaattcccttggggaaccaaactcacttgacctggagagctccgttgggtattctctgctaaggggcaatggtaggataattgatggaagtaaaattcagactggagaaagcaatacagttgattgtattcaagcaaaagatcactcagctgggagaacggaaatagcagcatgtctacgagttgctcaggttgcacaagtgcgggtagctgctgcagaatcatcaatccagattgtctatctatctgtaaacgataaagttgaattggatataaaatatgctgatgaattaggttatattttcaacgaagctcatggagtagtccctgtaaagattgagacaaattatccagatgttgtttcggttctcatgccaagagattttaatggtacatatgacacacgtgaacgttttgttcttcaggcgagaagtcatggaacagctcttgtaaggctccacacaaacaatgtccctaacaaagtggatttcataatggtatccgtaggagcacaaatatatcctagggatgtgatccttcattctggccagcacctgaacttcactgttatcggagacagtatggacatgtgtggacatggtcactggttaagtagcaatgggaagatcgtccacatcaatcgggtaactggtgaagcacaagcacgtagtgaaggtgtagcggaagtaatcttcaaaggttcaaattttaagctgcaaacaactatcactgttctcaaggtgaaccagatagttgttgatgctcctgcggagacactgactaatgcagctggcctgccggatggatacatgttttctgtgagatttaggagcagacataaatttgtggtatactaggttggaatatgtg

SEQ ID NO: 215147 - DNA, 1545 bp, Zea Mays
agcatatggtgttaaacataatccccaattttaaactattggaattgtggattatacaaattatgacgatatgaaatacgcgattaggaagcttgatgactcacagttcaggaatgcattttcaagagcatatatcagggtgagggagtatgatgctagatcacgaagcagaagccgtagccactcgtactctagaagccccagctacagcaggagcaggagtccaaaatctgtttctcagtcaccctcatctgtggatgaaaggtttgcttttgtttttcctagatttggccatgcggcgatctgggggctgcattgatataatactggatgttttgagaatcggagtggatggtttgggacttcggatagtagagatggattgtgatgcatgtatgacaagtgggctacaatcagtcctaggagcaagataggctgacagtaagaaaatgtgaagtaaagcttgtggtgttattaaaacaaatgtctactattaagttcaatgaccccatatagatggacagtaatttataggtttgtgtttttgtttaactaatgctgccaccttagtaaaaatttctatggcgccttttgcattttggctctctttagccatttccttgtcaaggttcacactagccgaagttgacattacaacaaaattcagtatacacattgctttgtttgcttatttgtattccagttatgagctaattacctgataggctgaaaatctatattatttttctgagagtattaccataaacaccaaaatgtgtccttacattgcagcttcgctcctgtttcagttcattcatatgccgtggaatgttgcctctttattcacatctcgagttgccagtttaatttttatcacaattttatatcagatattagagtgctactaacacatcattaagtaatggaatttgtttcttgtaccttctgcagatcgctatcaagatctcgatccccaatttcttctccttctcatgcaagatatgcgacaagccctaggagcagaagcgcatcccgttctcggtctcctgtgagatccgattgaactttgagagcccttgaagcagtgagcagccccagggagaagaaaggaacttgagagtatgccgtgccatcacaatggtccgagtgattatgctgttgccactgctccctcacatttaagaggtttcctcttatttagacggagcatttaattaacattatcttgctaaagagagacttatgcgtagtctacttgtgtactcgttcgtttgtcctcatgttcttggcttcaggaactctggttttttatcattgtacccatagtaaaacctagatgtagttggggtatgccgtatgcgtctatattcggttggtcgaatgtaaatctggatgcatatatgcatctgtttggtttcatttaggcctttccttggtttcgtgattaatgacaacataagcttattgctgtgatcaaagtatattttgtagaggtaattaaagctagtcacacaataatggagattgcttagacaacgtatggtt

SEQ ID NO: 215148 - DNA, 2272 bp, Zea Mays
gtccctacctttcctctgattgcgtgggatctcaactcaatctctccttatatagttatatgtagctgttgagttcgttccggttttgtttgacgatagttgagtagacccctggcaatccacccttgcacggttcttttaggttttttgttcgtcatttgcagctgccattctgcctaaattgtttaagcgaacctcctccggggctctctttgttgaagttcgccacggtggcccatgtcagtgtgatgtaaggttggagttggagctgcaatgacataaaacatagaagccttgatgcatgattgaatacgaaaacaatgagcaggcgcaacagccgtaccatctatgtaggcaatctccctggggacatccgtgagagggaggttgaggatctcttctacaagtatggccgtattttggatattgacttgaaaatacctccgagacctcctggatacgcattcgttgagtttgaggatccacgtgatgctgatgatgcaatttatggccgtgatgggtataactttgatggctacaggttgagggttgaattagctcatggtggcagaggccagtcttattcttatgatcgttcaagcagctatagcagtgcatgccgtggaggtgtttctaggcgctctgatttccgtgttatggtcactggtttaccctcatcggcatcgtggcaagatctgaaggaccacatgcggcgcgctggtgatgtctgtttctctgatgtataccgtgaggctggagaaactattggaattgtggattatacaaattatgacgatatgaaatacgcgattaggaagcttgatgactcacagttcaggaatgcattttcaagagcatatatcagggtgagggagtatgatgctagatcacgaagcagaagccgtagccactcgtactctagaagccccagctacagcaggagcaggagtccaaaatctgtttctcagtcaccctcatctgtggatgaaaggtttgcttttgtttttcctagatttggccatgcggcgatctgggggctgcattgatataatactggatgttttgagaatcggagtggatggtttgggacttcggatagtagagatggattgtgatgcatgtatgacaagtgggctacaatcagtcctaggagcaagataggctgacagtaagaaaatgtgaagtaaagcttgtggtgttattaaaacaaatgtctactattaagttcaatgaccccatatagatggacagtaatttataggtttgtgtttttgtttaactaatgctgccaccttagtaaaaatttctatggcgccttttgcattttggctctctttagccatttccttgtcaaggttcacactagccgaagttgacattacaacaaaattcagtatacacattgctttgtttgcttatttgtattccagttatgagctaattacctgataggctgaaaatctatattatttttctgagagtattaccataaacaccaaaatgtgtccttacattgcagcttcgctcctgtttcagttcattcatatgccgtggaatgttgcctctttattcacatctcgagttgccagtttaatttttatcacaattttatatcagatattagagtgctactaacacatcattaagtaatggaatttgtttcttgtaccttctgcagatcgctatcaagatctcgatccccaatttcttctccttctcatgcaagatatgcgacaagccctaggagcagaagcgcatcccgttctcggtctcctgtgagatccgattgaactttgagagcccttgaagcagtgagcagccccagggagaagaaaggaacttgagagtatgccgtgccatcacaatggtccgagtgattatgctgttgccactgctccctcacatttaagaggtttcctcttatttagacggagcatttaattaacattatcttgctaaagagagacttatgcgtagtctacttgtgtactcgttcgtttgtcctcatgttcttggcttcaggaactctggttttttatcattgtacccatagtaaaacctagatgtagttggggtatgccgtatgcgtctatattcggttggtcgaatgtaaatctggatgcatatatgcatctgtttggtttcatttaggcctttccttggtttcgtgattaatgacaacataagcttattgctgtgatcaaagtatattttgtagaggtaattaaagctagtcacacaataatggagattgcttagacaacgtatggtt

SEQ ID NO: 215149 - DNA, 3215 bp, Zea Mays
atggcggcccacgaggccacagcacgcctgcagcctgcaggctgcaacgtcgcggtctaccgcacgaatctcgaagcgtcccgcacccacatttgcccatcgccagctatatcaccacgaccacgggactcctgtcgcaggttccagtattccaccacgcggcgtcgcctgccgaaccccgaaccttctcgaggtcgaggcccctcccctttcgccaggagaaaacaatgagcaggcgcaacagccgtaccatctatgtaggcaatctccctggggacatccgtgagagggaggttgaggatctcttctacaagtatggccgtattttggatattgacttgaaaatacctccgagacctcctggatacgcattcgttgagtttgaggatccacgtgatgctgatgatgcaatttatggccgtgatgggtataactttgatggctacaggttgagggttgaattagctcatggtggcagaggccagtcttattcttatgatcgttcaagcagctatagcagtgcatgccgtggaggtgtttctaggcgctctgatttccgtgttatggtcactggtttaccctcatcggcatcgtggcaagatctgaaggaccacatgcggcgcgctggtgatgtctgtttctctgatgtataccgtgaggctggagaaactattggaattgtggattatacaaattatgacgatatgaaatacgcgattaggaagcttgatgactcacagttcaggaatgcattttcaagagcatatatcagggtgagggagtatgatgctagatcacgaagcagaagccgtagccactcgtactctagaagccccagctacagcaggagcaggagtccaaaatctgtttctcagtcaccctcatctgtggatgaaaggtatgtgaatctatgtcatttagaaatgtacatttgtgaaactgagagtgctaatattgttcgaaggaacccgattgtcaaataaatggtgaaagcaatcagatcttgttgtgaatcatcattgatgtattctgcactacacctatggcgctaaaaatatttgaatatgacatgtcatcattttgtatacaagcttaaagcagggccatggtggatgtaacaactgataggagattgcacattaacttaattatttcctactatctgatacactttcgtcaaacaacgaaatgcctttccagagctgagactgccttatacaaacttctacaaatacagcttaagtttttaagtgtgtgctctaccctaaccttatagaacatgctgaaggtttggctcacaaacttctagataaatctttcaatgtcgtagcagggagtattagatccatcagaagcttgccaaattgagagggtatataaagaggtgttaccagaactttccttctttcaaaacaatagttttgtcgccttttcctgtcgtatcagtcgtctacatagcatgccaaaacccctctgtttctttttcctcatggaaaagcttcagtccccttcttatttatcaacttcatacaacattaacccatagttatcatggcagcgcgtaggcgctgactaggcatccaagcggtcggcagtggatgccatgcctcgtcgcctcgcctgaacccagttaggcgatggtaagacatctcctagaagcccacctagctgttgaactaggctttaatgggtctgccttgtgcactatacgcccagtttcctcttctttcctctgctgccaccaccgttagagccgctagatcgctcacgccggctgcctgccgcgtgcctgtgccgcgcgcccgcgtggcctacacagtgcaccgcccacaagtcgcctacaccagcgttgctcgtgcgtcgtgccgcctgagctcgaccatggatgcttgctacttgctggatttatatttatttgctagtttttcatatatcatgtgatatatgactatatgttgcatttttgctgctggagaaaagggcgtcttggcagcacctaggcggttgtctagaacctaggcgtctaggtgaccggctggcgagaccgtggcgccatgataaccatgcattagcctagagctcttttttctgagttgtaacaacatattttcgtgttttatattttaaacgtagaaaaagactacagataaaattcaccccagattttaatgataataacaatatatttcaaaagatttttttctgttttttgttaaagcaagaggaaaaacaaagtaaggtgccagaattttaacttgatatactttggaacacctactaaaatcatctgtgttatgttatttttttgatgtattgatatctctttaaattagtataactttttgtgttgtactgatttctctttaaaatagtatgacataaatttgctctgtggttcaatgattaaacataccgagcttgttggctaacctccattgttcaaggtttgcttttgtttttcctagatttggccatgcggcgatctgggggctgcattgatataatactggatgttttgagaatcggagtggatggtttgggacttcggatagtagagatggattgtgatgcatgtatgacaagtgggctacaatcagtcctaggagcaagataggctgacaatcgctatcaagatctcgatccccaatttcttctccttctcatgcaagatatgcgacaagccctaggagcagaagcgcatcccgttctcggtctcctgtgagatccgattgaactttgagagcccttgaagcagtgagcagccccagggagaagaaaggaacttgagagtatgccgtgccatcacaatggtccgagtgattatgctgttgccactgctccctcacatttaagaggtttcctcttatttagacggagcatttaattaacattatcttgctaaagagagacttatgcgtagtctacttgtgtactcgttcgtttgtcctcatgttcttggcttcaggaactctggttttttatcattgtacccatagtaaaacctagatgtagttggggtatgccgtatgcgtctatattcggttggtcgaatgtaaatctggatgcatatatgcatctgtttggtttcatttaggcctttccttggtttcgtgattaatgacaacataagcttattgctgtgatcaaagtatattttgtagaggtaattaaagctagtcacacaataatggagattgcttagacaacgtatggtt

SEQ ID NO: 215150 - DNA, 3725 bp, Zea Mays
atggcggcccacgaggccacagcacgcctgcagcctgcaggctgcaacgtcgcggtctaccgcacgaatctcgaagcgtcccgcacccacatttgcccatcgccagctatatcaccacgaccacgggactcctgtcgcaggttccagtattccaccacgcggcgtcgcctgccgaaccccgaaccttctcgaggtcgaggcccctcccctttcgccaggagaaaacaatgagcaggcgcaacagccgtaccatctatgtaggcaatctccctggggacatccgtgagagggaggttgaggatctcttctacaagtatggccgtattttggatattgacttgaaaatacctccgagacctcctggatacgcattcgttgagtttgaggatccacgtgatgctgatgatgcaatttatggccgtgatgggtataactttgatggctacaggttgagggttgaattagctcatggtggcagaggccagtcttattcttatgatcgttcaagcagctatagcagtgcatgccgtggaggtgtttctaggcgctctgatttccgtgttatggtcactggtttaccctcatcggcatcgtggcaagatctgaaggaccacatgcggcgcgctggtgatgtctgtttctctgatgtataccgtgaggctggagaaactattggaattgtggattatacaaattatgacgatatgaaatacgcgattaggaagcttgatgactcacagttcaggaatgcattttcaagagcatatatcagggtgagggagtatgatgctagatcacgaagcagaagccgtagccactcgtactctagaagccccagctacagcaggagcaggagtccaaaatctgtttctcagtcaccctcatctgtggatgaaaggtatgtgaatctatgtcatttagaaatgtacatttgtgaaactgagagtgctaatattgttcgaaggaacccgattgtcaaataaatggtgaaagcaatcagatcttgttgtgaatcatcattgatgtattctgcactacacctatggcgctaaaaatatttgaatatgacatgtcatcattttgtatacaagcttaaagcagggccatggtggatgtaacaactgataggagattgcacattaacttaattatttcctactatctgatacactttcgtcaaacaacgaaatgcctttccagagctgagactgccttatacaaacttctacaaatacagcttaagtttttaagtgtgtgctctaccctaaccttatagaacatgctgaaggtttggctcacaaacttctagataaatctttcaatgtcgtagcagggagtattagatccatcagaagcttgccaaattgagagggtatataaagaggtgttaccagaactttccttctttcaaaacaatagttttgtcgccttttcctgtcgtatcagtcgtctacatagcatgccaaaacccctctgtttctttttcctcatggaaaagcttcagtccccttcttatttatcaacttcatacaacattaacccatagttatcatggcagcgcgtaggcgctgactaggcatccaagcggtcggcagtggatgccatgcctcgtcgcctcgcctgaacccagttaggcgatggtaagacatctcctagaagcccacctagctgttgaactaggctttaatgggtctgccttgtgcactatacgcccagtttcctcttctttcctctgctgccaccaccgttagagccgctagatcgctcacgccggctgcctgccgcgtgcctgtgccgcgcgcccgcgtggcctacacagtgcaccgcccacaagtcgcctacaccagcgttgctcgtgcgtcgtgccgcctgagctcgaccatggatgcttgctacttgctggatttatatttatttgctagtttttcatatatcatgtgatatatgactatatgttgcatttttgctgctggagaaaagggcgtcttggcagcacctaggcggttgtctagaacctaggcgtctaggtgaccggctggcgagaccgtggcgccatgataaccatgcattagcctagagctcttttttctgagttgtaacaacatattttcgtgttttatattttaaacgtagaaaaagactacagataaaattcaccccagattttaatgataataacaatatatttcaaaagatttttttctgttttttgttaaagcaagaggaaaaacaaagtaaggtgccagaattttaacttgatatactttggaacacctactaaaatcatctgtgttatgttatttttttgatgtattgatatctctttaaattagtataactttttgtgttgtactgatttctctttaaaatagtatgacataaatttgctctgtggttcaatgattaaacataccgagcttgttggctaacctccattgttcaaggtttgcttttgtttttcctagatttggccatgcggcgatctgggggctgcattgatataatactggatgttttgagaatcggagtggatggtttgggacttcggatagtagagatggattgtgatgcatgtatgacaagtgggctacaatcagtcctaggagcaagataggctgacagtaagaaaatgtgaagtaaagcttgtggtgttattaaaacaaatgtctactattaagttcaatgaccccatatagatggacagtaatttataggtttgtgtttttgtttaactaatgctgccaccttagtaaaaatttctatggcgccttttgcattttggctctctttagccatttccttgtcaaggttcacactagccgaagttgacattacaacaaaattcagtatacacattgctttgtttgcttatttgtattccagttatgagctaattacctgataggctgaaaatctatattatttttctgagagtattaccataaacaccaaaatgtgtccttacattgcagcttcgctcctgtttcagttcattcatatgccgtggaatgttgcctctttattcacatctcgagttgccagtttaatttttatcacaattttatatcagatattagagtgctactaacacatcattaagtaatggaatttgtttcttgtaccttctgcagatcgctatcaagatctcgatccccaatttcttctccttctcatgcaagatatgcgacaagccctaggagcagaagcgcatcccgttctcggtctcctgtgagatccgattgaactttgagagcccttgaagcagtgagcagccccagggagaagaaaggaacttgagagtatgccgtgccatcacaatggtccgagtgattatgctgttgccactgctccctcacatttaagaggtttcctcttatttagacggagcatttaattaacattatcttgctaaagagagacttatgcgtagtctacttgtgtactcgttcgtttgtcctcatgttcttggcttcaggaactctggttttttatcattgtacccatagtaaaacctagatgtagttggggtatgccgtatgcgtctatattcggttggtcgaatgtaaatctggatgcatatatgcatctgtttggtttcatttaggcctttccttggtttcgtgattaatgacaacataagcttattgctgtgatcaaagtatattttgtagaggtaattaaagctagtcacacaataatggagattgcttagacaacgtatggtt

SEQ ID NO: 215151 - DNA, 4314 bp, Zea Mays
gcgccgagcaaagggtacaaaaatgacattaaaattttttagggtccaaacgtgattttttgtccgagaaagggtcaaactgcaaaaaattcggtgcgcccggccccggtgcggggcctttcttctctacgcacacacacagcggccgtagccggaggaatccgccggcacgagacgtaaactgaggcggagcccgcggcggctgatcggggaatacatcgctgtccgcctgtcccgcgtccggcggctggtcccagccgcgacgacctggggcctcatgttctccgcagctcgccgcctcctcacgtcccgcgcccgctcccgcgccctggcggcggccacgccctacccccactccgctgtggcgtccccgtcgtgccctcgctttccgacgcccaaggagatccgcaggggcttggacgagttcgtagttggccaggacaaggccaagaaggtgctctctgttgctgtgcacaatcactacaagaggatatacaacgagtcatcaaataagtgttctgtgaaaagctgggtgcgtggtggtgtcgctacgaacagtgatgatgtcattgagcttgaaaagagtaacatccttctgattgggccgacagggtcaggtaaaacactgttagcaaaaacgttagctcggtatgtgaatgtgccattcgtgattgctgatgcaacagcaattacacaggctggatattctggtgaagatgtggaatctgtaatctacaaacttctagtggctgctgacttcaatattgaagctgcagagcatggtattgtgtacattgacgaagttgataagctcacaaagaaggctgactgccgcaaggatcgaagggatgtatctggagagggtgtgcagcaagcgttgctaaaaatatttgaaggaacaatcatcagcgtgccaggaaaaagaagtcgagaaaatataccccagggttatgttgaggtcgatacacgaaacatactttttatttgtggaggtgccttctttggcttggaaaagatagtttcagaaagacatcaattttatcctgttggatttggcataccaatatgccatgagctgcggaactgcagctggagaactgttcaggaatcttcctctattgatactgttgaaaatgatgatttgattgcctacggcctgatcccagaatttattggaaggttgccaataacagttggcctgaccaatcttagtgaagagcaattggttcaagtgctcatggagcccaaaaacgcaataggaaagcaatacaagaagctattcaaaatgaatgatgtcaagcttcatttcactgataatgctttgaggatgatagcaaagaaggcactcgcaaaagaaacaggagcccgaggactgcggtctataatggaggacattttgacagaagcaatgtttgagattcctgatggtagacacgggaaagagaaggttattgctgttcttgttgacgaagagtctgtaggaccactacactctcgagggtgtcgagcaaaaatttttcgggatgatggagccttggaactgtatgtttaccagaacaatatcaaactgcccgggctgattcagagcaaccccagacgcagacgcattttccggctctgccttctagtcgcattatcggcaacaaagctttggatttaccagacaattccttgtttttcatcgatatatgaatggattgcatggatactatgcaaggtctacaattttacacaataaaatatgatgaggttgattttcgtgttaaactgttcacacagcaaaagaatggctggaccccacgttctgctttcttcggtagcttgcaatgattttgcaacaacaattcgtatcatttacacgctactggtagcaaacagacagttgttttgatactgaacctgaacaaatggaaaatggtttccaatggttacacatcaaaattatgtttgtatgcatccactgcagtaacacaatgctgagccagaagcaagctaatttttggcattgcggaaatcactaatcgtgctcattatattgatatataaactgacaaacggtagcttatgacttgaatgtgatgagcaaattgtggacataattttttgtggtcatcacagatatccctgctgcacattgcctccatttctttccgttggattgccttgaagtgccccctctccatcgtctccactttctgttggattgccatgaagtgccccttctccatcgtctccactttctgttggattgtcttgaagtgccccttctccggctgttttaaggcctagcttactgagaaagccaccatccagggtgtttgcatcaggagcaggcgctcctccttcattctctgtcttccttttatgggctaggatagcttcaatggcagcggcactggctttagctgcggcttcatccttagcagcaatctctgctctcctcctctccctctcttctctggcaagagcctctgccctcgccttctcttctgcagcccgggcttccgcttcagccttttccctctccacatcctcatataacttggcgatgtcatttcccctcccatctccacgtaatgctccttctaaaagctccctcattccatagctgaacagaaccttctcattcaaaagaataccttttgcaacattgactgcatcatccaaccggtcagcagcaatatatgccttcagcaatgtctcgtagcttgagatgcttgggttaactcccttctccttcatctgattgaagtattcctgagccttgtcgaccatactgaaacccaccaggccatcaataagtttatgatatgcagttgcatcaggcttcagctccaattcgtccattttgtcaaagtaagagataccatcatcgatgcgatcaacactgaagcatgcttccgtgagcagtaaatatgtctccttatccgcaccaacaccactctcacacatctcattgtagagcacctccgccttatctatcagctggttaatctgcaggtgccgaatcaaattattataggatgccacatcaggcaccagcttccattcccccattcttctgaacactgcaactgcatcttcaaatctcccagcagcacaataggtatcaaccatcaccctgaagcttctcagatcaactgcaatccgcagtggcgggtcatgttcctcaagcattctgtcgaacagcttaagtgcatcctccaacctcccattctgcccaagcgcatcaaccacctcattgtagctctcggccccaaacctcaccgcagattcaacacacagcacctctttgtaacactccataaccttttcccccgttcccataaggaagtacgccttcatgagagtcccgtacacaatgccatccagaattggttcgcccccaaccttgtccttgagttcttggtacagctccaaggctttggctccatccccagcacccacgaacccagccatgagaaggctgtagaccttgggatccggcccgacgaatccagaggtgagcatctcatccttgagcttgacggcatccgcgagccggccgtggtctgcaacgaggcactcgacgacgacgcggtaggccgtcggggagggcggcacgggggagccggggcgggcgatgatgcggaggtggtggagcgcgtcgtcggcgaggcggcgcgcggcgagcgcggataggtagagcacgtgcgtggcggcggtgggcgggacggcggcttggagcgcgaagcggtgcagcgcgaagaagtcttcgaggcggcgcgtgcggaggagcgcggcgaggacggcggcgcaggtgaaggatgaggggcggcagttggagtggagcgcgtggcgggtgaggagcgccgcctcggggaggtcggcctggggccccgagaggagcgcgaggatccggttgtggaacgcgaggcgtgacggcgccagcgtggggagcggctccgcgaggcgcactgcccgcggggaaggcgcggggatcgggggcgtcgcgacgaacgtgtccttacggcgctcgcggcgggaagccgtggccgaggcggcgtccgcgtgcgcgagcgggaagagcgccggcacgaggcggcgtgccgagaccggcttcgacagcgacatcttccgcgggtgcgcttgggcgacggccaccgggcggcgacgagggtttggggtttggggcggggatcggccttccgggttggagcattgagaacaggagatatgttactctgtgtttcgccttggctgaagaaaaacgtactcgcaagtcgcaagatttatgatacaaactgacatcatttgctttacattccctttttg

SEQ ID NO: 215152 - DNA, 855 bp, Zea Mays
gtcagaattaaagttgcaaggataatgagatcagaagaactcggcattggattataaacaatagacagtcagcagcaagatcaaaagaaaggaagatgaggtacatcgctgaacttgagcggaaggtacagttcatgcagagagacgccacagcgttggcgacccagctggcattgctgcagagagacacagctgggctgactgtggagaacagcgagctgaagatacgtctgcagagcacagagcaacagatccacctacaagacgctctgaacgaggccctgaaatcggagctgcagcggctgaaggtggcaacggggcagatgggcagccagatgatgggcttcgccggaccgccgcacccgttcggtggagggaaccagcaggccttccaccaccccagccaagcagtgccgccgttcctggcgatgcagcagcagcagcagcacccgcaccatccgctgcaccctctgcagcagacccaggcgctcagcctcaacatgaaaggcccgccagcggctcctcctgctggccagtggcagtggggcggtgatgcgtggtcggagagcagcagcagctgattcggcggcgagctgctgtcgtcttgcaactcggaagaggttgtggatgtatgccatgtccggatgattgaggatacaggatatactgtacgcatgctcggtaaaagaagcgatacatgcaagtatgaagggcgccgcagatatgagtttcgtttcgttctgtgtacctttgcttcagacgcaggatgtgtggatgaaaacgatgctcgaaagaaagaaagaaagaaaaaacccttgttcctgcggtttatatactttgatgatttgatccgct

SEQ ID NO: 215153 - DNA, 3143 bp, Zea Mays
caattttctcgagggagagaggggcagagacagcaagggaacagggaagggagagagagaggaacagctccgagctctcgcctctgccctagctgccaaggttcttgattgattccaatccaaaacaaaaatctgagttctctcatcctctctcctgtcccaactcccaagagtgattactgttttttgtttcgtggatgcgatctgttttacgcgacgatctgcttcgctgttcgcgtgttcgttaacggcgggcgccgacggattggagctgtcattgtcaggcttcatctttcggttttaattctcccaggagaagttcctgggctgggagtaaatgagcggcgccctcccctgtcgatacatgccgtttctctgggtggaatttatggctgctcggacgccacgctgcttttagtagtaaccaatgcaggttcctcttcttccacagggcctggctgtggctggaagctgcaattttttttttggcaacgagatttggtccctcgccagtttccaccctctgtttcttcctgctcagatctacagtggcggtagaagattgggtgcgggagcgcgacgtctcagctgggctatccaggaatccagaatttacttcggtggcgaggatgtctgtgagccatgcgcaggacattgaaatatcgctgtgcgacggcaactcggaggacgagcggcggcggcgcaagatcggctcgctgcggcggaaggccatccacgcgctcaagaagcgagggaggcgtcgcgtcgactcccgcttcccgccgccggccatttccatcgaggacgtccgcgacgcggaggaggagcgcgctgtcgcctccttccgggagcggctcgcggcgcacggcctcctccccgagaagcacgatgactaccacatgatgctaaggttcctcaaggccagaaagttcgaagccgagaaggcaatgcagatgtggtcagagatgctgaaatggaggaaagagttcggaactgacaccatccttgaggattttgattttgaggaactggatgatgtgctacgctactaccctcagggctaccatggtgttgaccgccaaggccggccggtgtacattgagaggctagggaaggtggatccgaacaaccttatgcagatcacgtcagtggatcgctacatcaagtaccatgtccaggagtttgagagggccttcagggagaggttccctgcctgcacattagctgctaagaggcacattgactccaccactaccatcttggacgtccagggtgtggggtttaagaatttctccaggactgctagagaacttgtaaaccgaatgcagaagattgatagcgattattatcctgagacactccaccaaatgtttgttgtgaacgctggcagtggattcaagtggatctggaacagtgtgaagggcttccttgacccaaaaacttcatccaagattcatgtgctcggttcgaactaccagagtaggcttcttgaagtaatagattcgagtgagttgccagaattccttggtggttcatgcacatgtagtgacaagggtggttgccttggatcgaacaaagggccatggaatgatccttatatattgaagctgatccacaatttggaagctggatgcatgagggaaaccaccaaacccgtttctgagggcggagaaagaagcagctcttcctttcggttggaacagatgaaatggcagggcatgttaagcgatacatcaaatgctgaatcaggatccgatgttgatgattttggtccatcatttgttcataaagtttcaggctatggttgcttgactccggttcgtgaggaggtaaagggcacagattgtgcaacatacttgagctgcgatgatcaaagtcacccggatatggttcctgaattttaccatggagtgcaacggactactgaaatggtgcagaaacaaatggctgatttcaggcaatattccaccaacagaaggcctcgtgaattagggaacggctctcttaatgccaatggtacagcagctgctcagaggggctgggaagacgtggcgaagctagtagtcacagccttgatcaagctcttctccttcatccggctgttcctttccagagccgccgagagtaggctagagaaggtccgtcgcactgccccaccaccagcagcagagaagccaaagccgccccgagccgtcagcgaagaagaggtgcgcgcctgcctgcagcgcctggacagtctcgagtcgctgtgcggccaccttgccaccaggcctgcgcagatcccggaggacaaagagcgcgttctgctgagctcgttcgagcggatccggtctgttgaggctgacctcgagaggaccaaaagagtgctgaacgcgaccgtggcgaagcagaaggcgctggtggaggaggtggctctggagtctgtgcaggagctgcctagagccaagaagaggatgttctgttgataggacatggaggtcaacagcacgggaccccgaaccatgtcgtcgacattaaccgaccgaccaaccgaccgtgaagctgacgcgactctctgccaccagccagccggagccatttttgacctcgctgccgccgccgccgaagccgacgccgccgactctcacctaacaccgaaatggaagagaagaccggcggcgccccctgttggctgctgcttcccttttcatgccgccccttttttgtagtgcctccatttggccgtactctgctggcggggcccgggccgggtggcgcctttttgattggtgaatgctgcggcggtcgccaagcaccacccttgtttcttggccaggcgcgcgcgagagagagagagatagatggtgctggttggtgtccgaatggctggagtcgttctgtacgtacttgagtactgctgagtgctgaccccgtggctggaggtgggagacagacagtggcgagcttggtgccgtcgatgcacctgtacatgccatgccacaccggctgtgattctagtggcctgctaatatacagattgttgcgacagcccatgttactgttggccttctgtgctgggtgtgttggtggaatagtttgggccgccatgccgatttggcgagggcgacgacatggatgagccgatgccgagcggatggtgcagg

SEQ ID NO: 215154 - DNA, 2916 bp, Zea Mays
caatccaaaacaaaaatctgagttctctcatcctctctcctgtcccaactcccaagagtgattactgttttttgtttcgtggatgcgatctgttttacgcgacgatctgcttcgctgttcgcgtgttcgttaacggcgggcgccgacggattggagctgtcattgtcaggcttcatctttcggttttaattctcccaggagaagttcctgggctgggagtaaatgagcggcgccctcccctgtcgatacatgccgtttctctgggtggaatttatggctgctcggacgccacgctgcttttagtagtaaccaatgcagacagtggcggtagaagattgggtgcgggagcgcgacgtctcagctgggctatccaggaatccagaatttacttcggtggcgaggatgtctgtgagccatgcgcaggacattgaaatatcgctgtgcgacggcaactcggaggacgagcggcggcggcgcaagatcggctcgctgcggcggaaggccatccacgcgctcaagaagcgagggaggcgtcgcgtcgactcccgcttcccgccgccggccatttccatcgaggacgtccgcgacgcggaggaggagcgcgctgtcgcctccttccgggagcggctcgcggcgcacggcctcctccccgagaagcacgatgactaccacatgatgctaaggttcctcaaggccagaaagttcgaagccgagaaggcaatgcagatgtggtcagagatgctgaaatggaggaaagagttcggaactgacaccatccttgaggattttgattttgaggaactggatgatgtgctacgctactaccctcagggctaccatggtgttgaccgccaaggccggccggtgtacattgagaggctagggaaggtggatccgaacaaccttatgcagatcacgtcagtggatcgctacatcaagtaccatgtccaggagtttgagagggccttcagggagaggttccctgcctgcacattagctgctaagaggcacattgactccaccactaccatcttggacgtccagggtgtggggtttaagaatttctccaggactgctagagaacttgtaaaccgaatgcagaagattgatagcgattattatcctgagacactccaccaaatgtttgttgtgaacgctggcagtggattcaagtggatctggaacagtgtgaagggcttccttgacccaaaaacttcatccaagattcatgtgctcggttcgaactaccagagtaggcttcttgaagtaatagattcgagtgagttgccagaattccttggtggttcatgcacatgtagtgacaagggtggttgccttggatcgaacaaagggccatggaatgatccttatatattgaagctgatccacaatttggaagctggatgcatgagggaaaccaccaaacccgtttctgagggcggagaaagaagcagctcttcctttcggttggaacagatgaaatggcagggcatgttaagcgatacatcaaatgctgaatcaggatccgatgttgatgattttggtccatcatttgttcataaagtttcaggctatggttgcttgactccggttcgtgaggaggtaaagggcacagattgtgcaacatacttgagctgcgatgatcaaagtcacccggatatggttcctgaattttaccatggagtgcaacggactactgaaatggtgcagaaacaaatggctgatttcaggcaatattccaccaacagaaggcctcgtgaattagggaacggctctcttaatgccaatggtacagcagctgctcagaggggctgggaagacgtggcgaagctagtagtcacagccttgatcaagctcttctccttcatccggctgttcctttccagagccgccgagagtaggctagagaaggtccgtcgcactgccccaccaccagcagcagagaagccaaagccgccccgagccgtcagcgaagaagaggtgcgcgcctgcctgcagcgcctggacagtctcgagtcgctgtgcggccaccttgccaccaggcctgcgcagatcccggaggacaaagagcgcgttctgctgagctcgttcgagcggatccggtctgttgaggctgacctcgagaggaccaaaagagtgctgaacgcgaccgtggcgaagcagaaggcgctggtggaggaggtggctctggagtctgtgcaggagctgcctagagccaagaagaggatgttctgttgataggacatggaggtcaacagcacgggaccccgaaccatgtcgtcgacattaaccgaccgaccaaccgaccgtgaagctgacgcgactctctgccaccagccagccggagccatttttgacctcgctgccgccgccgccgaagccgacgccgccgactctcacctaacaccgaaatggaagagaagaccggcggcgccccctgttggctgctgcttcccttttcatgccgccccttttttgtagtgcctccatttggccgtactctgctggcggggcccgggccgggtggcgcctttttgattggtgaatgctgcggcggtcgccaagcaccacccttgtttcttggccaggcgcgcgcgagagagagagagatagatggtgctggttggtgtccgaatggctggagtcgttctgtacgtacttgagtactgctgagtgctgaccccgtggctggaggtgggagacagacagtggcgagcttggtgccgtcgatgcacctgtacatgccatgccacaccggctgtgattctagtggcctgctaatatacagattgttgcgacagcccatgttactgttggccttctgtgctgggtgtgttggtggaatagtttgggccgccatgccgatttggcgagggcgacgacatggatgagccgatgccgagcggatggtgcagg

SEQ ID NO: 215155 - DNA, 1997 bp, Zea Mays
agtaaatgagcggcgccctcccctgtcgatacatgccgtttctctgggtggaatttatggctgctcggacgccacgctgcttttagtagtaaccaatgcaggttcctcttcttccacagggcctggctgtggctggaagctgcaattttttttttggcaacgagatttggtccctcgccagtttccaccctctgtttcttcctgctcagatctgtccgtgtcgcaggactcgcactcctgcccgccagctccttttctttaatggttgctgcagcgaactgatcgttcgtggtatttcttttctcccgcagacagtggcggtagaagattgggtgcgggagcgcgacgtctcagctgggctatccaggaatccagaatttacttcggtggcgaggatgtctgtgagccatgcgcaggacattgaaatatcgctgtgcgacggcaactcggaggacgagcggcggcggcgcaagatcggctcgctgcggcggaaggccatccacgcgctcaagaagcgagggaggcgtcgcgtcgactcccgcttcccgccgccggccatttccatcgaggacgtccgcgacgcggaggaggagcgcgctgtcgcctccttccgggagcggctcgcggcgcacggcctcctccccgagaagcacgatgactaccacatgatgctaaggttcctcaaggccagaaagttcgaagccgagaaggcaatgcagatgtggtcagagatgctgaaatggaggaaagagttcggaactgacaccatccttgaggattttgattttgaggaactggatgatgtgctacgctactaccctcagggctaccatggtgttgaccgccaaggccggccggtgtacattgagaggctagggaaggtggatccgaacaaccttatgcagatcacgtcagtggatcgctacatcaagtaccatgtccaggagtttgagagggccttcagggagaggttccctgcctgcacattagctgctaagaggcacattgactccaccactaccatcttggacgtccagggtgtggggtttaagaatttctccaggactgctagagaacttgtaaaccgaatgcagaagattgatagcgattattatcctgagacactccaccaaatgtttgttgtgaacgctggcagtggattcaagtggatctggaacagtgtgaagggcttccttgacccaaaaacttcatccaagattcatgtgctcggttcgaactaccagagtaggcttcttgaagtaatagattcgagtgagttgccagaattccttggtggttcatgcacatgtagtgacaagggtggttgccttggatcgaacaaagggccatggaatgatccttatatattgaagctgatccacaatttggaagctggatgcatgagggaaaccaccaaacccgtttctgagggcggagaaagaagcagctcttcctttcggttggaacagatgaaatggcagggcatgttaagcgatacatcaaatgctgaatcaggatccgatgttgatgattttggtccatcatttgttcataaagtttcaggctatggttgcttgactccggttcgtgaggaggtaaagggcacagattgtgcaacatacttgagctgcgatgatcaaagtcacccggatatggttcctgaattttaccatggagtgcaacggactactgaaatggtgcagaaacaaatggctgatttcaggcaatattccaccaacagaaggcctcgtgaattaggtatcttattttcctatcgttccgggtaattgaattctgaacctgtagttgtttgttaacatttaataaagagtaaggccattgaagatggtgtatgattttctagtgtcatgtcgcgttgaagctctgtaaccatgaattttctgtttgtttgctactgcataaaacaccatcagccatacattccctggtaccataagactttaaaccctagtaaatggtagttgaatttctactgc

SEQ ID NO: 215156 - DNA, 2238 bp, Zea Mays
gtgagattgaaacggggccacagtctccaccgaactctgcagcagatccatcgctctcagccagaccacatatcgccctcgtcgttatctaggtcaccggtcgtgtgccgccgccgccgccgccgcccgacgctctccgtggataaggtcagtccggccacgcattttatttccgtccaagaaaggcagcgccgcaagcaaccggacaggagcagtcgaatccggcaagttaaaggaaacttaaaaagaaaagggaagtaaagaccgggcgcgtcactggcatcaatcggcatcaatcctcccctgcggaagggaaggaagccagaattgggacgcaacctgagctggaaagttgggccttttccttcgaaagggacggggccgcggcgaaccggggcggcaagatcgcccttggacagttcttggtaggcggagagagatattatatcatattctgatatcactcacctacccggtctgccgttcgcctataagaagaccggaggcgaggagggagctccctccctctgcaagtacaagttgtcctgtatttggtttagtttgcgctgctgtatttgttcagggttttggtcgcgtgttgaggaaagattcggggttcttgaaagttgagtgaaacaaatggggtcatcaaggaatgtgccgcacaaagtgatgcaagatgagatcacacctcttctcccgatcaaagctgaggaggatgcagttcatgagttcgacggagcttctttctctggcgcggtcttcaatctgtcaacaaccattgtaggagctggaatcatggctctgcctgcgagtatcaagatgctaggccttatacctggtattctaatgatcatccttgtggcactgctcaccgagacatccattgacatgctggtcaggtgcagccaccagggcaagattacatcctacggctggttgatgggtgacacatttggtcagtgggggagaattgcgctacaagcatcggtggtgataaacaatgtcggcgtgttgattgtatacatgattattattggtgatgtcctatcaggaacatcgtcaacaggtgttcatcacagtggcgtattggaggggtggtttggacctcatatgtggaattctcgtcccattgtactcctcgctacaactcttcttgtgtttgctccattgactcatccaaggaactgtggagatccccaaactgtttcctgagatagatggagttagttctgtctggaaactgttcacagctgtgcctgttcttgtcactgcctacatctgccactacaatgttcacagcatcgataatgagctggaggacaaaactcagattaaaccaattgtgcaaacttctctgggactctgctcaagtgtttacattgcaacaagcttcttcgcatatctcctctttggcgaggctaccttggctgatgtgcttgccaatttcgactctgaccttcgcattccgttgagttctgccttcaatgacatagtgagagtgagctatgtcgtccatatcatgcttgtcttccctattgtattctttgcccttaggctcaacttggatggattactctttcccaccgcaaggcacatttccggtgacaacaagaggttcaccattatcaccatctcacttattgctgtaatttatcttgctgccatcttcataccaagcatctgggatgctttccaattcactggcgccacagctgctgtgcttatcggtttcatctttcctgccatgattatactaagggacccatatggtgtttcaaccaagcgtgacaaggttttggcggtaacaatgattgtgcttgctgtggtgtccaattgtgtggccctgtacagtgatgcgttcaacatcttctacaggaagcaggaggcctagagcccatacctcaggggaagagaacctctttgtacaggtcaagggtgattgttgagcttcaagtaagctactactgagcagcagtaccacgaatctcatggtggtcaatagtttttgtttggtcacttcgaagaaactttggtttgctgcgaatatttgtctagtttcctgaacataaactgcctccacatctggatgggaccacgtgtgctatgatcacccgtggaacaatttttttcttgtaatggatgattgaaatagctgtatataaatatataataatatgcaccgatgcagtagcaaactgaaacaggtactcacaaatataaagctggaactcacgt

SEQ ID NO: 215157 - DNA, 2242 bp, Zea Mays
attttaattcacatggttactcgtgagattgaaacggggccacagtctccaccgaactctgcagcagatccatcgctctcagccagaccacatatcgccctcgtcgttatctaggtcaccggtcgtgtgccgccgccgccgccgccgcccgacgctctccgtggataaggtcagtccggccacgcattttatttccgtccaagaaaggcagcgccgcaagcaaccggacaggagcagtcgaatccggcaagttaaaggaaacttaaaaagaaaagggaagtaaagaccgggcgcgtcactggcatcaatcggcatcaatcctcccctgcggaagggaaggaagccagaattgggacgcaacctgagctggaaagttgggccttttccttcgaaagggacggggccgcggcgaaccggggcggcaagatcgcccttggacagttcttggtaggcggagagagatattatatcatattctgatatcactcacctacccggtctgccgttcgcctataagaagaccggaggcgaggagggagctccctccctctgcaagtacaagttgtcctgtatttggtttagtttgcgctgctgtatttgttcagggttttggtcgcgtgttgaggaaagattcggggttcttgaaagttgagtgaaacaaatggggtcatcaaggaatgtgccgcacaaagtgatgcaagatgagatcacacctcttctcccgatcaaagctgaggaggatgcagttcatgagttcgacggagcttctttctctggcgcggtcttcaatctgtcaacaaccattgtgcagccaccagggcaagattacatcctacggctggttgatgggtgacacatttggtcagtgggggagaattgcgctacaagcatcggtggtgataaacaatgtcggcgtgttgattgtatacatgattattattggtgatgtcctatcaggaacatcgtcaacaggtgttcatcacagtggcgtattggaggggtggtttggacctcatatgtggaattctcgtcccattgtactcctcgctacaactcttcttgtgtttgctccattggtgagctttaaacgtttggattcattgagatacacatctgcactatcagttgctcttgctgtggtttttgttgtcatcactgccggggttgctattgtcagactcatccaaggaactgtggagatccccaaactgtttcctgagatagatggagttagttctgtctggaaactgttcacagctgtgcctgttcttgtcactgcctacatctgccactacaatgttcacagcatcgataatgagctggaggacaaaactcagattaaaccaattgtgcaaacttctctgggactctgctcaagtgtttacattgcaacaagcttcttcgcatatctcctctttggcgaggctaccttggctgatgtgcttgccaatttcgactctgaccttcgcattccgttgagttctgccttcaatgacatagtgagagtgagctatgtcgtccatatcatgcttgtcttccctattgtattctttgcccttaggctcaacttggatggattactctttcccaccgcaaggcacatttccggtgacaacaagaggttcaccattatcaccatctcacttattgctgtaatttatcttgctgccatcttcataccaagcatctgggatgctttccaattcactggcgccacagctgctgtgcttatcggtttcatctttcctgccatgattatactaagggacccatatggtgtttcaaccaagcgtgacaaggttttggcggtaacaatgattgtgcttgctgtggtgtccaattgtgtggccctgtacagtgatgcgttcaacatcttctacaggaagcaggaggcctagagcccatacctcaggggaagagaacctctttgtacaggtcaagggtgattgttgagcttcaagtaagctactactgagcagcagtaccacgaatctcatggtggtcaatagtttttgtttggtcacttcgaagaaactttggtttgctgcgaatatttgtctagtttcctgaacataaactgcctccacatctggatgggaccacgtgtgctatgatcacccgtggaacaatttttttcttgtaatggatgattgaaatagctgtatataaatatataataatatgcaccgatgcagtagcaaactgaaacaggtactcacaaatataaagctggaactcacgt

SEQ ID NO: 215158 - DNA, 1989 bp, Zea Mays
aaaaaagatgcggccgaaaaaaatcgcattgcctctcatccttaccctatcccctctcatccttatcttggcggcggaggcaagtgaaaggaatggcgtaggcgcaggcgagcggccgtccagtcacgcgggcagcagggcacaggcgagaggccgtccaagcgagcggtcgaccaagcgctccaaccagcaccggcagcagcacggcaacaccgtccaggcgagcaaccgtccaagaacaggaacttttctacgcacaacacagtccaagaaccgttgagtgaaacaaatggggtcatcaaggaatgtgccgcacaaagtgatgcaagatgagatcacacctcttctcccgatcaaagctgaggaggatgcagttcatgagttcgacggagcttctttctctggcgcggtcttcaatctgtcaacaaccattgtaggagctggaatcatggctctgcctgcgagtatcaagatgctaggccttatacctggtattctaatgatcatccttgtggcactgctcaccgagacatccattgacatgctggtcaggtgcagccaccagggcaagattacatcctacggctggttgatgggtgacacatttggtcagtgggggagaattgcgctacaagcatcggtggtgataaacaatgtcggcgtgttgattgtatacatgattattattggtgatgtcctatcaggaacatcgtcaacaggtgttcatcacagtggcgtattggaggggtggtttggacctcatatgtggaattctcgtcccattgtactcctcgctacaactcttcttgtgtttgctccattggtgagctttaaacgtttggattcattgagatacacatctgcactatcagttgctcttgctgtggtttttgttgtcatcactgccggggttgctattgtcagactcatccaaggaactgtggagatccccaaactgtttcctgagatagatggagttagttctgtctggaaactgttcacagctgtgcctgttcttgtcactgcctacatctgccactacaatgttcacagcatcgataatgagctggaggacaaaactcagattaaaccaattgtgcaaacttctctgggactctgctcaagtgtttacattgcaacaagcttcttcgcatatctcctctttggcgaggctaccttggctgatgtgcttgccaatttcgactctgaccttcgcattccgttgagttctgccttcaatgacatagtgagagtgagctatgtcgtccatatcatgcttgtcttccctattgtattctttgcccttaggctcaacttggatggattactctttcccaccgcaaggcacatttccggtgacaacaagaggttcaccattatcaccatctcacttattgctgtaatttatcttgctgccatcttcataccaagcatctgggatgctttccaattcactggcgccacagctgctgtgcttatcggtttcatctttcctgccatgattatactaagggacccatatggtgtttcaaccaagcgtgacaaggttttggcggtaacaatgattgtgcttgctgtggtgtccaattgtgtggccctgtacagtgatgcgttcaacatcttctacaggaagcaggaggcctagagcccatacctcaggggaagagaacctctttgtacaggtcaagggtgattgttgagcttcaagtaagctactactgagcagcagtaccacgaatctcatggtggtcaatagtttttgtttggtcacttcgaagaaactttggtttgctgcgaatatttgtctagtttcctgaacataaactgcctccacatctggatgggaccacgtgtgctatgatcacccgtggaacaatttttttcttgtaatggatgattgaaatagctgtatataaatatataataatatgcaccgatgcagtagcaaactgaaacaggtactcacaaatataaagctggaactcacgt

SEQ ID NO: 215159 - DNA, 2284 bp, Zea Mays
tgcacgggcaccgccccgaggctcgcggcgaaccgaacagcccagcagaggctgcagagcaagcaagacaacaagcccagcgtccccgcgcacgcacgcgagcgcctaggccgacgaggcgaggtggccccgccggacccatggggggctgctactccgccttcgcctgctcgcggaagctgcgcggccgcatctccttcatcctcccagtcaccgagcgcgaccgcgacgaccgctccagcgacggcggcgccagctccgtcgcctcccattcgccgtccccgtccccgtccccgcgcaaggacgacgccgggccgctcgtggtgcggaccaccgcggccgagtttgcgcgccgctacgtgctgggccgggagctggggcgcggcgagttcggggtgacgcgccgctgccgggacgccgccacgggggaggcgctcgcgtgcaagaccatccggaggaaccgccggcctcgcggacccgccgcccgccgcctgggggccggtccgccccaccacggacccggagcgcccccagcagcagccgggcaggacccggcagcggcggcgcacgcggcggacgtccagagggaggtggccatcatgcggcgcatgtcgtcccgcggcggcggcgccgtggtgcggctccgcgaggcctgctgcgaggactccgccggcgccgtgcacctcgtcatggagctctgcgagggcggcgagctcttcgaccgcatcgtcgcgcgcgggcactactcggagcgcgccgcggcggccgtcttcggcaccatcgtcgatgtcgtgcgcctgtgccactccaacggggtcatccacagggacctcaagcccgagaacttcctcttcgccaacaagtcggaggactcgcagctcaaggtcatcgacttcggtctctccgtcttcttcagccccggcgatcggttcacggaggtggtggggagcgcgtactacatggcgccggaggtgctgaagcgcaactacgggccggaggtggacgtctggagcgctggcgtcatcctctacatcctcctctgcggcgtcccgccattctggggagacaacgacgagaagatcgcgcaggcggtactccgcggcaacatcgacttcaaccgggagccatggccgagagtgtccgccaacgccaaggacctcatccggcggatgctcgacccaaacccctccacgcgcctcacggcgagagcacccgtggttgaagaacgcggacacggcgccgaacgtgtcgctgggcgaggccgtgcgcgcccggctgcagcagttctccgccatgaacaagttcaagaagaaggcgctgggcgtggtggcgcggaacctgccggtggaggagctggacaagtacgtgcagatgttccacctcatggacaaggaccacaacggcaacctcacgctggaggagctcatggacggcctccacatcaacggccagcccgtgccggagtcggagatcaggatgctgctcgaggccgccgacacggacggcaacggcaccctggactgcgacgagttcgtgacggtgtccctgcacctcaagaagatgagcaacgacgagtacctggcgtcggcgttcaggtacttcgacaaggacggcagcggcttcatcgagcccgaggagctgcgggatgagctgggccccaacgaccaggccatcctcgacatcatccgcgacgtcgacaccgatcgggacggccgcatcagctaccaggagttcgagctcatgatgaagtccggcaccgactggaggaacggctcccgccagtactccagggccaacttcagcagcctcagccgcaggctctgcaaggacatgtgatcgggccccgcgcttggcactgactagtgtcggcaaaagggagaaacgcttgcttgtacgcctgctgcggacagaaaatcgtttcgaattagttgggatattagaactgcatttacaaattcagtcaaaacttgcaaaggaacaacggatgcgataaagggcgcaaaccaacgaaactgacgcagtttcgatttcagaagccgaagcaaaccagagcaactctaaaaacatgctaaaatttttccaaaaaaatgattattagagctaggctaaaaatttttagagttgaattattgtgaatactccaacagttccttaaaaaaaactgaaaaacagaaaattagactccgaattgaaaaaacaccctccaaccagccctatttgcacctacatataggagtgataatagatcgtgatctaaatgtttcttcataattttttagtgccc

SEQ ID NO: 215160 - DNA, 2301 bp, Zea Mays
agcaggtgcaccgtgcacgggcaccgccccgaggctcgcggcgaaccgaacagcccagcagaggctgcagagcaagcaagacaacaagcccagcgtccccgcgcacgcacgcgagcgcctaggccgacgaggcgaggtggccccgccggacccatggggggctgctactccgccttcgcctgctcgcggaagctgcgcggccgcatctccttcatcctcccagtcaccgagcgcgaccgcgacgaccgctccagcgacggcggcgccagctccgtcgcctcccattcgccgtccccgtccccgtccccgcgcaaggacgacgccgggccgctcgtggtgcggaccaccgcggccgagtttgcgcgccgctacgtgctgggccgggagctggggcgcggcgagttcggggtgacgcgccgctgccgggacgccgccacgggggaggcgctcgcgtgcaagaccatccggaggaaccgccggcctcgcggacccgccgcccgccgcctgggggccggtccgccccaccacggacccggagcgcccccagcagcagccgggcaggacccggcagcggcggcgcacgcggcggacgtccagagggaggtggccatcatgcggcgcatgtcgtcccgcggcggcggcgccgtggtgcggctccgcgaggcctgctgcgaggactccgccggcgccgtgcacctcgtcatggagctctgcgagggcggcgagctcttcgaccgcatcgtcgcgcgcgggcactactcggagcgcgccgcggcggccgtcttcggcaccatcgtcgatgtcgtgcgcctgtgccactccaacggggtcatccacagggacctcaagcccgagaacttcctcttcgccaacaagtcggaggactcgcagctcaaggtcatcgacttcggtctctccgtcttcttcagccccggcgatcggttcacggaggtggtggggagcgcgtactacatggcgccggaggtgctgaagcgcaactacgggccggaggtggacgtctggagcgctggcgtcatcctctacatcctcctctgcggcgtcccgccattctggggagacaacgacgagaagatcgcgcaggcggtactccgcggcaacatcgacttcaaccgggagccatggccgagagtgtccgccaacgccaaggacctcatccggcggatgctcgacccaaacccctccacgcgcctcacggcgaggcagagcacccgtggttgaagaacgcggacacggcgccgaacgtgtcgctgggcgaggccgtgcgcgcccggctgcagcagttctccgccatgaacaagttcaagaagaaggcgctgggcgtggtggcgcggaacctgccggtggaggagctggacaagtacgtgcagatgttccacctcatggacaaggaccacaacggcaacctcacgctggaggagctcatggacggcctccacatcaacggccagcccgtgccggagtcggagatcaggatgctgctcgaggccgccgacacggacggcaacggcaccctggactgcgacgagttcgtgacggtgtccctgcacctcaagaagatgagcaacgacgagtacctggcgtcggcgttcaggtacttcgacaaggacggcagcggcttcatcgagcccgaggagctgcgggatgagctgggccccaacgaccaggccatcctcgacatcatccgcgacgtcgacaccgatcgggacggccgcatcagctaccaggagttcgagctcatgatgaagtccggcaccgactggaggaacggctcccgccagtactccagggccaacttcagcagcctcagccgcaggctctgcaaggacatgtgatcgggccccgcgcttggcactgactagtgtcggcaaaagggagaaacgcttgcttgtacgcctgctgcggacagaaaatcgtttcgaattagttgggatattagaactgcatttacaaattcagtcaaaacttgcaaaggaacaacggatgcgataaagggcgcaaaccaacgaaactgacgcagtttcgatttcagaagccgaagcaaaccagagcaactctaaaaacatgctaaaatttttccaaaaaaatgattattagagctaggctaaaaatttttagagttgaattattgtgaatactccaacagttccttaaaaaaaactgaaaaacagaaaattagactccgaattgaaaaaacaccctccaaccagccctatttgcacctacatataggagtgataatagatcgtgatctaaatgtttcttcataattttttagtgccc

SEQ ID NO: 215161 - DNA, 3272 bp, Zea Mays
gttgagaaagctcatagtggagatgttcattgtgttgattggaatccccttgatgttaactatatcttaactgggtatgatggcattaaggctcgattcagcataatcgttgaaacaaatttgatctctatcagttccttatacgttcaatggtcacctgatagagcatctgtttttggaagttctgcagaagatggtttcttaaacgtgtgggatcatgagaagatccttggacaattgtcagtgtctctgatgatggcgagagcactggtggaggtggaacactgcaggtttattgatatggcagaatccttgtgtcagaaacgtgctttggaggctttccgtttggacccgacgaagtggggaggcttccaagtctgtcattcccttggaggaggcactggatctggaatgggcatgcttctcatttcaaagatcggagaggagtaccctgatcggatgatgctgacattttctgtctttccctcgcccaaggtgtcagacactgttgttgagccatacaatgcaaccatgtctgtccatcggctggttgagaacgctgatgaatgcatggttcttgacaacgaagcactttatgacatttgcttccgaactctgaagctgacgacccctagcttttgtttctggacagttggagacttgaaccacttgatcagtgcaacgatgagtggtgtcacttgctgcctctgcttcctaggacaactgaactctgacctgcacaagcttgtagtcaacctgatctcgttccctcggctctacttcttcatgatcggctttgcgccactcaccttgcgtggctcgcagcagtaccgtgcgctcaccgtctctgagctaacccagcagatgtgggatgccaagaacatgatgtgtgttgctgacccacgccatggtcgctgtctcacagcctctgccatgttccgtggcaagatgagcactaaggaggttgatgagcaaatgattaatgtccagaacaagaactcgtcctactttgtggagtggatccccaacaacgtcaagtttcaccccttcgtccccatcatccgggattcatccttcgacccctcccccccacggtccctccccctacccacaccaacgcgcacacggaccgggagtcgcagcggaaaccacaaaaccagcgtgaaggcgcccgaaccaccgcgagccccgcccaccactccacgaaacccaaacgcacctccgcagcgagggatatcccccatcaccccctaccagtttcaattttcaaaagggcgtggaggcgccgcaccaccgccgccgccaccactgacgagggaggaaacgccacctccccgagccagtccgatgttgtccgaccaggagctggcccagtacgtggagtccctcgtccagcacaccgctgcgcagggtggcaccgggatatcggcggatgccgtggtgcgccagctcggggcgcagctcggcgttgacctctcccccaaggcgcagctcatccgcagcgtcctcgtcgcgctcctcggccccgcggccgcgccggcgccggaccccacgggttcgcgtaaggatcccttcgaccccgcaaccgctgccgccgccggcgggccccgcgccgagactcctccacagcagatgcacttctctaccgccgccgcgtcgtcggcccccgccccttctccagccgttccccacttcttcccgcagcagcaccagcaccagatgcagtacttcctgtccgccccgcagcagtatcagcaccagcagcagcagcaacgcgccggcgcgtccccttcgccgtttgacatccccgcgtcgtaccgctacgggcaccagcccttgccgcaggccgaccaggcgcagctgcagaggctcgtccagctacagcaccagcagcagcaactggccgccgcggcgagagttgcagctgcagcggcaccgactccgggggagagtccccgtgcgccggagccgccaccggcgccggcgccggcagcctccaagaagaacagcagtgctagtgttggagcaaaacgaaaaggtggtcctggagggttaaacaaagtctgtggtgtgtctccagagctgcaagctatcgttggtgaaccagccatggctagaactgagattgttaagcagctttgggcatacattcgcaggaacaatttgcaggatcctaacaataagagaaagattatatgcaatgatgagctccgattagtttttgagactgatagcacggacatgttccagatgaataagcttctgtccaagcatatacgtcctctggagagtaaaaatgattcgaaaccagaagcaaagaaattgaagccacagggtgatgaaccaatttcttcagttgaaactgatgttaaccaacttccccttatggtttctgatgcgcttgctaccttttttggtaccggagaaagagaaatggtccattctgaggctgttaagcgtgtctgggatcacattaaaagcaatgatttagaggatccagagaatcctacggtgatactgtgtgactcgaagcttaaacaactctttggacgtgaaagtcttaccgctcatggtgtctcggaggttgctttcagaccacctttacacgcaatctaccaatatctgactgatgcgactgtttggcttgttggctgcaggcgatacgattttctggactcggctgggctaacatcctgggtagtaggcgctgatgaaaggacaagggatctgctcaaattaagtgttgtatttgtatcctccatattggtgaagactgatttacagtagtaagggaaaaggaaatggcagttgtgttgcatactatctagtcagacatagtagtctacgtgacttggaatgatgcggcgttaaactaaaaaggacagcgagagctgatgtaaattcggcagccgtataccgtaggcgcgtgcgttttctggtaagactctcttgcattgctagtgccctaagttgactcgaaacatctgtacctcgaaatgttgctgtgttaggtgatacctaaccttaatacagtttagatcgttatccttactcatccttttcctgaacccctgcatgtatcatcattgtgtgtgcatcgtatgcggcagcagctgtttacgaaaggaacagctagctactgcttttttctgttcctgcatgatgcaggccgtttacaagatcctgcctactgtacaaggctagatacttgctccttgccctcctggtggtgctgctggtggcgacggcgacgacgaagctacaagttcttg

SEQ ID NO: 215162 - DNA, 2737 bp, Zea Mays
ctcgccgccaccgtccatggccaggcgtttcactgctgcacaaatccgacatcttccccgctcccacgcacaccctcttggcctctacatgcgccgccaacctccggtgatcgtcagacaccgctgcaacccatgtccgacgagccatacgatgccgatggcgacgtcggccgcttcctgcattgccctagcccggaggctcacatgttccccttgtctgaaccggagcgcactggagtggggctccgccataccaccgatcatgtccagggccaccagctggcggcgccacagacgctgagtaacgcggcgccggatttatcaggccgcggccagggcctcccggcaccaccacagacgctgacagtggcgccggatcttggcctccagcaggcgccggtaactggattccacggtcaccccgcgctccaccagtcgctgacgacgacagtggcgccggattttggcgtccacgcgctgacgaccaccgagttccagggacacccggcgctggagacgacgctaaacgcggcgcccgacttcggcctccctgtgccggcggcgcccatcgtcgacgccgctgccgggaactaccagccatcatccgccatgctggacgtagagtaccaccagccgatggccatagacaacaacgacatccagcagccgagtcatcaaatgctgccccccgagatgcatcgtcgtcatgcgtatggcggcggcggctttgcggaaccgacgacgatgctctgcgacggcggggccgacgaagcctctttggtcgagcgtaacatgcagatgctgctcgccgatggcggcgtcatcccccaccctcatcgcccgagcccttcgctgtacgaacagctcgtcaacaatgggcaggcagagcttgcggctgtcgtcaggaaccttgaacgcggggagagcagcggtggtgcggctgcgctcatcaacgacgtgtaccctgtgaaggaggacgtctggttccggccaatcgtccgcggccaactcgactgctcccggtgccactcagtccgggaggttgtgcgtcaagatgagaggtggaggatgcatttcacggtgcatgcatcggagccggggatggttttccagcatgcgatcgtcgatcgcatgtccatcggcgcagatggccatttccatacggaccaactgctgcaccatgatctccgcaggcgcaaccacgtgtgggttcacaattttatagcgcgcagcgtggagatgatgaaaagaaacagcgggcagatgcactctagctacgacagtgctgcggcggcggaatacaccaccaccaacgccgtcgtcacccccgcgccgccaccagcgagccaccaccaccatgcgcatatggggctcgaggtcaatatgttgaacagcatactctcagccgcccctgctgcaacaactgttgctcagccgccggggatcacgccgcaggaacaacaacaaaccaccgtagcggaagcagcagcgcctgaagcagtcacgcagcaggaacaggcagaaaacacggatgctcctagggttgcggaggcagcaatccctgtgcctgcggtgacggcgccgcaggaacaagaagccaccgatgctcctgcagagggggctgaacgagcagctgcccctcgatctgcagtgatctcgcggaagcaagacggtagcaaggatgccggagccgtatttgctgcgttcaaatgggaagggttccagccagaaatactcgagtcttccctcgttgagccgtacgatccagagtccggtgccaatgtgttgctgtacccaagcctggtggagcagctccgccagaccgagctcgagaggaaggagagcaagtcgctttccaagatgccggcggcggcggctcaggaggatacgacgtcgacgtacctgcagatgagcggcgaagcttccgctaacgaaccgaagcttggatcctcatcggcgttcagacgcctttgccaaaaagacgctacgtatcggctgtattcgcgcagggtcaactgcatcaacaggaagatcacgaagctccagcagactgcggctagggttggcccgagggggctgttcgccgtgaagcagaagatggaaatgtacaagcgcgagaaggcggagctttacgacgtgatcaacaaaggaatgcaggagaacgagaggggcggcaacagcggtgctgggccttcgaatagggctgctgccggtccttcttcccatgaagctgctgccagcagtccttccaacactgccatcccttccgacggtgctgatacatcaaaggacgatgatgccagtccttacagcgttccctcttccaactgtgctggtccttccggcagcaagtaggggtcggagccggccgctcactaaatataatggtgcagtgagagactgaataagcgcgcgctgcacatcgtattctagtacttttatttatttggactttctgtcgtcgcctgtgtgtaataatattgatcaggaacacctacttggtcatcggaggatcggaccagtttaattaggggaaactggaacgtggcattcttgcatatggttcagaaatatattatcatgagagacacaggaagacatatattagctaatgatttacaggctgcgaacacaagattgatttgttctttgtgattccagttgatgagtgattgccaacgggtagcactatggggttatcagtggctgactaaatgtaagattatgtatgtgcaat

SEQ ID NO: 215163 - DNA, 2090 bp, Zea Mays
agccactactctttcctccccaaatctcccaccccctgtagaaaaatgtgtatgaaatggaatatcactgttgaaactagtcaatgttcctactcccaccacacacctcattccaatcctatgctggtggtgtagagacagacagagagagccgggagagaaaagagaagaggaccaaatctgagaggtggaagccatggcaaaggtgaaacagaaggtggcaacggaggatatccttgaaggagatgatgagagaacatcttcggagaacaactctgtaccacctgtgattctcgacctcaacgagggtttcggtgaggggaacgaggcaggggaagccagcgatgatggtgacgacaaccaggaggaggacggtgacgacggcggcagcacaagtgaagttgcaggcggcaggaattcaagcaacaacagcagcaccaaccacacttccatgagcaacaaggattatgacatgaatagcagcagtaatggtgagggccgcgaagagagagagctagcggtgaggcagtacaacagatccaagcttccccggctccggtggactccggacctgcatatggcatttgtccacgccgtggagaggctgggcgggcaagagagagcaacgccaaagctggtgcttcagacgatgaacgtgagggggatcaccattgctcatgtaaaaagtcacttgcagatgtacaggagcaagaagctggaccaagagtctgctggacacgagagagcagcaacctcctccgttttctcgcccatggacttccacatgatgaggacaggggaccatcatcgctaccatgacatgttcctccatcgacctgcagctggctcggccatctcttcgcggctgctccacggtggggagttcttcgggtcacgaaacgccgccgtctcgccggaggccagaaggctctacgagctcctccaacgccggcagcctaccatgcaaacgttcgacttcaagggctacagtagtggtagtggcctcagggatcaagagtggagtttcagccagcatgcggcggcggcggcggcaagggctggggccatcaatggccacggcccgacgaaagggctcatccacgatatgggtttgagaaagaacagcaggccgatgtcccatttgttcgacgtgcgggatcgggatgctatcgcttccaaccggacatcgtccgacgccacgggtgctgccagccatggcgtaacgatcaccagaagcgcagatcggaacggcaccagctcatcttggccccagcctaggacaatgtcggcagctgcgtccacggctcctgcgttgggcagtcaccacctgctgtctatgggaagaggctccgctaacttaacatcgtcgtcagatcaccccgtggtgacaaatgaagccctaggctcccggctccagacgttccaggagctaaacaaagtaaccggcgacatgtgcgctgggaccagaaagacgaagaggatgaagacgccaatggaggggaacagtggcacgccggacttgcacctaagcttgagccccaacgacgacgacatgggaggagctgccgacaagcagatcaagaagatgaagatccaaggtatcggattaagtgaacagcaggaggtggacggcgataagatgctgcctctctcgctctccctgtcactccggggtggcgaggatgccaggaggttagaggcagctacaggcggtagcagcggcaacaaggccgctctggggcggtgtactttggatctgaccatgtcgatcaaggcaactgagtgaggagataagtttcatggccgttctggggggtgagtactttggatctgaccatgtcgatcgatcaaggcattggagtgagatctttcaagtacttgtccccaaggccttccaaaacttgcacactgcaccatgcggttatattaagtaatatgagtgatagtttaagttaaccttgcatgcgtccagaccagaccacatataaatacatatctatatatatgttcaatgagatgcacttattgtttttctatgtgtacgcatagttgcatcatgctttcatgcaccagttattattgtttttttg

SEQ ID NO: 215164 - DNA, 8952 bp, Zea Mays
gtacaacatttaccaattaccatacatatccaaccccaacactgaattaggagattatggagggttagaaaatacaagacgtgagagaagacgcatcaaatgcgaggagactttaagaagaagggcaaaaaaacaacgagttgctgatgcatacagatcagataccaaatctgcccgggctgatggaacgcggatcggacatacagaatgcgtgcgtctctctcgggcggcacctccggccacgccactgatgattggtgggcaaaagaaacacatgagagacaaataaataaatacacatacacttgaaattttgaacaggccgtttgaacgagtcgtcgtccccggcgtgtttccatccatgggccatggcacccggatattcctagcttataccatgaacgagatatgtatgactcggattacgccatggcaacacgccaacaacacctgagatgtttctgcacgcgccgctggtccggtggccactgagaaaacgaacaagagagccggcagcatatgcctgccgcagcgcgcaaccgtccgagacccgccgtctgacagccgcggagctgcgaagccgaggtggcaactcctgtccccagattctggagaatgaacccattgcggttcccttcctcatcagccaaaacatcaaaccccgtcgaaaaccaccaccaccgagccagatgcggagatcttcagcagcctgattagcccatttgatggaatggcttgttgctgtttcctagtagagataacatgcagattaatgaaaattaagcatcttccctcctcctctcttatttactccatctgggaggatcactgctgggttttcagttttctcaacccaaatcaaatttccagtaagccacgcctttgttgtttccccatctagaccttaatgaatgaaagaaactgtcagcttaagaaagaaagaaagatcattatgtatatgtacaagtagaacctcgggagtacctactatagtgcttgtttaaagccagactattttacctccaacattggaaatgcctgctattatagtgtttttttaagcctcttgggagaatatggttgtcagtatatacatctgcatgtaaactggcatgcccaaaaacgcaccgtctatgcatatatatataataatactgatgccatctatgctagctatgcatctcccttcccatatatactgcggctctaccgcaaaacgttcacaaaatccactggggggaaaaggatggccatgaggcccatgagctactatgaagaccactcgatgtcatcatctcatgccgatgacacggatgaaaggaagagcacggtttcagcctcccccgaggctagcgccgacgaggagtcgttctcattctttgggctgctttactacgccgacacggtagattggctcctcatggccctgggaacccttgggtctatcatccacggcatggcattcccggtcgggtatctcctccttggaaaggcgctcgatgccttcggaactaacataaatgatccggagggcatggtccatgcgctctacaaggtgaacttgctaaagccgtttatcacgtcattagcctttcaaatttctgattctattggcctgcagttgttttcaaattgcatgatgaggctttcccgcttgttgcttgaaggtggtcccctttgtgtggtacatggcagcagccactcttccagctggaatggttggtaagtcaagaatctgccatcctttccttccaatatgcatgtggattttccttgtgatgctttagaaagaacaaatataggggaggacgcaaaacgtgtattcctgtggtttttggtcagctggctctatgaaacaaagatatgaagtagaactgccagcattgctcgctgatttatttgcccaataagcataaaattagctcaactcaggagagattttattttacaggtgcgcttggaaattaattttccacttatattcaattatatatgacataaaaagcacatctctgaactttgacgagtccagtaaaggcgcactaattgcagaaaaagatatgtacagaaatattatttttgttaccagcatgtttagaaatgacaagcataggagatctactatagaaaaacaacatgacaacttttcagtggtgaaatgttgctaaccttttatcggatgaattggccgcatgcagagatctcctgctggatatactcaagtgagagacagttagcacgcatgcggctcgcgtttctgagatcaatccttaatcaagaggttggggccttcgacactgacttgactactgcaaccatcatcaccggagtaaccaactacatgagtgtcatacaagatgcaataggagagaaggtaatggatttcacaatcatatgagcattatactgatgcaagtcttttgaagctctgtggtcagatctgcatcttaagttcactcttctgcagctgggtcatttcgtcgcaagcttctccactttctttgctggtgtcataattgcgtttatcagctgctggcaagttgcaatgctttccttcctggtcattccacttatcctcatcatcggagcagcatacacgaaaaagttgaatgtcttatctttgtcacgcaatgctattgtttcagaggcagtatcagttgtagagcagactttgtcacatatcaagaccgtcttctccttcgttggagagagctgggccatgaagtcctttgtccagtgcatggaaagccaatttaatctaagcaagaaggaagcattgataaagggaataggacttggaatgttccaagcagtgactttttgttcatgggcactgatggtttggattggggcagttgcagtaaccaaaaacaaggcaacaggaggtggcacgatagctgctatcatgagcatcctctttggtgcaatatcaattacctatgccgcaccagaccttcagaccttcaatcaggcaaaaactgcaggaaaagaggtcttcaaggtgataaagagaaagccatccataagttatgcaaaaagtggattagtactagacaagattcatggagagatcaaattccgtagggtgcactttgcatatccttcccgccaggataagccaattctccaaggattctcattgtccatccccgcaggcaaagtcatcgctctggtaggaagcagtggctgtggaaagagcactgtcatttcactacttcaaaggttttatgatccaacttcaggtatgcttctacaatcttatcagtgcaactatatacatgatctacttcaccatttttcgactaaaacctgaacaaaaagggttatatattgtttattactcgtacttttgtgaagcattagtaactgtaagcttaagtagtattaaaatgcttcagtcatgtaagaaggcctaatactgcaggtgacatactcattgatggccacagtatcaagaaaattgatctgaaatcgctgcgcagaaacatagcttcagtctctcaggaaccatcactattttctggtaacataaaggacaacttgaagattggtaaaatggatgcaagtgacaaggagataactgaagcagcaagaacagctaatgttcattcattcatatccaaactaccaaatgagtacttgaccgaggtaggagaaaggggtgtgcagttatcgggtggccagaaacaaagaatagctattgcaagggcaatgttgaaggatccaccaatcctacttctggacgaagcaacaagtgcccttgattcagaatcagagaagctagttcaagatgcacttgagagagcaatgcgtggaaggactgttatcttgatagcccacaggatgtccacaattgtaaatgctgacactatagttgtcgtcgaaaatggaagagtagcacacactgggacacatcatgagttgcttgacaaaagcacattctactccaatgtatgcagcatgcaaaatatagacaaggaagctgaaaataaagtggcaaggtaaagttaaatgtagccaatggaaagttttacttgaccaatgttttatactcagttaagaaattcttcaatatgacttatcgcttcaaaagtaaatgtgtcatgcatgggttggggtgtaccttagaatatcaatgaataaagttttttcaaactggacgccagcagtttgaaataaaagcaagagttactatttacaaatgatgaacagaacaggaaactgccaaaaaaatgaaaacacatcaactcctcaataggaagtttagtgataatagtacatataagtacgattactaagtagaacttatggattgtttggtttgaggaatgatgtagtccatcattttctcactcctcacttttttgtttggtttgtggaatggagtgagttaatccatcaccacctcattcatcatagttagttgtttagtactaatatgtggaatgaaatcatcccaccaaatttgaggaatggacccatgatgcaccacttcattttggatagagtgattcatcaaaccaaacaactcattaatgtttttagttccactgattaaacagcactcctgataacatggaggaacaaattggcgaagcacacatcaagcagtcctccacaaatcagggaccaaacaaaaagctagaaagactggagtcaaaacaaccaagaaatgagaatgtaaaggaaacaccccctttcttcagactttggtatggattgcgtaaagaggacattatgaagattctagttggctcctcagcagcagccatctctggaatctcgaagcctttgtttggttatttcatcatgacaattggcgtggcatattatgacccgaatgcaaaaaaggaagtcaccaagtattctttgatattcttcacagcagggatggttacaatggtgagtaacatcttgcagcactatatttatggtatcattggagaaagggcaatgaaaaacataagggaggcactcttttcagctgttctccgaaatgagcttggttggtttgagaaaccaaataatggcgtaggatttcttacctcacgcattgtcagtgacacgtcaacagtcaagaccatcatatcagacagaatggcagttattgtgcaatgcatcgcttcaattctgatagcaacaatagtaagcatgaaggtcaattggagaatggctttagtttcatgggcagtcatgccatgccatttcattggtggccttattcaagccaagtcagcaaaaggattttatggtgactctgctattgctcaccgggaacttgtctccctagcttcagaagctgctagcaacatccggactgtggcatcctttgtttatgaagatgaaataatcaagaaagcagaattgtcactgcaagaacccttgaggatcaccaagattgagagcatgaagtatggggtcatccaagggatctcgctctgcctctggaatattgcacatgcagtggccctatggtacaccacagttttggttcagaggaagcaagccaaatttgagaacagcataagatcataccagatattctcactcacagtaccttccatcacagaattatggaccctcattcctatggtcatgtcagccatttcaatactgaatcctgtatttgacacacttgacagagagacacaaatcgtcccggataaaccagaaaacccaggcaaagggtggctcgtcggtagaaccgagtttcaggatgtgagcttcaattatccatctagaccagaggtgaccattctggatggcttcaatctaattatagaacctggccaaagagtagcattggttggccccagtggtgcaggaaaatcctctgtactggctttaatactgagattctacgatcctgctagaggtagattgttaattgacaacaagaacataaaggactacaatctccgatggctcaggaagcagattgggctagttcaacaagaaccaatcctgttcaacacatccatcagagataacattagctatggaagtgaaagcccttcagagactgaaatcatccaggctgcaatggaggcaaacattcacgaattcatcagtggtctaccagaagggtatggcactgttgttggagacaaagggagccagctttcaggagggcagaaacagagaattgctattgcaagaacaatactgaagaggcctgccattctgcttcttgatgaggcaaccagcgcacttgatggtgaatctgagagggtggttatgagctctttagggaccaaggtgtggaaggacaaagatgagcaagccagtacgattacaagtatcacagttgcacatagactgtccacagtcataaatgctgatacgatagttgtgatggagaaaggaaaggttgttgaacttggtaatcaccaagagttgatctctgctgaagatggcgtttactcaagattgttccacttgcaaagcaacatgaaagaatgaccatctattcaagttccattatggccaaagaccaaagacacttagcaagaatagctttaggagattaagcattgctcaaatgcacttgctgtcacaagttgtaataacatagctatatcatcatatatcgatgatgcatagtccaccagttagggtaaaaaaataactatatattacttgaatggtatctgtttggaagatagagtaacagatggaagatagagtaacagaacttaagacaggaaagggattcagtaatatgctggtttccgatcatgcagtccatcaaccagtttaaccgtctttcaaggttgaggacaacttgaacaaagttctctccaagaaactagctgaatatctatttctaaagaaataggcaataaatataacatagaaaaaaagaaaatgtccttaacaattaagctacctaaaataatgcatatcgaaaatagaaccacctaaattcggtacatgggacagcaaatagcaaagctgagacacttatttctaatgaactgattaattataaatctataagatacatcaagttcacataatgatcagactattcagccaaatcagaactggaatcagagaattaggccgttggatgactattgtgaaagttccaggcactaacatgaagacttgcaacagaaactgccttgtttattactggacaccttgctcttgcagtcttgttgacgtaatttctttttttttatgtagcagaaatatcaaacatgtttaccaagacatcaagtatatgtacgactgtacgagtaagatagccggcgtatttatttggaatttggaatgaccgaggaatatgtagactaaggacggattccaatagaaaagtggcatggcctattctggattagacttgtagctggagtagagtaatgtaacttgtagatgaaaacagagatgtctcatgcactacaatttggttatgaggacaaaagattcatgcttagtatttcctaaaattgtgacttttactgcaaaattgaagttggagacatcatcaagaaagtttactttcatgtctgaatacgcaggttggacatgctgcatcatgtcagcaaaggagtcatgaacaaaaatgggagtcactaggattgaacaatagataacattatgaatcttgatagtatcattggtgcaaatttgtagctatgtggttgttactgtgtgtactagtgctataaagctcagtgtgccagctactcactttttgcacattaacagaagatccaggaaagcagtgccactcatccaaaatgataggcccactgaatcatctgaacctaagattgcagatggcaaggaaagcacgcgagcagcatccatggcaccagaaacagaagccgaagacagatcgtttgcattctttggtctgtttgctacggtggatgcaatagattggctgctcatgatatcaggaaccatggggtccatacatgacatggggtcttcaatgtcgtactacatagtagggaaatctcttgatgtggccgggaacaacatgggcaataacgaggccactgtccatgaactctctaagttaattccatatatgtgaaccttagcaattgttacccttcctggcggaatgattggtgagtaaagccttgaagttctaactttgctattttatcaacgatgtaagcaaaagaaagcagactggtaattatgctttgctgcccttgcatgaagcatactgaaggtctgaattatgcttatgctagtctgaaaatcaaattgactaaactaactggtatacattagtgtatatgaagaacagtagaactatttaagtcagcaacatggtacacctccgttctacaatgtaagatgtcttactcctaagtcaaccttctctagttttaaccaggtcgatgaaaaaatattaacatctacaataccaaataaatgcactatcgagatatatttcatggtgggtggaactaatttgatgatgtagatatttatgtttttttctataaacttgtcaaagtcagagaagtttgagtgtttgacagcaaggctagagctggattgagtgtaagctggagtattgaatcatttgaattacttcaaagtagctgcataagcaaaactcccaaaaaataagttatgcagcgaggaacaaagcgatcgccccaatcacatctcataatactaactaacgatgtttatttaagagcgagaaaggtattaattatgagattatggttgcatcaacatttgacatcacaatcacaaagaaaacgaggactctgaccctatccagctatcgcgccaatagagaaacggcgtaccatggaaactagggaaccgaagtatttgaagctattattttccgggagacgaatgggaaatatacgcagaaattgcactcacccgctcaccagtcgtaccgcctcctccacctcccccctcgtgtttagtcccttctccctccgcgctcctccagttgttgcg

SEQ ID NO: 215165 - DNA, 1473 bp, Zea Mays
ctcaaacaaacactaccttaaacgataaacaggagcgtggcaccgaagaaggcggcaaggcgcggaagtgtggcccgactccccggccccattcctgaccgtcagattacgatcgggaggctcaagcgcaccaactggcggcgccgccccgccgccggagagctctccggcgtcggtgcctcaccgtctcccgttattccggcgccttccgttcctcgacagaagcggggctatggtcgccagtcgtcacgcgctcgccgcacgagcaggagcaggagcagggactgctggccggttagcctccagatgggtagctgttctgcgcaacaactggaggagcgcggagggagaagggactaaacacgaggggggaggtggaggaggcggtacgactggtgagcggccactgcttcctaccagagcgatgactttgcctgcggggatggacaatgagaatccttggagaattggcttatcctggcgggaaggatatgcaaagtgcaccctacggaatttgatctctccatgaatcttgtctagtactaatccactttttgcataacttatggatggctttctctttatcaccttgaagacctcttttcctgcagtttttgcctgattgaaggtctgaaggtctggtgcggcatagattaaattggctttccatgcactggacaaaggacttcatggcccagctctctccaacgaaggagaagacggtcttgatatgtgacaaagtctgcgaacaaatgtataggcaaggattataaacatatataatgaagtgggggatgatctgtgtatcaacatttctatctattcagcattgcgtgacaaagataagacattcaactttttcgtgtatgctgctccgatgatgaggataagtggaatgaccaggaaggaaagcattgcaacttgccagcagctgataaacgcaattatgacaccagcaaagaaagtggagaagcttgcgacgaaatgacccagctgcagaagagtgaacttaagatgcagatctgaccacagagcttcaaaagacttgcatcatagtcaagtcagtgtcgaaggccccaacctcttgattaaggattgatctcagaaacgcgagccgcatgcgtgctaactgtctctcacttgagtatatccagcaggagatctctgcatgcggccaattcatccgataaaaggtctagatggggaaacaacaaaggcgtggcttactggaaatttgatttgggttgagaaaactgaaaacccagcagtgatcctcccagatggagtaaataagagaggaggagggaagatgcttaattttcattaatctgcatgttatctctactaggaaacagcaacaagccattccatcaaatgggctaatcaggctgctgaagatctccgcatctggctcggtggtggtggttttcgacggggtttgatgttttggctgatgaggaagggaaccgcaat

SEQ ID NO: 215166 - DNA, 1778 bp, Zea Mays
aaaccggcgccgtgggtccgtcgtgaagcttcctctgctccaccctttgcgtcgtcatctgcacagtttgcccttatcaactcgctgtcttcgtcttcggttccaatttgcagtgcaaccaagatggattcagctgactccatagccgacaaggcaattggaaggatgcaagagatttcggacaagatattttccgtagcgagggaaacaatccgtcctgggcgcggattgacctcatttgatgctaccaaactacgtgtagctttggaggagatagcttgcatgctggagcaagactctctggtgttgcaagagcatttggacatcgtgaacaactttaacatcccggttgacagcagctatgaaccttctaccttgtcgtcaccacccccctctgacgacgacctgactccacattgggactttgctgagcatttccaaaacttctggggagttgaatatgactccgatcagatgccttcgtttagtgacaacgatgtttaaggtagaagggagtgaaccttggagttaggtgtttcaataacatggttgagtcccttagcttttgtgcactaagtgcgtagggaaacagggaatcagttagttcttttggttaatgggctcgtgtacatgtgttccctgtcattttgtctccagtacctgtttatttatggttctcgttgtgtaattatgcaaattggaatcttagtacttatggtattatgtgaacataatatggccagtatattcttcatctttgttgttgtttttaatccgaaaacactacggatgttgaacactatacacttcttatgcactagatggacaagtccggcaaagttattgcaaagtgggatagtagagcaacaaaaatttacacagaaatttgtgtagaagagggctacaggtcttggtcgagaccctcatactgttcaatcagtgccccagatgagtggtgggccaagcaaaatgaagactacgaattggtgcaggcaatgccaggctgtattatgttcaaaacagcccccctagagaatgaggacgagctaaaggttatgtttggaccaattgtgtgcacaaatgaaagaaccctggtgcccggcgtcgaggatgctaattcttcttctgatgatcatttggaatacactttaggtgggggtgaaaacagcacacctgacccctgcacaaatgctactggcaagcgtaagttgcgacatgattcccctaaaccaaagaagaaaaaagattcgagggaagagtacatgaaaagacttgtggcggcttttgagtcccgctcagttaccacaaacaagtctattacctcttctgacaatgacccggttcgcttagagattaaaaagcagctgatgcaagtgaaggaagatggatcacctgaagggagcgaaatacatttgtttgccacgcatcttctgattcataagaagtatagagatgtttttgcaaacttggagacaaaggaaggaagaatcgcttggcttcgcaatgcttacgagttagaaactaaaaagagcaattagctggtggacgtcggacaactgagtcgtacatgtttactattatcgttggttgtgtttgtcatcggacaccttcagccgtatatgttgagtatgttagttgtgtctgcttaatgagtcctgtcgtgtcagttttcgttagtatcattctcgctttgaaacagttttccacaaattcgagttgaacatgtatgacaataatcagagttgtaactttgttacctatgtgaatctgtgaacaat

SEQ ID NO: 215167 - DNA, 856 bp, Zea Mays
aaaaaaccaaaaaagacattgatctaatgataaccgatccgaagtctagatcgccacccgtgcctccgggagaaaaacgccatggccaccctcaccaaggtaaaggaactcctgatatctcatgtttgccaagcaggcaagtgtaaatcgtggtctgtgacgcctcagatgccacttactactgcagagaagattatggactctcatgatgtggatcacctacctgtagtttctgaggatgctaatcttcaggacagaggacttttgataggttttgtagaccgagaatgcattgccattgctcgaagagccatggcaacaaaagaaattttcagttctatgtatgggatcaggaaggaagagaggtagcacgaaaggaaggaatgacacgacacagaagcactccctacttggcaaatctggcttcttttcctggtcaaggctaatacctctccaggttattagttgctaagtaaaaacgtgcttcaggcatgtggttaaggtgggtctccatatttttctcgaagtatcccgcttaccggttaccaccatgactatctgcaatggtgaggttttgttgctcttgtttgctacaagttctcaatgttagaatatacccgtttagggtttggggtcttccccgtgtaatgaccatctcacccctctgtaatgggcctgacccagtttactcagcctattaatatatcacccaacccctgttagggttagggttttcattctccaacttggtaccagagccactttcatctctcttctcctcccacccacagccgtcggcttccccaaccccccagccgtcggccgccgacccctcccgcgccccctcctttcttcc

SEQ ID NO: 215168 - DNA, 2896 bp, Zea Mays
aaaaaaacggctccctccggcctccgccgagcgacggtacagcaagtcagcaactcggagtagttcgttcgcttgccggcgtgccgtttctctcccccccttcaccctttgccttcgtgagccagtggctcagcgcgcaattcacgatttacgagatgaggctgagatagccggtgaacgatcagagccccccatggcggcattcgcagccccctccttgtcctcgctcatcctcctcgcctcgccccactccgcgcccactctcctccgcctgcgccgcgcgggcggccgctctctggagctgtcgtcacggcgcggcgggagcgcgcgccttcgggtcgttcgacgagcggtgacggaggaggagagcgaggccgcgcgcggagacgaggaggtggaggaggccccggaggagccagtggctggccgcgacctcgtcacgctcgccgcctgcctcgtgggcctcctcaccggcgtctccatcgtgctcttcaacctctcggttcatgaaatacgtgacgtattttgggacggtattcctttgcgaggcgcttcatggctgagggaagaaccgattggtgaagtctggcagagagtgatatttgttccggtcagtggaggtgttatagtgggtggattgaacgctctaagaagtcagatagaaactaactcagatgcccctgtgtccaagataaagagtgcatttagaccattcttgaaagctgtggcagcatctttcactcttggaactggcaattcactgggtcctgagggtcccagtgtggaaattggttctgcaatagccaaaggatttggtgatgtatttgagtgggacggtgggaaaaggctgtctcttgtggcagctgggtcagcagctgggctttcatctggttttaatgctgctgttgctgggtgtttttttgctgtggaatctgttttgtggccttctgcggattcctcatcccttgccaactcgacacctatggtgatactcagttcagtgatagcatctgttgtttcagagattggtctaggttctgatcccgctttcactgttccggaatatgattttcgctccccaacagagattgaaagtatgaggatatttacatgacttcataactgtcagaacttcctctataccttttgctgggtgtcttctgcgggttggtgtcaattgcattatcaagatgtacatcacttgctatgaaggcagttgaaagtttacaaaggacaacagggttaccgaaggctgcatctccggctttaggtggcctcattgttggtctccttgcacttttgtaccctgaagtattgtactggggctttgaaaatgttgatatcttgctggaatcacggccatttacaagcggcctctcaacgaccatattggttcagcttattggagtgaaaatattagcaacatctttgtgcagggcttctggattggttggtggttattatgcaccatctctttttattggtgcagctacagggatggcatatggcaaattcatgaagtttacatttactggccctgaaccattgctgcatgtcccattcttagatgtggcatcacctcaagcatatggcctggtaggtatggcagctaccctcgccggtgtatgcaaggtgcctctgacatctgtcctactactttttgagcttacacaagactatcgtatagttctacctttgctcggggctgttgggttatcatcctggattgcttctcctcaaaggttctctaaaagaattaggagtaagctggattcttgggaggataaatcgagtattcctcagcaagcaaacgacatgctcactgaaaacaaagaggccacttccatggatgcagctgatttgtcgttagaattatataaaattgaaagctccctttgtgtctatgatgccaacgacagcaatatgttcaaaaatcttactgttggtgaggccatgaaaactaactacttctctgtctcaatgacaaccccattaattgaggcactagatcttatgcttgccgagaagcagccctttgttatgataactgagaataacacatctgcaagaggcttgctggcactaaagaatatccaagatttttgcaaagctgcaaaaactaccagatcacaagctgaggtaaaggaactcctgatatctcatgtttgccaagcaggcaagtgtaaatcgtggtctgtgacgcctcagatgccacttactactgcagagaagattatggactctcatgatgtggatcacctacctgtagtttctgaggatgctaatcttcaggacagaggacttttgataggttttgtagaccgagaatgcattgccattgctcgaagagccatggcaacaaaagaaattttcagttctatgtatgggatcaggaaggaagagaggtagcacgaaaggaaggaatgacacgacacagaagcactccctacttggcaaatctggcttcttttcctggtcaaggctaatacctctccaggttattagttgctaagtaaaaacgtgcttcaggcatgtggttaaggtgggtctccatatttttctcgaagtatcccgcttaccggttaccaccatgactatctgcaatggtgaggttttgttgctcttgtttgctacaagttctcaatgttagaatatacccgtttagggtttggggtcttccccgtgtaatgaccatctcacccctctgtaatgggcctgacccagtttactcagcctattaatatatcacccaacccctgttagggttagggttttcattctccaacttggtaccagagccactttcatctctcttctcctcccacccacagccgtcggcttccccaaccccccagccgtcggccgccgacccctcccgcgccccctcctttcttcc

SEQ ID NO: 215169 - DNA, 2737 bp, Zea Mays
ttttgcagaaatataccatgggctgtacagaaaagagaattctgaagctgataaagttgagcaggtcaaagcagaagagagaaagaaaaagggccagcccatggtatatttctgcaaaagcttgtactggcctgagaagggtgccttctttgccctctcccgagataaaatgggtcttggtagtggtttatgtagttcttgtgataatatagagccagattctgatgaattgaaaatattctcgaagaccagctttgtctacagaaaggttacatataatgtcaatgagtttttatacataagacctgatttttttgctgaagatgaggatcgtgcaaccttcaaggctggccgaaatgtgggtctaaagccctatgcagtttgtcaaatattgtccatccctgaaggggctggatctaaaaaactcaatccagcatcagcaaatatcagtgctagaagattttacagaccagatgacatttcatcagccaaagcctatgcatctgacatcagagaggtctactatagtgaggatgtaattgatgtgcctgtggatatgatagagggaaaatgtgaggttagaaagaagaacgatcttgcaagttcagaccttccagtgatgtttgaacatgtatttttctgtgaacttatatatgaccgtgccagtggagctctcaagcagttgcctccaaatgttaggtttatgtctatggtgcaaaggacaagtgcgttgaaaaagaacaaaggaaagcagatctgtgagcctgatcaaatagattcaggtaaatggttggatgtgcctaaagagaaccgtctagctactcttgacatttttgctggctgtggaggtttatcagaagggctgcagcaagctggtatgtattgttaacactgatgctgtataccatgaacatgaccaacaaataaaaaatttcctcattgttcaatgctgtaggtgtatcttttacaaaatgggcgattgaatacgaagagcctgctggtgaagcatttaataaaaatcatccagaggctgtggtctttgtagataactgcaatgtgattctaaaggcaattatggataaatgtggggatactgatgattgtgtttcaacttctgaagctgctgaacaagcagcaaaacttccagaagtgaacattaataatcttccagtccctggcgaagttgaattcataaatggtggtcctccgtgtcagggattctctgggatgaatagattcaaccaaagcccatggagtaaagttcagtgtgagatgattctagcattcctctcattcgctgagtatttccgtcccagattctttctgttagaaaatgttcggaactttgtttccttcaacaaagggcagaccttccgtttggcagttgcatctcttctggagatgggataccaggtccggtttggaattctagaagcaggggcttttggtgttgcccagtccaggaaaagggcgtttatttgggctgctgcacctggagagatgcttcctgattggccagagccgatgcatgtgtttgctagccctgagctgaagataacactgcctgatggccaatactatgcagctgcaagaagcactgctggtggagcgcctttccgagcgattactgttagagatacaattggggatctgcctaaagtgggaaatggtgccagcaaactcacgcttgagtatggaggtgagcccgtgtcttggttccagaagaagataagagggaatatgatggtactgaatgatcacatatctaaggagatgaatgagctgaacctaataaggtgccaacacattccgaaacggccgggttgtgattggcatgacctaccggacgagaaggttaagctgtcaaatgggcagatggctgacctgataccttggtgcctgcccaacacagccaagaggcacaatcagtggaaaggactgtacgggaggctggactgggaaggcaacttccccacatccgtcactgatccccagccaatgggcaaggtcggcatgtgcttccaccctgatcaagacaggatcatcacagtccgggaatgtgctcggtcacagggctttcctgacagctatgaatttgcgggcaacatccagaacaagcaccggcagattggcaatgccgtgcccccgcctcttgcctatgcacttgggaggaagctgaaggaagccgttgacaagcgtcaggaagccagcgcaggcgtgcctgcaccatgagaagttttccttccatcaaaccatgacccatgaagctaagcgctgaggtcgtccttgaggaccagttaattttggttttatcagtcttaatgcactcctgaatgtatatgttagagaagtgtcgattgctgattgttaccctgattcagggtagcggttatatctaaaaacttgagaaaatctagtgtactctagttgtcatgtgttccattttgttggctctaaactttcaactagttttggtgattaatgacaacatgagattaaattaaattttgtagaggcatttaaattaggccactaatagtgactatttagtcgctcaatttttttgcccctaattatggaatttgttttttaaaggatgaacaacaagattaaatggattagttcaagtgtcgattggggctaagactatccgtagcggttttttctaactttttctctatgtgccacctttatatcatgtcatactagcaattctaattaattgattaagggtatc

SEQ ID NO: 215170 - DNA, 750 bp, Zea Mays
gggcacggcattgccaatctgactgtacgggaggctggactgggaaggcaacttccccacatccgtcactgatccccagccaatgggcaaggtcggcatgtgcttccaccctgatcaagacaggatcatcacagtccgggaatgtgctcggtcacagggctttcctgacagctatgaatttgcgggcaacatccagaacaagcaccggcagattggcaatgccgtgcccccgcctcttgcctatgcacttgggaggaagctgaaggaagccgttgacaagcgtcaggaagccagcgcaggcgtgcctgcaccatgagaagttttccttccatcaaaccatgacccatgaagctaagcgctgaggtcgtccttgaggaccagttaattttggttttatcagtcttaatggactcctgaatgtatatgttagagaagtgtcgattgctgattgttaccctgattcagggtagcggttatatctaaaaacttgagaaaatctagtgtactctagttgccatgtgttccattttgttggctctaaactttcaactagtgttggtgattaatgacaacatgagattaacttaaattttgtagaggcatttaaattatgccactaatagtgactatttagtcgctcaatttttttgcccctaattatggaatttattttttaaaggatgaacaacaagattaaatggattagttcaagtgtcgattggggctaagactattcgtagcggttttttc

SEQ ID NO: 215171 - DNA, 3248 bp, Zea Mays
atggcgtcgtctttggcagacttcgcgcaggtgttggaggcgtcgcgacttcacgagcatggtgtcacctccggcgggcttcgctcaggtgctgggggcatcgcgacttcgcgagcaaggcataatctccggcgggcgtcatgtgtgggcgggcaggcaaaggcaacacgagggcgtcgccaatccggctcgatccgccggtttaagggttccgatggagacctcggaggcggcggccgcgcatccgcagaaggacagtgtgaaggtggccgtcaacataaggccgctcatcacggtggagctgcaggatggctgcacggattgcgtcaccgtcacgccgggcgaacctcaggttcaaattgggccccacgtattcacctttgatcacgtctatggcagctcgggcccttcatcatcattaatatttgagcaatgcgtgcaccccttgatcgatgcattgttcagcggatacaatgccactgttctagcatatggccagaccggttctggcaagacatacacaatgggtactgactatagtggtgaagggaactgcggagggataattcctcaagttatggatacaatatttagaaaagttgacacctcaaaggatggctcagagtttttaattagagtatcttttattgagatattcaaggaagatgtttttgatttgctcgatgcaaatcaagctgctgtaagacttgatgcaggttctatggcaaaagcatcagcacctggcagagtgccgattcaaatccgagagactgcaactggaggcataacccttgctggtgtcacagaggctgaggtgaagtcaaaagaagaaatggcatcatatttgacacgtgggtcgtcgtcgcgtgcaacagcaagcacaaacatgaataggcagtcgagtcgctctcatgccatctttacaatatgcgttgaacaaaagagaacatctggtacatccgacaagtcagccaacggtgactatgatatactatcgtcaaagtttcatctagttgatcttgctggttctgaaagggctaaacgtactggagccgatggacataggcttaaagaagggatacacataaataaaggccttctagctcttggcttttttaagtgcattagcatgcatagccctgctgatataaaagcagaagaaaccataaacacactcaaaaatgccaatcgcgcacgcaacattcaaaacaaagcagtggtaatccgtgatccagctacagcagagatgcaaaaattgaggagccagctggagcagctgcaaactgaacttttgttttcccgcagtgggagtgcagcgttagaagaacttcagttgctgcagaaaaaagtctctcttcttgagctgaagaattctgagcttaacaatgaacttaaggagaaggaattgtcatatgagcagttggcagagcgggcacgcgctgctcagttggaaagggatcagttgatgctgaagattgaatctgtgaggaatggaaaatcattggatgatattgaaaatattgataacgaccaagacatggaccttttgaagggctacatatcaaaaatacagcagttggagagtgaactgatgcgtcaaaacttctccaatgcttgcagacatggcttacatgaccagcttgccatggaccaggacatttttctaaatgaattgggttctggatgtgaagagctggttcgtgctgagtgctggcggtgggcgagcaagggcgtgaacgtcaagtacgaggtccgcgacagccggcgagggtacaaggccggcgcgctccgggaaggcatgaagcgcgcctacgcccgcggctgcgacctggtggccatcttcgacgccgacttccagccggagccggacttcctgtggcgcgccgtgccgttccttctccacaacccggacctcgcgctcgtccaggcgcgctggaagttcgtgaacgcagacgaatgcctgatgacaaggatgcaggagatgtccctggactaccacttcgcagtggagcaggaagtcggctcctccacctacgccttcttcggcttcaacggaaccgctggcgtgtggcgcatatccgctttgaacgaggccggagggtggaaggacaggaccacggtggaggacatggatctggcagtccgagcaagcctcaaagggtggaagtttgtatacatcggtgacctcatgaaggtgacgctctggaagaaaatccacgtcatctacaacttcttcctcgtgcgcaagatcgtagcgcacgccgtgacgttcgtgttttactgcatcgtgatccccacgacggtcctggttcctgaggttcaagtgccaaagtggggttccgtctatatcccaaccgtaataacccttctcagtgctgttgccactccaaggtcagctcacttagttgtcttctggaccctcttcgagaatgtgatgtcgctgcatagaaccaaggccactttcatcggcctactggaggcaggcagggtgaacgagtgggtggtgacagaaaaactcggtgatgctctcaggaccaaagtgccaggcaagaaaccccgcatgaggataggagacaggttgcacgttctggagctcggtgtcgcagcttacctcctcttctgtggatgctatgacattgcgttcgggaacaaccgctactacatattcttgttcctccaatccatcgctttcttcatcgtcggcattggctatgtcggaacattcgtccctcactagctagctcgtagcagaatcattctgagaggctacccatcctgatgatgcatggttgtcttcaaccccttccggtttcatttcatggaaatcagttggtagataagatcgagcaaaccttctcttgtatgtaatgttgtcatgggaaaaaaaagaaaatacagtgtaaaggcacactggcagacaagccatagatatgagtaggtatgtgtgttgttgaaggaatgtgctgtgatgcgcatggggggattggtgatgacaagcaggccgttttgagtctccatgtcacctatgcagaatcagctgtagaaaaaaaggtagcaaattgtggaagtcgaaccaattgttttgcaaacataaaaaaaaaagatgaatgtttgttggcgagttcgttgtgagaacattgtaaagttgtacatgttttgttgtctcctcttacccttctttatttgtttcccatgtttatatcaactataataaacagattgtatttgaaaagatttcgtttcagatc

SEQ ID NO: 215172 - DNA, 1496 bp, Zea Mays
gccggcggtcagcccctcccgacaaattctctcctcctaccaaaagccaccgaccctagctagccagcctatatgtcgatctgcatccccggatctcctcttcaattcgcctgcaatcttgggggtgatcgattacacagcattatgggtcgcgtgaagctacagatcaagaggatagagaacaacaccaatcggcaggtgaccttctccaagcgtcggaatggcctcatcaagaaggcctatgagctctccgttctatgcgacatcgacatcgcgctcatcatgttctcgccctccaatcgcctcagccacttctccggcaggcgcaggatcgaggacgtgatcacgaggtacatcaatctcccggagcacgacagaggaggagttgttcggaatagagagtatctgatgaagatgcttgctaaactcaaatgtgagggtaacatagccgaacaactcacacctaataaagagccaataaattccaacgtagaggagcttcagcaggagattaagacgtaccaacaccagatggaagtcttaaaggagcaacttaggatgttcgaaccagatctgacaacattgatgtcgatgaacgatttcgagacgtgtgagaaattcctcatggacaccctcacttgcgtggaggagcgaaagaaatatttgctgtgcaaccacgtggccccgttcgatccgtcggcctccgacatgcaacaacacgtagacatgttcgccctgccgccggcgccgcctcaccaacaggagcaacaaggggacgacctaggaggcgccgccagcgcgttcggtggcgatgtctcgtggttcgccgatgggatgccgacgtcgtcgatctttgccgcgtcggacccaatcttgtactttagggatcaggtgatgttcgactcgacgtcgacgatgcggcgtgactcgatggtggcaggggtggacccaggaatgacctcggtgtgccagatggagcagcaagcccccagcgtggactggcagcaggcgtacacgtcggcggagttcttctccacgctgatcccgtccacgccctacccccttgatgatcagaacgacatggctcaagtgcttacatctccgatggtgccaccgcacgagcacgataaggtggaggtgccgatgagctcgtccaacgtgccgacggacggggattgcggcaccacccttgccgccgctcaagaggacggcctgcccggggtggtcaacattggctagctagctgcatctgcatgcatgtccggctcggctctctgccttcctcacttctttaccaactgcagccatgatttgatcttgtttcacatggacagatgatacttgttattcgtttataggttttattgagcactatttgtggcactggtctagatggtccgacctgcggacggttcatttatagacgtagacagttcacgatagtattagatcagacgaattaacttcctttctccatgcatgtttatctctctaaa

SEQ ID NO: 215173 - DNA, 626 bp, Zea Mays
tctcctcctaccaaaagccaccgaccctagctagccagcctatatgtcgatctgcatccccggatctcctcttcaattcgcctgcaatcttgggggtgatcgattacacagcattatgggtcgcgtgaagctacagatcaagaggatagagaacaacaccaatcggcaggtgaccttctccaagcgtcggaatggcctcatcaagaaggcctatgagctctccgttctatgcgacatcgacatcgcgctcatcatgttctcgccctccaatcgcctcagccacttctccggcaggcgcaggatcgaggacgtgatcacgaggtacatcaatctcccggagcacgacagaggaggagttgttcggaatagagagtatctgatgaagatgcttgctaaactcaaatgtgagggtaacatagccgaacaactcacacctaataaagagccaataaattccaacgtagaggagcttcagcaggagattaagacgtaccaacaccagatggaagtcttaaaggagcaacttagtctaaagaatcattcaagttttctatctttgactagcgagaaatccggaatagaagatggctatacttggatagccatttaaataatctgttggggta

SEQ ID NO: 215174 - DNA, 852 bp, Zea Mays
cagacagatagtccctacaggacagaggaggcagattatatgtccctaacatggcgcgcgaagacaataggcccaacgttgccatcattgtaccttgacgatgaccgcttgccgttgaacaaggcctacgggttcaacctcttcagcagcagcgactcatgtctgccttggcttgacaagcagcgtccgcgttctgtagtcctggtatcctatggaactgtttcagattacgacgaaacgcagctagaagagcttggcaacgggctgtacagttctggcaaaccattcatttgggttgtgaggtcgaatgaagaacacaagctgtccgatgagcttcgcgacaagtgcaaggagcgcggccttgttgtctcttggtgcccacagctcgaagttctagcacataaagctacaggttgtttctacacgcactgtggatggaactcgacactggaagcgattgttaatggcgtgccaatggtggcagtaccacactgggctgaccagccgaccatatcgaaatacatggagagcgtgtgggccttgggtgtcaaggtgcgcaaggatgagaacggcttggtgacgagagacgaggtggagaggtgcatcaaggatgtcatggatggggatagaaaagatgagtacaggatgaatgccactgtgtggatgaaaaaggccaaggaagctgcacagtacggagggagctcggacaagaatattgttgaactagttatgtgcccgtgcgttgcgacggcatacaaattattcgatacaaagttagtgtataataattacatgaaaacaatcaatatatattataaacaactacaaacttatctattggcacgaacatta

SEQ ID NO: 215175 - DNA, 810 bp, Zea Mays
gcagtctttttttaacaagccaacactacatactaccaattttattggacagagatttgagaagagttaacttacggtcttcagtttgtgttctagcaatttcaaacagccatcgacccttgcataagcgattggtttcacctcatgagcatatcattgactatgttcaggctctagcctgctcagtcattatacatgtcatacctgcacaagattgcagcaacatgcatcaacatccatatagtggggggttagttaagtttccagggtgctgctgtgctgattgatgtttctagcttcaatttatacttattgtcaatttggcatgctcctgtgtatattttgccatggtccttgtacgcatccacttcaggatggatattgaaacatgtgttttatattctcctttcatgtatgattaacctttgttttgtttcccagcaggtgccttctctagagcacaaccaggtcaaaggagagagcttggatttgatcaagtacattgacagcaacttcgaaggtccactgttgccccaagttaagaagcgccttaggagaaatattcaagttattggcaatgaagagattgaaatgcatcccatttctgcttggaaagaagcaaagattttatggtgggtttgatggtgctgcaatgcagagaaggccattagtacatgtaattctccacatatttgcttaatcttgcaacccttcaggggattttgaaatctccttgcttgaagctacaagaacaggctgaaggttgttcccttctgcacaaacagcttttcagtattcctattggtacat

SEQ ID NO: 215176 - DNA, 5404 bp, Zea Mays
ctggcgattagctcccgcccgcctcccgccccgctccccaccgcgctcgctgcgctgcctgtcctggcgctgcgtcctgcggcgccgcgagagttggagggtgctcgtggcgggcagatccggcgtcggcgtcggcgtcggcagacaggctcggaggtgagatcggcgtcggtggcggcggcggagcgcgcgaggtggtcgagggaggaatcggtggcgcgcggaggcgaggacgaggctgaggaggacgtcgagctcggctggtgctgcatgggggtatgaagcgcggcgccagagacgacgcactcatggggtcacagctcaagcgcccgaacgttggccgatccgatccgtcggctcagccacaacacatgcctgtgcccggtttagcgtctgcagccgcaccgccgcctcaagctggtgctgctccgccggcgcagccgcaacagacatccggcgcggccttgaccaaccagaagctgacgacaaatgatgcgctcgtctaccttaaggcagttaaggataagttccaggacaagcgggagaagtacgaggagttcctcgaggtcatgcgcgacttcaagagcgagaggatcgacaccaatggagtgattggccgtgtcaaaacgctgttcaacgggtaccctgaactaatccttgggttcaacgccttcttgccgaagggctatgcgatcaagctacaagaagagaagaagcctgttgattttgtggaagctatcaatttcgtgaacaagataaagaatcgatttcagcatgatgaacgagtttacaaggcattcttggacatcctcaacatgtaccgcaaggataataagtctatccaagatgtttaccatgaggttgctgggctgttcaaggaccataaagatttgcttgaagaattccagcacttcctgcctgatacctcagtggccccacaagcagtggcatcttcaaggggtggtttggttaagcgggaggacaggagctctttgccacctgcaaataggacccttcacaatgagaagagggagagagcttgtctatcacatgctgaccgtgactttagtgttgaccgtcctgatgtggatcatgatcgccagagaagacgtcttgataaagaaaaagaacggaaggtggaaagggatagaagggattatgagagagaagacaaggatggtgaacatgacagtagagacctggagataggacagcgtaagcgaaagccttttccaaggaagatggaggataatgcaggtgcggagacacaccaaggaggccccagtgagaatcatggaatccatagcgtttcttcttcatcatatgacgataaggatgcgctgaagagtgtatacacgcacgagttccatttctgtgagaaggtgaaggaaaaactggagcatgaagcttaccaggagtttttgaaatgtctacacatctacagccaagagattatcacgagaagtgaactgaagaacttggtgaatgatatactccagcattatccagatcttatggaagggtttaatgaattcttggaacattgtgaaaatatagatggatttcttgctggtgtcttcaacaaacgcccaacaacaaggattgttaaaactgaggataaagaaaaggatagagatcgggacagggaggacagggatagagatcgggaaaaggaaagagagaaggaacgagaaagactcgataaagggtcaacattcaattcaaaggacggttcttgtcacaaacctcctatgttttctggcaaagagaagtacaacctatccaaaccaatatcagagcttgatctctcaaactgtcaacgttgcactccgagttaccggcttctacctaaaaattatcccatgccccctgccagcaacaggactgatcttggagcctctgttcttaatgatcactgggtatcagtgacatccggaagtgaagattattcatttaagcacatgcggaagaatcagtatgaggaaagcttatttagatgcgaggatgacaggtttgagttggatatgctgttggaatcagttaatgcagcgactaagcgtgttgaagagctgatagaaaagatgcaagacaactcagtcaaacctgagagtccaatacgcatggatgagcatttaactccgttgaacctgaggtgcattgaacgactgtacggtgatcatggtcttgatgtgatggatgttcttcgcaaaaatgctagtgttgctttgccagttattctaactaggctcaaacagaagcaggaggagtggtcaaggtgccgatcagatttcaacaaagtttgggctgaaatatatgccaagaattatcacaagtcacttgaccatcgtagtttctatttcaagcagcaagatacgaagaacctgagcacaaagtctctcctgacggagataaaagaaattaatgagaagaaaagaaaggaagatgatgtgctccttgccattgctgctggaaataggcgacctatagttcccaatatgtcattcgagtatgtagactcagaaatccatgaagatctacataagatcattaagtactcctgcggtgaaatctgcaattcttcagatcaattagataaagtgatgagaatatggacaacttttgtggagccaattttgggtgttcagcgaaaacatggctccgaggatcctgacctagttaagccaaagagccgaacaacaaaatcgggtattgcaaatgttggggaaagcaacactggagctgggattgtctccaagcataacaacgatgatgaaagtgaacaagggctgccgtctcgggctagaatagcaaatggagttgcagccaacgctcaaaatggtttccatgatgcagatcgaattgcccgtagaggtgaagaatcattaaatgttacacttaatggaagagtgcatggtgctgcctctgcagacgaaacaccttcactaagcacacaaaatattgcttctactgagcgatcagcagagaatgcagctgttgttaggactgaacaacataaggcaaatttggaacttacgccaggcgtgaatggttctagaagttctcatggtgcagttgaggtggctggtgaaggcaaggctgtcaatgaaacattgccttctgctgtgggaggggaaacaggtaggttgggaccatcttttaatggcatcagtgagggaattaaagggcgcctaaataatgatggttctgcaccccatatttcaaaagttgaaagagaagagggtgaattatcgccaaacggagattttgatgaggaccattttgttccttttgaagatggaacatctaaaggaaaggaaggttctacaagcagatcattccagggtaggcatggggaagtggtgccatctgctgaggcagctggtgagaatgatgctgatgctgatgatgaaggtgaggaaagtgctcagaggtctactgaggacagtgaaaatgcttccgaggctggtgaagatgcgtcgggcagtgaatctggtgatggtgaggaatgctttcgtgaagaccacgatgaagaagaagaggatatggatcatgatgatcaggatacaaaagctgaaagtgagggcgaggcagaaggaacaactgagacacatgatgtggaaggaggaatatcactaccactttcagaacgctctctgtactcagtaaaaccacttgccaagcatgtacctacagctttacatgatcgagagaagttctcacgtatattttatggaaacgattcattttatgtcttgttcaggctacatcagatcttatatgagagactactttcagcaaaaactaactcttttaccgctgaaaagaaatggaggaattccaaggatacaaaccctcctgatctatatgcaaagtttatgagtgcgctttacaacttgctcgatggttcttctgacaacacaaaatttgaggacgactgccgagctattattgggactcaatcatatgttctctttactttagataaattgatttataaagttgtgaagcagcttcaagcaatagcaacagatgaaatggacaataagcttctgcagctatatttatatgaaaaatcaagatctcccgggaggttttttgacctagtttatcatgaaaatgcccgtgttctactgcatgatgagagcatataccgatttgaatgttgctcaagtccgacaaggttgtctattcagctgatggaatatggtcacgaaaagccagaagttaccgcagtatcaattgatccaaatttttcttcgtatctttttggcgagtatttatgtagtacgtcagacaagaaattatctgaaggcgtctaccttgcaagattttttgaaggcaatggatggtatcaaagttgtgaatggtctcgaatgcaagatatcctgcaagacctctaaggtctcgtatgtcctagacactgaagatttcttgtcccggcttcggaagagaaggaaaattttgcggggtgggagtgtgtctgacagttcgcagttttcaaaaatatatgctgcaaaagtgcagcgcttcaataggttcctatccaaagcataggatcatttggcatacaaaatgtctcatcattgtatctaaacctggagatattgctgggaccccagttgctttgcttcttcagtgataatatgcaggagttggaagatggtgacgtcatcgacaattcgtcgcagaatgccctttttgaataacagatggggagatctatagggtaaatacagcaaaacgaagcgagcatgtaggccacagcagtcagctctgttgtgcggaaagatgtgtatatatgtattagcaacatgtttgttctgatgacctttttaatgcttttcgatggtaggtctgttccatcaagtatttaactaatcatcatttgttgcagttggtataggtcttctgttctttttttttttgccgtcgtttttcattgaggatgttgccaaaattaaaacctgtgtcaaacagttatgtagtcttgtcttggttaatcttacagacgccgtaatttctcagcctcttgagtgaggtgcttgtacaccctttcattaagcttttgaggcgtggttgacagcaatattctcttgtgtgcatacaattcaattgaagtataggatgtgtttcttctgatcttctcggtgatgtgtatacagtgttcagaagaaactatcttggaagtccaaagtctgctaccgtgtgaggtcgcagtttttccttgcaagtacttgggacttcctctttccttgcacaagctgtccaagcaacagttccagccgtatgttgataaatttgctgatcaactacctaattggaaagctgatttgatgaccagagcaggcaggagaatactagtgcaacatgtgctcacaggtatgactgtgtatctggcaatggc

SEQ ID NO: 215177 - DNA, 5144 bp, Zea Mays
gtcgttcccccctcccctggcgattagctcccgcccgcctcccgccccgctccccaccgcgctcgctgcgctgcctgtcctggcgctgcgtcctgcggcgccgcgagagttggagggtgctcgtggcgggcagatccggcgtcggcgtcggcgtcggcagacaggctcggaggtgagatcggcgtcggtggcggcggcggagcgcgcgaggtggtcgagggaggaatcggtggcgcgcggaggcgaggacgaggctgaggaggacgtcgagctcggctggtgctgcatgggggtatgaagcgcggcgccagagacgacgcactcatggggtcacagctcaagcgcccgaacgttggccgatccgatccgtcggctcagccacaacacatgcctgtgcccggtttagcgtctgcagccgcaccgccgcctcaagctggtgctgctccgccggcgcagccgcaacagacatccggcgcggccttgaccaaccagaagctgacgacaaatgatgcgctcgtctaccttaaggcagttaaggataagttccaggacaagcgggagaagtacgaggagttcctcgaggtcatgcgcgacttcaagagcgagaggatcgacaccaatggagtgattggccgtgtcaaaacgctgttcaacgggtaccctgaactaatccttgggttcaacgccttcttgccgaagggctatgcgatcaagctacaagaagagaagaagcctgttgattttgtggaagctatcaatttcgtgaacaagataaagaatcgatttcagcatgatgaacgagtttacaaggcattcttggacatcctcaacatgtaccgcaaggataataagtctatccaagatgtttaccatgaggttgctgggctgttcaaggaccataaagatttgcttgaagaattccagcacttcctgcctgatacctcagtggccccacaagcagtggcatcttcaaggggtggtttggttaagcgggaggacaggagctctttgccacctgcaaataggacccttcacaatgagaagagggagagagcttgtctatcacatgctgaccgtgactttagtgttgaccgtcctgatgtggatcatgatcgccagagaagacgtcttgataaagaaaaagaacggaaggtggaaagggatagaagggattatgagagagaagacaaggatggtgaacatgacagtagagacctggagataggacagcgtaagcgaaagccttttccaaggaagatggaggataatgcaggtgcggagacacaccaaggaggccccagtgagaatcatggaatccatagcgtttcttcttcatcatatgacgataaggatgcgctgaagagtgtatacacgcacgagttccatttctgtgagaaggtgaaggaaaaactggagcatgaagcttaccaggagtttttgaaatgtctacacatctacagccaagagattatcacgagaagtgaactgaagaacttggtgaatgatatactccagcattatccagatcttatggaagggtttaatgaattcttggaacattgtgaaaatatagatggatttcttgctggtgtcttcaacaaacgcccaacaacaaggattgttaaaactgaggataaagaaaaggatagagatcgggacagggaggacagggatagagatcgggaaaaggaaagagagaaggaacgagaaagactcgataaagggtcaacattcaattcaaaggacggttcttgtcacaaacctcctatgttttctggcaaagagaagtacaacctatccaaaccaatatcagagcttgatctctcaaactgtcaacgttgcactccgagttaccggcttctacctaaaaattatcccatgccccctgccagcaacaggactgatcttggagcctctgttcttaatgatcactgggtatcagtgacatccggaagtgaagattattcatttaagcacatgcggaagaatcagtatgaggaaagcttatttagatgcgaggatgacaggtttgagttggatatgctgttggaatcagttaatgcagcgactaagcgtgttgaagagctgatagaaaagatgcaagacaactcagtcaaacctgagagtccaatacgcatggatgagcatttaactccgttgaacctgaggtgcattgaacgactgtacggtgatcatggtcttgatgtgatggatgttcttcgcaaaaatgctagtgttgctttgccagttattctaactaggctcaaacagaagcaggaggagtggtcaaggtgccgatcagatttcaacaaagtttgggctgaaatatatgccaagaattatcacaagtcacttgaccatcgtagtttctatttcaagcagcaagatacgaagaacctgagcacaaagtctctcctgacggagataaaagaaattaatgagaagaaaagaaaggaagatgatgtgctccttgccattgctgctggaaataggcgacctatagttcccaatatgtcattcgagtatgtagactcagaaatccatgaagatctacataagatcattaagtactcctgcggtgaaatctgcaattcttcagatcaattagataaagtgatgagaatatggacaacttttgtggagccaattttgggtgttcagcgaaaacatggctccgaggatcctgacctagttaagccaaagagccgaacaacaaaatcgggtattgcaaatgttggggaaagcaacactggagctgggattgtctccaagcataacaacgatgatgaaagtgaacaagggctgccgtctcgggctagaatagcaaatggagttgcagccaacgctcaaaatggtttccatgatgcagatcgaattgcccgtagaggtgaagaatcattaaatgttacacttaatggaagagtgcatggtgctgcctctgcagacgaaacaccttcactaagcacacaaaatattgcttctactgagcgatcagcagagaatgcagctgttgttaggactgaacaacataaggcaaatttggaacttacgccaggcgtgaatggttctagaagttctcatggtgcagttgaggtggctggtgaaggcaaggctgtcaatgaaacattgccttctgctgtgggaggggaaacaggtaggttgggaccatcttttaatggcatcagtgagggaattaaagggcgcctaaataatgatggttctgcaccccatatttcaaaagttgaaagagaagagggtgaattatcgccaaacggagattttgatgaggaccattttgttccttttgaagatggaacatctaaaggaaaggaaggttctacaagcagatcattccagggtaggcatggggaagtggtgccatctgctgaggcagctggtgagaatgatgctgatgctgatgatgaaggtgaggaaagtgctcagaggtctactgaggacagtgaaaatgcttccgaggctggtgaagatgcgtcgggcagtgaatctggtgatggtgaggaatgctttcgtgaagaccacgatgaagaagaagaggatatggatcatgatgatcaggatacaaaagctgaaagtgagggcgaggcagaaggaacaactgagacacatgatgtggaaggaggaatatcactaccactttcagaacgctctctgtactcagtaaaaccacttgccaagcatgtacctacagctttacatgatcgagagaagttctcacgtatattttatggaaacgattcattttatgtcttgttcaggctacatcagatcttatatgagagactactttcagcaaaaactaactcttttaccgctgaaaagaaatggaggaattccaaggatacaaaccctcctgatctatatgcaaagtttatgagtgcgctttacaacttgctcgatggttcttctgacaacacaaaatttgaggacgactgccgagctattattgggactcaatcatatgttctctttactttagataaattgatttataaagttgtgaagcagcttcaagcaatagcaacagatgaaatggacaataagcttctgcagctatatttatatgaaaaatcaagatctcccgggaggttttttgacctagtttatcatgaaaatgcccgtgttctactgcatgatgagagcatataccgatttgaatgttgctcaagtccgacaaggttgtctattcagctgatggaatatggtcacgaaaagccagaagttaccgcagtatcaattgatccaaatttttcttcgtatctttttggcgagtatttatgtagtacgtcagacaagaaattatctgaaggcgtctaccttgcaaggaataagcggaaatattcagataatgatgaaccttcagattttttgaaggcaatggatggtatcaaagttgtgaatggtctcgaatgcaagatatcctgcaagacctctaaggtctcgtatgtcctagacactgaagatttcttgtcccggcttcggaagagaaggaaaattttgcggggtgggagtgtgtctgacagttcgcagttttcaaaaatatatgctgcaaaagtgcagcgcttcaataggttcctatccaaagcataggatcatttggcatacaaaatgtctcatcattgtatctaaacctggagatattgctgggaccccagttgctttgcttcttcagtgataatatgcaggagttggaagatggtgacgtcatcgacaattcgtcgcagaatgccctttttgaataacagatggggagatctatagggtaaatacagcaaaacgaagcgagcatgtaggccacagcagtcagctctgttgtgcggaaagatgtgtatatatgtattagcaacatgtttgttctgatgacctttttaatgcttttcgatgtgttcagaagaaactatcttggaagtccaaagtctgctaccgtgtgaggtcgcagtttttccttgcaagtacttgggacttcctctttccttgcacaagctgtccaagcaacagttccagccgtatgttgataaatttgctgatcaactacctaattggaaagctgatttgatgaccagagcaggcaggagaatactagtgcaacatgtgctcacaggtatgactgtgtatctggcaatggc

SEQ ID NO: 215178 - DNA, 3896 bp, Zea Mays
agcaactccaagagattagctaaaaagactagccaaatttactgatttagctaatctctaaaatagattttagagaaaaagtgtaggctaatccaacagactcggtaaacctacggactgaatagagagtgaagcaggctatccaaaattggagagcgaagatggagaaatagagagccactaaatttgaagagtcatttacagagtctattggatacaattttcttttaatattagctaaatttacctttacaaaaccatatatctagtctcttggagttgctctaactttttaggcctgcagactgaccaccaacgcagtgaccagtggcggccactctaccaccaacggtttggtcttcgtctgtacacccgaacctggcatattcatacggtgactgcaaggtgagccacaactcagaggcaagcagagtcagcaaagatatatgaaagggaggagaggggttgaacagattattactctcagaaaccagccccttctaccctaccgttcttcctcctatacaatacaacaactactctcttgcgttgtactcggagccaggatcagatggatgcccttgctttgctgcctatcctgatctcttctcctctcaggatgtaggcagatcgagtaatcagtggctcacattttgacaagacactcaagggagcggcactgatgctataaggtgagccttgaccttattccaagtctgatcgaataagaagggatggcagagattgctgttcttctcgtcctgaagaagattgccatagctctggcaggagagaccctaagttttgctaaaccattgcttgcaaagaagtctgagtcggtggcagcactcccagatgacatgaaactgattagtaatgagctcgagcttatccgggcgtttctcaaggaaatcggcaggaaaggctggaaaagcgaagtgatagaaacatggatagggcaggtccgaagactggcttatgatatggaagacactgtagaccattttatttacgttgttggtacacacgatcagatgggatcatgctgggattacatgaagaagatagccaagaagcctcggcgtctggtttcactagatgaaattgctagtgagattaagaagataaagcaagagcttaaacaactctcggaaagtagagaccgctggactaaacccttggatggcgggagtggtatacctgcaggaagctatgaaactgaaaaggaaatgtatcttcctggacatgattacacaatcagcgacgaggagcttgcaggaattgatgaaaataagcaaaccttgattagttcattaaaatttgaagatccatcacttcggatcattgctgtctggggtatgggtggcgttggaaaaagcactcttgtaaataatgtgtacaaaaatgaaggatccaactttgactgccgtgcatgggtttctatctctcagtcatatagactagaagatatatggaagaaaatgctgacagatctcatcgggaaagataagatagaatttgatcttggaacaatggatagtgcagaactaagagagcaattgacaaaaactctagacaaaaggcagtacctgatcatactggatgatgtctggatggctaatgttttttttaaaattaaagaagttcttgtagataatggccttggaagcagagtaataatcacaacaagaattgaggaggtagcttcactagctaagggtagttgtaagatcaaagtagaacctctgggtgtcgatgattcctggcatgtattttgtaggaaggcatttctgaaagatgaaaaccatatctgccctccagagttgcgtcagtgtggtataaacattgtggagaaatgtgatggtttgccattagcccttgtggcaataggaagcatattgtcgctgagaccgaagaatgttgacgagtggaagctattttatgaccagcttatctgggagctacacaacaatgagaaccttaatcgcgtggagaaaattatgaatctaagttataaatacttaccagactatttgaagaactgcttcctgtattgtgctatgtttccagaagactatctaatacacagaaagagattgattagattgtggatagctgaaggatttattgaacaaaaaggggcatgcagcttagaagacactgctgaaagttatcttaaagaacttatacgacggagcatgcttcacgttgcagagaggaactgctttggtaggattaaatgtattcgaatgcatgatcttgtgcgtgaacttgccattttccaatctaaaagagagggtttcagtacaacttatggtggaaataatgaagcagtgctagtgggatcatattctcgacgagtggctgtgctccaatgcagcaagggcattccatcaaccattgatccatccaggcttcgcaccttaattacattcgacaccagcagagcattatctgtgtggtattcttctatttcctccaaaccaaagtaccttgcagtattagacttatcaagcttgcctattgagactattccaaattcaattggagagcttttcaaccttaggcttttatgcctcaataaaaccaaagtgaaagagctccctaaatctattacaaaacttcaaaacctacagacaatgagtcttgagaatggggagttagtgaagttcccacaagggttttcaaaactgaagaaattgcgacatcttatggtttcacggttgcaagatgtaactttcagcggtttcaaaagttgggaagctgtggagccatttaagggcttgtggactttgattgaactgcaaactctgtatgccattacagcaagtgaagtattagttgcaaaacttggaaatttatcccagctgaggcggcttataatttgtgatgtaaggagtaacttatgtgcacagttgtgtggctctttgtcaaagttgtgccagctgtcacgattaacgataagagcatgcaatgaagatgaagtgctacagctggatcatttgacatttccaaatcctcttcaaacccttagtttagatggacgactgtcagaaggaactttcaaatctccctttttcttaaatcatggaaatgggcttcttaggctaatgttgttttacagtcagctttcagaaaatccagtaccacacctctctgaattgtcaaacttgactaggttatcccttataaaggcatacaccggccaagaattatacttccaagcaggttggttcctgaatttaaaagaactttacttgaagaatttgtcccggctcaatcaaatagacatacaggagggagctttggccagccttgaacgtataacaatgaaacacctcccggagctacgggaggttccagtcggtttcagatttctcaagtccctaaaaacaatatttttttccgatatgcatcctgagtttgaaagcagctttcaaaaggaaatgtagatcatatcccgtacatatgcaggacaacaacataagtatggtttgtttgtatgtctacgtgtaccttctgtcctctcccaaaaatagggcgggttgcattggcgaaaagttcatgatgggtgttttgagcttgggcaattactgtggagaggaaatgcagcactaggatccaagctttcgagcagaaagcagcgctgaagctgaagggcatgtcatgtcattcaggtacctagtaggatccaaaccttcgagcagaaagcagcacaggcactggcaccaaagaggaaccatagccgccaggcaacatcagtcatcaggaccggttaataatgtttatgtgtgataatgttgtttcaataattatttggaaccatttcgaactccgaatacttgagagtctgtacgaagcatttggcaataaatactatttcagagtaattatag

SEQ ID NO: 215179 - DNA, 1790 bp, Zea Mays
cacatctgccatgtacacatctgtcatgaaagatttatgatggagatgggttcaattacatcaaagaatcttttgaaaatggtactcttcaccttattgggttgttgagtgatggtggtgtacagttaagttacaagcgtaccacaagatttacttttatttgctctatccagttacttctgaaaggtgttagtgagagaggagcaaaaaaaattcgtgtgcacaaccttaccgatgggcgtgacgttttggatggaagcagggttggtttcgtggagaccctagagaatgatcttttggagcttcgaggcaagggtattgatgcacagattgcatctggtggtggaaggatgtatgttaccatggaccgttatgagaatgactgggatgtggttaaacgtgactgggatgctcaggtgctcgaagaagcaccctacaaattcaaaagtgcacttgaggctgtgaaaacactgagagcacaacccaaggctaatgatcaatacttgcccccatttgtgatagttgatgacagcggcaaagctgttggacctgtattagatggtgatgcagttgtcactatcaacttccgagccgatcgcatggttatgcttgcgaaagcactagagtatgcagattttaacaactttgaccgtgtacctgtccccgaaattcgatatgctgggatgcttcaatatgatggtgagttgaagcttccaaatcgctaccttgtttccacaccagagataaatagaacatctggggagtacttggtgaagaatggcatccgcacctttgcttgcaggcaaccagggaagacaacgcgttcatcctcccacgcgcttcctccgccctattttagtctgctcgacacgccaccggccactgacatcccatatcgccaagtccccttccctcgcctcgcgttagtagcctgcttccgacccgcacatctccctccggttctcgccatgggcgccggcgccaacaaccacgaggagtcgagccccctcatcccagctgcggtcgccgcccccgcgtacgagaagcccgtgtcggcccacgccttcggcggcgtcccgcgggagagctggaactccgggatcctctcctgcctcggccgcaacgacgagttctgcagcagcgacgtcgaagtgtgtcttcttggaacggtagcaccatgtgtgctctatggtagcaatgttgagaggcttgctgctggacaaggcacatttgcaaacagctgtttgccttacactgggctgtatttgcttgggaactctctctttgggtggaactgccttgccccatggttctctcatcccactcgtactgcgccgcagggttccccaccctggattcaacaatgggcactccgtctttgtcatgatgccgcccatggagcagaccatggggcgtggcatgtgagctattccaccaccttccctaccctagttttatctgtgcttcccgtggtttatcatctgctgctgttggccttgatgtgtgatgtgtcgccgtcagtaaatacgagtttgtgatatgaggtcgtgctgggaactttggattgtttgcttcttatcgactgcagtttggattctggacagtcacttatctcctgtgttactgtgtttgtacggtggtcctcgatgggcctgtcaatgtgaaatgcatttcgtcgtaccttattctgaatgtttttccctccaaaatatgagccccatacactaatatggcggtagctctcgtcacaaaccctcggatacagcagcgtttgtgcgtggaaagaaaaa

SEQ ID NO: 215180 - DNA, 1126 bp, Zea Mays
aagcatggggccaatgctgatcttgtgaatgctctgaagctggtccaacctatcaaggacaagttttcaagtgttacctatgcagatctgtttcagcttgccagcgccacagctattgaggaagtaggtgtccctaaaatccctatgatctatggaagggttggcgttattgcccttgacaatgcgcgccaaagtagcctgcttccgacccgcacatctccctccggttctcgccatgggcgccggcgccaacaaccacgaggagtcgagccccctcatcccagctgcggtcgccgcccccgcgtacgagaagcccccgcaggctccggcgccggaggccgccaattactatgccgacggggtcccggtcgtgatgggcgagcccgtgtcggcccacgccttcggcggcgtcccgcgggagagctggaactccgggatcctctcctgcctcggccgcaacgacgagttctgcagcagcgacgtcgaagtgtgtcttcttggaacggtagcaccatgtgtgctctatggtagcaatgttgagaggcttgctgctggacaaggcacatttgcaaacagctgtttgccttacactgggctgtatttgcttgggaactctctctttgggtggaactgccttgccccatggttctctcatcccactcgtactgcgccgcagggttccccaccctggattcaacaatgggcactccgtctttgtcatgatgccgcccatggagcagaccatggggcgtggcatgtgagctattccaccaccttccctaccctagttttatctgtgcttcccgtggtttatcatctgctgctgttggccttgatgtgtgatgtgtcgccgtcagtaaatacgagtttgtgatatgaggtcgtgctgggaactttggattgtttgcttcttatcgactgcagtttggattctggacagtcacttatctcctgtgttactgtgtttgtacggtggtcctcgatgggcctgtcaatgtgaaatgcatttcgtcgtaccttattctgaatgtttttccctccaaaatatgagccccatacactaatatggcggtagctctcgtcacaaaccctcggatacagcagcgtttgtgcgtggaaagaaaaa

SEQ ID NO: 215181 - DNA, 2234 bp, Zea Mays
aagcatggggccaatgctgatcttgtgaatgctctgaagctggtccaacctatcaaggacaagttttcaagtgttacctatgcagatctgtttcagcttgccagcgccacagctattgaggaagtaggtgtccctaaaatccctatgatctatggaagggttggcgttattgcccttgacaatgcgcgccaaagtgctaagattattgaccaatctcttaccccaggaaagatttatgatggagatgggttcaattacatcaaagaatcttttgaaaatggtactcttcaccttattgggttgttgagtgatggtggtgtacagttaagttacaagcgtaccacaagatttacttttatttgctctatccagttacttctgaaaggtgttagtgagagaggagcaaaaaaaattcgtgtgcacaaccttaccgatgggcgtgacgttttggatggaagcagggttggtttcgtggagaccctagagaatgatcttttggagcttcgaggcaagggtattgatgcacagattgcatctggtggtggaaggatgtatgttaccatggaccgttatgagaatgactgggatgtggttaaacgtgactgggatgctcaggtgctcgaagaagcaccctacaaattcaaaagtgcacttgaggctgtgaaaacactgagagcacaacccaaggctaatgatcaatacttgcccccatttgtgatagttgatgacagcggcaaagctgttggacctgtattagatggtgatgcagttgtcactatcaacttccgagccgatcgcatggttatgcttgcgaaagcactagagtatgcagattttaacaactttgaccgtgtacctgtccccgaaattcgatatgctgggatgcttcaatatgatggtgagttgaagcttccaaatcgctaccttgtttccacaccagagataaatagaacatctggggagtacttggtgaagaatggcatccgcacctttgcttgcaggcaaccagggaagacaacgcgttcatcctcccacgcgcttcctccgccctattttagtctgctcgacacgccaccggccactgacatcccatatcgccaagtccccttccctcgcctcgcgttagtagcctgcttccgacccgcacatctccctccggttctcgccatgggcgccggcgccaacaaccacgaggagtcgagccccctcatcccagctgcggtcgccgcccccgcgtacgagaagcccccgcaggctccggcgccggaggccgccaattactatgccgacggggtcccggtcgtgatgggcgagcccgtgtcggcccacgccttcggcggcgtcccgcgggagagctggaactccgggatcctctcctgcctcggccgcaacgacgagttctgcagcagcgacgtcgaagtgtgtcttcttggaacggtagcaccatgtgtgctctatggtagcaatgttgagaggcttgctgctggacaaggcacatttgcaaacagctgtttgccttacactgggctgtatttgcttgggaactctctctttgggtggaactgccttgccccatggttctctcatcccactcgtactgctattcgacaacgctacaatcttgagggtagctttgaggctttcaccaggcaatgtgggtgctgcggcgatctggtcgaggacgaggagaggcgtgagcacctagaggccgcctgtgaccttgcgacccactacctctgccacccctgcgccctctgccaggagggtcgcgagctgcgccgcagggttccccaccctggattcaacaatgggcactccgtctttgtcatgatgccgcccatggagcagaccatggggcgtggcatgtgagctattccaccaccttccctaccctagttttatctgtgcttcccgtggtttatcatctgctgctgttggccttgatgtgtgatgtgtcgccgtcagtaaatacgagtttgtgatatgaggtcgtgctgggaactttggattgtttgcttcttatcgactgcagtttggattctggacagtcacttatctcctgtgttactgtgtttgtacggtggtcctcgatgggcctgtcaatgtgaaatgcatttcgtcgtaccttattctgaatgtttttccctccaaaatatgagccccatacactaatatggcggtagctctcgtcacaaaccctcggatacagcagcgtttgtgcgtggaaagaaaaa

SEQ ID NO: 215182 - DNA, 961 bp, Zea Mays
aaaatatatacttcaagcaaggtagtgcttatcaagagctatcctttggcctataaataggcctaaccaatcctactgattttgcaaagcaacaatccctacattcaaaacaactcaaaacaatactagtttttggtcacttagtacagggatatggcacaagaggataccaactctgcggtggataagatgggaacatctcaagcaccaaggcagcacttgtcacaaaatagggcctcactgaccagcaagattctgttgaaagctaaggcacccaggaagaagaaaactactatgtatccggtcctagcagctgcactcaaatttcataaagatgatgacgtttgtcctgcagctgctggagtgaagcagcagcagcagcacaacaaggagatgtagagatctattatgaatgcacctcatgccaacatcgatctaccttagttatgtattaatttcctagtacctattgtcatctcaagctatctatctttacattatatcgtgtcatcatgtcagttcgctattatgttgtatggcttggttcaaaatgagttataacttaatctcctattgcaatgattgtccattagttactctttttatgatggtgtcttcaatatttgaagaaaaagctatattgtaagcaacataacatggaaaatacatgatgtttaaaagaatatgatgcttagatctaacatggaaaaggaaaaatcctcattgtgaaaatgataggtcgctataaaaacttgacctgccgggggtaagacagcccccaggcattgtattaagaagaagaccttctcacacaggtcaagaaaacccccgaacccctgccccacccatacagagcggcatcgaagcacatgtgagaacgaccacgaccgaggctgagccttagacctgtgctttggcgtgggacagactaggggatttttttaaccacagcctgaaattc

SEQ ID NO: 215183 - DNA, 782 bp, Zea Mays
aaacaactcaaaacaatactagtttttggtcacttagtacagggatatggcacaagaggataccaactctgcgattctgttgaaagctaaggcacccaggaagaagaaaactactatgtatccggtcctagcagctgcactcaaatttcataaagatgatgacgtttgtcctgcagctgctggagtgaagcagcagcagcagcacaacaaggagatgtagagatctattatgaatgcacctcatgccaacatcgatctaccttagttatgtattaatttcctagtacctattgtcatctcaagctatctatctttacattatatcgtgtcatcatgtcagttcgctattatgttgtatggcttggttcaaaatgagttataacttaatctcctattgcaatgattgtccattagttactctttttatgatggtgtcttcaatatttgaagaaaaagctatattgtaagcaacataacatggaaaatacatgatgtttaaaagaatatgatgcttagatctaacatggaaaaggaaaaatcctcattgtgaaaatgataggtcgctataaaaacttgacctgccgggggtaagacagcccccaggcattgtattaagaagaagaccttctcacacaggtcaagaaaacccccgaacccctgccccacccatacagagcggcatcgaagcacatgtgagaacgaccacgaccgaggctgagccttagacctgtgctttggcgtgggacagactaggggatttttttaaccacagcctgaaattc

SEQ ID NO: 215184 - DNA, 1451 bp, Zea Mays
tgtccaccgacgaatcttccccagctgcgttaatcggggactggtcgtgtgcggagatgttggtgctcttcgagacccccgcggggttcgccctattcaaggtgctcgacgaggggaagctcgacaaggtcgaggatctatggaaggagttcacgacgtcggactcagcgagaaaggtggtcgagctgaaggctttcaacaagtttgagaacacatctgatgccctatccgcggcaaccctgattattgatagcaagcctagcaagggtctgcgcaagttcttgcagaaacattgtgagggtgaaacattagcagtagctgattctaagcttggaaatgctataaaagaaaagctgaaaattgactgccttcacaatagtgctgtgatggagctgatgagaggactgagaaatcagcttaccgagcttataactgggttgggtgcacaagaccttggtccaatgagcttgggattgtcccacagcttgtctaggtataagctgaagttcagccctgagaagcactttccagagctcaccaaaatagttatagataatatacagtatgccaaagttgtgaagatgatgggcaacagagttaatgcagtcaaccttgacttctctgagatattgtcagatgaagagctagaaacacagctaaaggaggcagcagtaatatccatgggaacagaagttagtgaccttgacttatcgaatatcagagagctatgtgatcaagtgctggccctttctgagtacagagcccagctgtatgactatttaagaagcaggatgaacactattgcaccaaatttgacagcactggtgggtgaattagttggcgctcgccttattgcacatggtggaagtttgctaaatttggccaagcagcctggtagcacaattcagatacttggtgcagagaagctttctgaagttatatgtgatcaagcaatcctcctggatctcattgctaaatcgagatgtgtcgctgctgccaagaagtactttttggacctcccagaaacttccaagacttattttaggtatcacgctcttctcaattcttactccaaagttttgatgattgagaaggccgagtctctcgtggagaaaatggaggagctcaactttccattcatattttatatgaagagaaaggtagtagtagcagagacgagacgtcctttgaagccaccccctggttggaatcagactgcgaagatgatttctacagcgtcaacgaaggccgaacccctgaagccgccgccgccgcaaaggaggctgggcgacctcctgcgagaggcgcaagacgacgacaatgacaatgacaccgccgtcgacggcctctccagagacgactccttgcgcatgggcgcggaggccaaccggtgctgcgtgccgcggctcgcgtgggccattagctgcaacgggaggacacaacgcaagtga

SEQ ID NO: 215185 - DNA, 4714 bp, Zea Mays
atgaaaaaacgcaacgaaaccaacgaagcacaaataataggattttcaaaaaggaaaaagattagcaggaggactggaggagcgcctccgcacgggcacgggccggcagcccggcacgaagcggaaaacttgaaaactagccgagcgaactgccgtctcaattcaaaatcccgtcaactctcacccccatatccctccccgtcttccttccccccatttctcccacagacttcggcctcccgaatctcgaaccctaacctcatcggcgacgaggggagccccgcctccgcctcctgcttctctgttatgaacaacttccatgtctacgaggccattggccgcggcaagcactcgacggtgtataaggggcggaagaagaagaccatcgagtacttcgctgttaagagcgttgacaagtcgcagcgctccaaggtcctcaacgaggttcgaatgctccattccttagaccatgccaatgtcctgaaattttactcttggtatgagacctccgcacatttctggttagtgttggagtattgcgttggtggagacctgaagggcttgcttgaacaggataagaagcttcctgaaaattctatacatgacctggcttacaatcttgtcaaagctcttcagttcttgcattcccaaggaattatatattgcgatctgaagccatcaaatattctgcttgatgaatttggatgcatgaagctttgtgattttggattagcaaggcgcttaaaagacatcgagaaaactaatcctggagatgtgccacaacccatgaggggaacaccatgctatatggctcctgagttatttcgagaggcaggagtccactcatatgcttctgatttctgggcacttgggtgtgttttgtatgaatgctatacaggaaggcccccttttgtaggcagagaatttacacagttggtcaaatctataattttggatcctacaccgcctttatctgataattcatcaaggtccttccaaaatctgattgattgtttactcatgaaagatccagcagaaagattacagtggtctgaattgtgtgaccacaacttctggaaaaccagtatcccaatgatttctttacctcctcagcctgcttttgacaacatgattgaactttctgctacaccatatctagctgagagaaatggtgacaaaccttccagacagctgacaccacccaagcaccgtgaatatagtggccttcggaggaaggatgaaaattctactaagccatccatgacacctgttaaaaatgtgcaaagtgtcaagaaaaattgtggaaaaccaaaagctgagggtttcaaaggtgtaaatatcctcagaatgtctcgcattgctaaattgaatttgcaaagggaaagggacaaggagaactacaggcgtcctcccacagaaacaactgagaatgagactgaagttaatatagataataatgacatggaacttgattttggtgaaaatccagaggctgatgcacctgatgacacatatggatcggataatcctggatctgcaggaaatgaaaagcctcaaagcactgatgctaatgaagagaattgtatggcaaatcaggttgatatgcttacagatgagggttcagttaagcctgatatcatggtgaaaactgagcagaattcttgttcagataacctggatgtggaggctactccacctagtagcacgcgaaaagcacaacgtgcaaaggtaactccatgtcctggaactggttctgagccatctaacatctttgaagcattctggcatccaacagatcttgcagttaaaccagttatgcctagtaggaaagcagataaagctgtggacatggtccccacacttccttttgaagcacttacagcaagtgattatattaagttaccactggaacagatgaatgcattcaacagtcagatacttcagagtttaagtggaacctatcaggtttcagaaaaacaaaatactatcagatacctggagatgttaagcatgaattcagatgctgcgaacaaaataactaatggaccaattatgctgctactaataaaaatgcttcgactgtcaaaaacttcagtcttgcgtgtccaaattgcctcacttatggggttgctgatacgatattccactgctcttgatgtggagctggcaagttcaggaatttttaatgcactatcagatgggttaagggataaacatgataaactcaggcgattctgtatggcaacactaggagagttattattctatatttctacccagtctgatcaagataccaaggaaataaatacccaagaataccctttgaaggataacaggtctgcaacatcttggcaggttcctagtgctgtaattgcactggtgtcatctatcttgcgaaagggagaagatgatctagctcagctatatgccttacggacagtcgataatatatgtagccaaggaactgaatggacatcccgttttgcatctcaggatgcgattggacatctgtgctacatctataaagcaactggaaagcaggagagtacgaggctcattgcaggatcttgtttggcccgtctctctcgcttcagtccatcatgcattcatttaatattggaaaagatatcattcaaggatatagcatgcacacttatcaagggaaatacacgtgaacagcagattagtcttaatattctcaattcggcattagttaatagtcacactgtgacaagcatgaaccggtatattctttcattatcagatgacaaacaattggtccccgggctcatttctctaatagaacagggaactgatgttctacgtgggaagacccttttgtttgttgctctgctttgcaagaatagtcgaaggtggcttcctcatttcttttgcaatgcaaaattaatctcagctgttgatagactgggaaaagagaaggagggttttattcatcaatgtacagaagcatttgtgcagttggttgcttccttggtccctggtattcttgacactgtctccagtgatatacaacaggttatggttggcaaacgccatggacctgttactgctttagctgggcgagctcatccaaagagcacaattcatctgttccctgttattcttcatcttctgggaagtgcatccttcaagcatagagttgtgacaggccatgtattgcttcagttggcaaatcttattaagattttggaggcaccgtttcaggctagggatgatttccaaatgacattgttgcgagttcttgaggctgctacagaggagccttctgttatacttaatgaacacacagtattcatgagtcgtatcattccaagcttatctgtcttatacaagggcaataaagatggtgatgccagatttctttgtttgaagatactcgcagatgttatgattgtgatcttcagtgattcttcattaacttctgacgaacaaacaataactgatctgaaatcaatctctcagaggcattttctaccactgtacccttcttttgcagaggatgaagatcccatacccatatatgcacaaaaactgctagtaatgctaatggaacatggttgtgtaaaagtctctgatattctgcacaaagcaacagtatcccagtgctttgaatttttgctaggagatctttcaaatgcaaatgtaagcaatgtcaagctttgctttgccctggtatctgcacctgagatggacacctatattctttctcagcttcaagttgttagaagaatagggaacctactcgagtttgttgctgcaaaagacatggacgattttcttgaaccaaccctggaactttgcagagcttttattattcgtggcactggcagcaacagaagtgtcgccctctccaaaaacccggcacttcttcttgacagtgccttcagcatgagtattgctgttgatcaacaaacttgtgtcatggatatatgtgacttcggtggcaacatgggtatttttcttgagctagttggcaattcagatccgcagataagtgatttagcatcagattgtgtagtgttgttgctcaaggcagcacctcgagaggctacagtgggcttgttgacaagtcttcctaaattaagcactgtcatggacttgctgaagcatgacagccaccgatgtctgattcgcttattatatggcctagccttctcatgcagacaatacttagcccagggaatgatcctgtcaatatcagtgccagctttgatgcgagttgaagcacttgtttcagttttcaagggctccaatgatagccttcttgctgatgctgcttcttatttgagcgccgaactgcagcgcttacctcgctgtggttgaaggtgcaacttggccaaggaggcaggttggctgctattgttcaaggatgcgcatgtattccttcatccttcgtgcaccatgtacatgatgagctgagcaagtgagcaggacgtcatcaagtgaaggtactttacatcagtggctgatctcagttgcctcaatggccaagtgacactttccgctcgtagatgtgcagggtgcgagggtgttttatgctatcatttatgtgcatttcggggctgctgtatatggcgcttttgaacaataccttgaaggtggctagaagcaaaagaacacttcgttcccccgccaattttggttggcaattacctcagtttcatatttacttttctctgcatgcgtgtccact

SEQ ID NO: 215186 - DNA, 4691 bp, Zea Mays
atgaaaaaacgcaacgaaaccaacgaagcacaaataataggattttcaaaaaggaaaaagattagcaggaggactggaggagcgcctccgcacgggcacgggccggcagcccggcacgaagcggaaaacttgaaaactagccgagcgaactgccgtctcaattcaaaatcccgtcaactctcacccccatatccctccccgtcttccttccccccatttctcccacagacttcggcctcccgaatctcgaaccctaacctcatcggcgacgaggggagccccgcctccgcctcctgcttctctgttatgaacaacttccatgtctacgaggccattggccgcggcaagcactcgacggtgtataaggggcggaagaagaagaccatcgagtacttcgctgttaagagcgttgacaagtcgcagcgctccaaggtcctcaacgaggttcgaatgctccattccttagaccatgccaatgtcctgaaattttactcttggtatgagacctccgcacatttctggttagtgttggagtattgcgttggtggagacctgaagggcttgcttgaacaggataagaagcttcctgaaaattctatacatgacctggcttacaatcttgtcaaagctcttcagttcttgcattcccaaggaattatatattgcgatctgaagccatcaaatattctgcttgatgaatttggatgcatgaagctttgtgattttggattagcaaggcgcttaaaagacatcgagaaaactaatcctggagatgtgccacaacccatgaggggaacaccatgctatatggctcctgagttatttcgagaggcaggagtccactcatatgcttctgatttctgggcacttgggtgtgttttgtatgaatgctatacaggaaggcccccttttgtaggcagagaatttacacagttggtcaaatctataattttggatcctacaccgcctttatctgataattcatcaaggtccttccaaaatctgattgattgtttactcatgaaagatccagcagaaagattacagtggtctgaattgtgtgaccacaacttctggaaaaccagtatcccaatgatttctttacctcctcagcctgcttttgacaacatgattgaactttctgctacaccatatctagctgagagaaatggtgacaaaccttccagacagctgacaccacccaagcaccgtgaatatagtggccttcggaggaaggatgaaaattctactaagccatccatgacacctgttaaaaatgtgcaaagtgtcaagaaaaattgtggaaaaccaaaagctgagggtttcaaaggtgtaaatatcctcagaatgtctcgcattgctaaattgaatttgcaaagggaaagggacaaggagaactacaggcgtcctcccacagaaacaactgagaatgagactgaagttaatatagataataatgacatggaacttgattttggtgaaaatccagaggctgatgcacctgatgacacatatggatcggataatcctggatctgcaggaaatgaaaagcctcaaagcactgatgctaatgaagagaattgtatggcaaatcaggttgatatgcttacagatgagggttcagttaagcctgatatcatggtgaaaactgagcagaattcttgttcagataacctggatgtggaggctactccacctagtagcacgcgaaaagcacaacgtgcaaaggtaactccatgtcctggaactggttctgagccatctaacatctttgaagcattctggcatccaacagatcttgcagttaaaccagttatgcctagtaggaaagcagataaagctgtggacatggtccccacacttccttttgaagcacttacagcaagtgattatattaagttaccactggaacagatgaatgcattcaacagtcagatacttcagagtttaagtggaacctatcaggtttcagaaaaacaaaatactatcagatacctggagatgttaagcatgaattcagatgctgcgaacaaaataactaatggaccaattatgctgctactaataaaaatgcttcgactgtcaaaaacttcagtcttgcgtgtccaaattgcctcacttatggggttgctgatacgatattccactgctcttgatgtggagctggcaagttcaggaatttttaatgcactatcagatgggttaagggataaacatgataaactcaggcgattctgtatggcaacactaggagagttattattctatatttctacccagtctgatcaagataccaaggaaataaatacccaagaataccctttgaaggataacaggtctgcaacatcttggcaggttcctagtgctgtaattgcactggtgtcatctatcttgcgaaagggagaagatgatctagctcagctatatgccttacggacagtcgataatatatgtagccaaggaactgaatggacatcccgttttgcatctcaggatgcgattggacatctgtgctacatctataaagcaactggaaagcaggagagtacgaggctcattgcaggatcttgtttggcccgtctctctcgcttcagtccatcatgcattcatttaatattggaaaagatatcattcaaggatatagcatgcacacttatcaagggaaatacacgtgaacagcagattagtcttaatattctcaattcggcattagttaatagtcacactgtgacaagcatgaaccggtatattctttcattatcagatgacaaacaattggtccccgggctcatttctctaatagaacagggaactgatgttctacgtgggaagacccttttgtttgttgctctgctttgcaagaatagtcgaaggtggcttcctcatttcttttgcaatgcaaaattaatctcagctgttgatagactgggaaaagagaaggagggttttattcatcaatgtacagaagcatttgtgcagttggttgcttccttggtccctggtattcttgacactgtctccagtgatatacaacaggttatggttggcaaacgccatggacctgttactgctttagctgggcgagctcatccaaagagcacaattcatctgttccctgttattcttcatcttctgggaagtgcatccttcaagcatagagttgtgacaggccatgtattgcttcagttggcaaatcttattaagattttggaggcaccgtttcaggctagggatgatttccaaatgacattgttgcgagttcttgaggctgctacagaggagccttctgttatacttaatgaacacacagtattcatgagtcgtatcattccaagcttatctgtcttatacaagggcaataaagatggtgatgccagatttctttgtttgaagatactcgcagatgttatgattgtgatcttcagtgattcttcattaacttctgacgaacaaacaataactgatctgaaatcaatctctcagaggcattttctaccactgtacccttcttttgcagaggatgaagatcccatacccatatatgcacaaaaactgctagtaatgctaatggaacatggttgtgtaaaagtctctgatattctgcacaaagcaacagtatcccagtgctttgaatttttgctaggagatctttcaaatgcaaatgtaagcaatgtcaagctttgctttgccctggtatctgcacctgagatggacacctatattctttctcagcttcaagttgttagaagaatagggaacctactcgagtttgttgctgcaaaagacatggacgattttcttgaaccaaccctggaactttgcagagcttttattattcgtggcactggcagcaacagaagtgtcgccctctccaaaaacccggcacttcttcttgacagtgccttcagcatgagtattgctgttgatcaacaaacttgtgtcatggatatatgtgacttcggtggcaacatgggtatttttcttgagctagttggcaattcagatccgcagataagtgatttagcatcagattgtgtagtgttgttgctcaaggcagcacctcgagaggctacagtgggcttgttgacaagtcttcctaaattaagcactgtcatggacttgctgaagcatgacagccaccgatgtctgattcgcttattatatggcctagccttctcatgcagacaatacttagcccagggaatgatcctgtcaatatcagtgccagctttgatgcgagttgaagcacttgtttcagttttcaagggctccaatgatagccttcttgctgatgctgcttcttatttgagcgccgaactgcagcgcttacctcgctgtggttgaaggtgcaacttggccaaggaggcaggttggctgctattgttcaaggatgcgcatgtattccttcatccttcgtgcaccatgtacatgatgagctgagcaagtgagcaggacgtcatcaagtgaaggtactttacatcagtggctgatctcagttgcctcaatggccaagtgacactttccgctcgtagatgtgcagggtgcgagggtgttttatgctatcatttatgtgcatttcggggctgctgtatatggcgcttttgaacaataccttgaaggtggctagaagcaaaagaacacttcgttcccccgccaattttgatttacttttctctgcatgcgtgtccact

SEQ ID NO: 215187 - DNA, 7213 bp, Zea Mays
cacatctctcactctccctaacggacgcaccagcacacacacaccgccagcgcagtgggcgagcgagtgcagcgacagtgagacgaaccgccgccgtcgcccaccaccgtccacccgccaacggatctggctgcatgctttaaaacggatattaattcattattctcttggaattataaaataattcaaggtgtaaagctggtatggatctaagcatggcaagtttgaacttgtcagaacctcgagactctagagaatcaacttcgcccgcaccatcaacatcatcttctatatcaagagaaaaaggtgacctggcagaagttgatgatcctgaaagtgcaatgtccactgttgctagattgttggaagacctccatgctagcatggtgtctccatcggggaaggaagctacaaccagaaggttacttgaactggctagagcgaaaaaggaggcaaggattttgataggtagccattctcaggcaatgccactactcatatctacccttagagttgggtcatctgcagcaaaagtaaatgctgcagctctacttagtgcactctgtaaggaagaggacttgcgtgtgagggtcctcttaggaggctgtataccacccttaatctctcttttgaagtctgagtctgctgaagcgaagaaggctgctgctgaagctatttatgaagtatcttctggtgggcttttggatgatcacataggcaggaaaatatttgtgactgaaggtgtggtgccaactctgtgggacttgcttaatcctaggtctcaccaagatagagtagttgagggctttgtgactggggctttaaggaatctttgtggggacaaagatggttattggaaggccacacttgaggctggaggtgttgaaattattactggtcttctttcatccaagaatactgcttcacagtcgaatgctgcttctctgttggcacggtttatctctgcttctggtgatagcattcccaaagttatagatgctggggctgttaaggctctccttcaccttctaaatcgagataatatcatttctgttcgtgaaagtgcggctgatgctttggaggccctgtcttccaagtccagtattgcaaagaaagctgtggtggatgcaggaggccttcctattctgattggagctgttgtagcgccctcaaaggaatgcatgcagggtgggacatgtcattctctgcaaagccatgctgtccgtgctttatcaaatatttgtgggggaacaacttctctgttgctttaccttggtgagctctgccaagcaccccggtcacctgttcccctcgctgatattcttggagcgcttgcttattccttgatggtttttgacggctctgatgataaatcatttgaccctgttgagattgaaattactttggttgcgctcctaaaatctcatgacagcaagcttgatcgtattcttgaggctttagcaagtctatatgggaatgattgtttctccgacaggcttgatcactcttattctaagaaggttcttgttgggctgattaccatagctcctgctgatgttcaagagcttcttgttcgtgccttaactagcttgtgttgcgatggtgttggaatatgggaggctcttggaaagagagaaggggttcagttgctaatatcattacttgggctttccagtgagcagcagcaggaatatgcagtttccttattggctatcttgagtgatgaagtagatgacagcaaatgggcaataacagctgctggaggtatccctccacttgtccagctactagaaacaggatctcaaaaagcaaaggaggatgcagcttacatcatgtggaacatgtgctctgacagtgatgatatcagggcatgtattgagagtgctggggctgttatggcgctaatttggcttctaaagagtggtagccctggtggacaggaggcatcagttaaagcactgaagaagttgatacgatcagcagattctgctatgatcaatcagttactagcattactgctcagtgactcattgagctcaaaggcccatgtcattactgttctcgggcatgtccttgtgctggcgcctcagagagctctaatccagagtggagctccagctaataaagttcttaggtcactggttcttgttcttgaatcatcaaatgaagaaacacaggagattgctgcaactgtgttggctgatattttcactatgcgtcaggatatttgtgatgtaatggcaattgatgaaattgtccagccatgcatgaagcttttgacaagtggaaaccaagtgattgccacacaatctgccagagctttaggagcactgtcatgttcagctagttccatgtcaaaaaacaaaatgtcttgcttaactgaaggtgatgtgcgacctcttatagagatggcaaagacatcatctattgatgttgctgaaacagcatttgctgcattagcaaatctcctatcagatgcacagattgctaaagaagcattagatgacaatattgtcttggctttgactagagtgctcaaggatgggagtttagaaggcaagattagtgcttcgcggtcacttcgtcagttggtcaaccagtttcccctcagtgaagttctcccagattacttgcagtgctgttttataattcatgcactgttggtatgtctatctggcatcagtttagaaaatgttacaagtttggaaccccttgatgttcttacattgatggctacaacaaaggagggttcgcattatagcccccctctatgcactggttttcttgaagttccagaaagcttagaacctttagttcgctgtattagtattgggcttccacctgttcaagataagtccattcaaatcctagcaagtctctgtcagggtcgaccttcgctacttggtgaatatttaaacagaagtcaaggatgcatcacttctcttgctactagagttatagagtcaaatgacatggaaataaggatcagcagtgcagtcatcctcatatctgcaatgagggacagcagagaacggtccatcgatgttctggaagcatcaaaagttctgaagaatctgatatctgcactcattgatatgctgaagcaacattcctctttaacatccctagacattgaaatctggaaaccttccacagaaaaaagttcgcttaattatgagcaggatgttttgagtgtgcctgaacttggaaaggtttctgaagaaactgttgcactatggttgctctcactgatttgttcttatcatggaaggagtaaatatactgttatggagctcaatggcgttgacacagtatctgatagacttgctagctatactgctaaccgacaggaacagtatgaagactcagaaaatatatggacttgtgcccttctgttggctactctgtttcaggattcagtggttgttcagtcttctgaaataacacgaaccataccttccttagcatccttgctaaaatctgatgatattatcaataaatactttgctgctcaggcactggctagccttgtttccactgggagcagaggtatacagcttgctattgcgaattctggtgcagttttgggtgctgtagcattgatcggacaggtagaatctgatatgccaaaccttgttacaatggctgaagaattcaagttgtcagacaatccatgtcaaataatgttgagaagcctttttgagcttgaagatgtctgcactggtgcttccgcccggaggtccatacccttgctagtggatctacttaaaccaatgccagataggccaggtgcacctctgattgctttgcaccttctgactcaactagcggaaggtagtgagtcaaataaaattgctatggcagaggctggagctttggatgccttgactaagtatctatctttaagccctcaagactcaactgaaactactataaccaatctgttggggattttatacactaatcctgatcttctttaccatgaatcatcacgtagcacttcaaatcagctggtagctgtcttgcgtttgggttcgagaagttctaggcttagtgcagtaaggacgttgcagaaactctttgattcagagaatataagggacaccgaagtggcccggcaagctattcaaccactacttgacatgcttgagtcaggaactgaaatagaacagcaggcagcacttggtgcgcttatcaagctttctgctgggaacatcgctaaggattctgctatgtttgatgtagaaggcaacacacttgaaaatctttacaaagttttatccttcagttcgtcattggagctgaagaaggatgctgctcaactctgctatattttatttgagaactcaactgtacgtgcatcaccaattgcaacagaatgtcttcaacccctgatatcactgatgacatcaggatctagtttggctattgaaccagcagtttgtgctctaaacagattactggatgaggactacaatgcagaaattgctgcaactagcgaagttattgatcttcttgtcagttttgttcctggtacaaactatcagttgtctgaagcatgtatcggtgctctcataaagttgggcaaggatcgtccaaactgcaagcttgacatggttaaagctggtatcattgagcatgcacttgatatgattcttgatgttcctgtatctgttagttcatccattgctgaattgcttcgcattttgacaaacaacagtggcattgctaaaagttctgctgctgcaaaaatggtggagccacttttcttgcttttacgtcgccctgatgttactatgtgggatcagcacagtgccttgcaagcactcgtaaatattttggagaaacctcagagtctagcagcattgaagttgactcccagtcaaataattgagcctttaatatcatttcttgagtctccctctcaagcaattcagcaacttggcactgaggtgctctcacatcttctagaacaggaacattttcaacaggatatcactacaaaaaatgcagttgttcctctggtgcagcttgctggtattggaatcttgagcttacaacaaactgcagttaaagcacttgaaaacatctcacagagttggcccaaggcagtagccgatgcaggtggaatttttgaactttcaaaggtaattgtccaggatgatcctcagccaagtcaagcattatgggaatctgcagcacttgtgttatgcaatgttctgcgttataattctgacaactatgtcaaagtctcaatggctgtacttgtgagattgctgaactccaccatggagagtaccgtcacgatagctctcagtgctctacttgttcaagagaaaagtagctcacgctgtgctgtggccatggctgaggctggggcagtacgggcactcttggagctcctgaagagccatcgatgtgaggaatctgcagcaagattgcttgaagccctgataaacaattcaagggtccgtgaaacaaaagttgccaagtatgctattgctccactggcacagtacctgttagatcctcaatctaagaaccagtcagcaaagtttctggttactcttgcactaggtgacattttccagcatgaagctcttgcaagggcaagtgactctgtgtctgcctgccgtgctcttgtaagcctacttgaggaccagcctacggatgacatgacaacagttgctatttgtgcactgcaaagcttagtgatgcacagcaggacaaataggcgtgctgttgctgaagctgggggcattttggttgtgcaagaattgcttctttcaccaaatgtggatatttcaggacaggctgcccttctaatgaagtacctattttcaaatcatacgctgcaagaatacgtgtcgaatgagcttattcgatctcttactgctgccttagagagagagctgctctctacgtcaactatcaatgaagttattctgaagaccatatatgtgatattcagcaacttcaaaaaggttcggttttctgaggccgcaaccttgtgcataccacacctggtttgtgctttgaaggatggaaatgaggctgcccaagagagcgtgcttgacaccctttgcttgcttaaagaatcttggccgcaaatgaatgaagacatcgctaaagcccagtccctgatttcagctgaagccatacctgtactacaaatgcttatgaagacatgtcctcccagttttcacgagagagccgatagtttgcttcattgcttgcctggttgcttgacagtgaccatcattcgtgggaataatctgaaacagacaatggggggtacaaatgcattttgttgcctgcaaataggaaatggtcctccaaggcaaactaaggtggtaaaccacagcatgtgcccagcttggaacgagggtttcacttggttatttgacgtggcccctaaagggcagaagctctacatcatatgcaaaagcaaaaatacgtttggaaagtcaacccttggaagagtgaccatccagatcgacaaggttgtcaccgagggtgtatacagcgggttcttcagcctcagccacgacggaggtaaggacggctcaaggaccctagagatagagatcgtatggtccaataggccatccaacgactgtatgtagcgtacggatgatttacctgacgccaattcttgtactcttggcttccatgtaaatcagccccccccccataatcatccgaattcatttatttgtacgtagaaagttaagacacttagataactcgcgccatcattcaattattgaggtcatttccgggattgtggccctgctgctgtaaactgattttgcacccgggtatttttttttgtacaggtgaatttatttcatgtagttatagcttagtgtagattggtggtgagtacggacaagccctagtgacagtaacattgggtgtgatgtgtggcgtgatatttgctcccgtgggtgtgtttccggcacttgtagcctcaggatacacatggctgagcttggcactgttctatttgtcaggcatgtttgtttacctgtttggttctggctacgcaaaactttttttttacatccaccttgccatagccgtaccagcggtacgaggaatctgaggtacctttttcttccatctcggcagaagtttgatgtttggcgaaactgtctcaggttacatggtaataacaatactatttgcaaaaccaaacacgccacatacc

SEQ ID NO: 215188 - DNA, 926 bp, Zea Mays
agcttccagggcctcctcgcgctcgcccgcatcaccggctccaactccgatgagacacgcggcgcctgcaagaagtgcggccgcgttggccacctcaccttccagtgccgcaacttcctctccgtcaaggacctggacctggacgacgcccaggccgctgcacaggcagccgcgcaggccaagttcgacgaaataaaaaagaaggctgctgctggtggggacgcagatgaggcttctgatgacctcgaagaggaggaagaggacagcgattcctctgattcagacgtcgaccctgagctggagaagataattgctcagcgcgagcgtgccaggaatggaggacggaggcacaggcaggaagagaagtcgttgagccaccgctataggagcagcagcagcaagagaaaatcaaagcacacaaggagttggagaagtgatgatactgaggatgaagaggaggaaggcagaagaggcagggacaggaagaagaggtccagcagatcgaaaaagcatgaaagatcagatgaggctagcagtgatgactctgactcagataggcagagacacaggaagagcaggaagaacagatcagatgaggctagcagcgatgactctgactcagataggcataggcgcaggaagggcaggaaggacaggaagagaaggaggagggagacgccaatgtcaccgcaagcggagccatcaccaaagggatgcatctgactgtgacaaaggtggcagtgattatgcagatgaaaagaagcaatcgagcaggcggaggaggcaccgccagtcagaaagcagtgggttggatgaggatgagcggcgtgatccccgaggagcaaagcgatctgaggagaagaacagggaccgcaagaggagctaaagaggagcattgaattggtttatgcatttgagggctcaag

SEQ ID NO: 215189 - DNA, 4650 bp, Zea Mays
atcagagatggtcctggcgatctgcctgctgaaactgtgaaagcttctgaagacaaatcagccgagcgagcgtgcgtgcgtgcgagacaaccaggtccgatccgcccccgccgagccgaggacagcagcgggggctctcggtctcctcctccagatcttgcacccaatccagatctcgcgccctctccgttcctctcctatgtccattccccctcctcggatctaaccactccgtccctctccccgtccccgcgtccggagctgagatccgtggtcatggccggcgctgcaggtgggttcgtcacgcgggcgttcgaggccatgctcaaggagtgcgccgccaaccgcggcaagttcgccgcgctgcagcaatccatccagtcatacctcgatagcatcaagggggctacggcggagggcgcggtcatcacggaggcgctcgcgtcggctgggcgcgtgctcgacggaccgcaggccgagctggtgctgcagccgctccgcctcgccgtcgagaccaagcacgtcaagctcgtcgagcccgcgctcgactgcctccacaaacttattgcttatgaccatttagaaggcgatcctggtttagaaggtggtaaaaactccccaatatttacagacatcttgaacatggtatgtggttgcgttgataacacatcctctgacagtactgttctccaagtcttgaaagtgcttctcaatgctgttgcttcaaataggtttagagttcatggagagccattgcttggggtcattagagtatgctataacattgctcttaatagcaagagccctgtgaaccaggctacctcaaaggctatgttaacccagatgatcagcattgtattcaggagaatggaatctgagcaggtttctgtattgcctgcaagctctgtggttaaagatacaccttcatctatcacaaatgaatctgaaaatggagaaatatctaccgatggccaagatgaggaaaaagttactccgggagatgcattgtctatgaatcggccttctgaagcacctccaacatctgttgaagagcttcagaatcttgctggtggagcagatattaaggtactgaaactggatctcgttgctcttggaactttcaaacgtgtcttaggtattgcattggttccatctaattacaagagatcttttacaggggctggaagctgttctagacaaggctgttgaacttgaagatgggaagaaagtgtcacgtggaattgacctggacactgtgaacataatacagcgggatgcactattgctctttcgaactctttgcaagatgagcatgaaagaagaaagtgatgaagttgctaccaagacaaggctgctatcacttgaactgctccagggattgctagagggagtcagcaacgcattcacaaaaaatttccacttcattgattcggttaaagcatatctttcatatgctcttctgcgagcatctgtcacttcatctccagttgtttttcagtatgcttgcggtatattttcagttctgttgctccgttttagagagagtctgaagggggaaattggtgtcttctttcctctgatagttttaaggtctttggatagctctgatagctccctcagccagaaggctagtgttcttaggatgttggagaaagtttgcaaagatccccaaatgcttgcagatgtgtttgtgaactatgactgtgatcttgagggaccaaatctttttgaacgcacggttagtgcactctcaagaatagcacaagggtctcaaattgctgatactaactccattgtgtcatcccagacagtttctgtaaaaggctcgtctctccagtgtttggtgagtattctgaagtcattggctgtttgggagcaacttcgaagatattccttaaagcaagggagcattgttgaatctcatgaaggggatgcttcaaggagcgtgacaactgatgagatgaagagccaagaggatgttcggaatcagtttgagagagccaaagctcataagtcgacactggaggctgcaatctcagagtttaatcgtaaaccaactaaagggattgaatatttgttgtcaaataaattgatagaaaataaggcatcatctgtagctcagtttctcaagagcaacccgggcctggataaggttatgattggtgagtacttgggacagcatgaggagttccctcttgctgtgatgcatgcctatgttgactccatgaagttttcaggattgaagtttgatgctgcaattcgtgagttcctgaaaggatttcgccttcccggtgaggcacagaagatagatcgcataatggaaaagtttgctgagcggtactgtgctgataatcctgagcttttcaaaaatgcagatactgcttatgttcttgcttatgctgttataatgttgaatactgatgcacacaatccaatggtgtggcctaagatgtcaaaatcagattttgttcgtatgaacactgcgagtgatgcagaagaatgtgccccaaaggagctcttggaagaaatttatgattccattgtcaaggaagagataaagataaaagatgattctcatgatacttcaaaaaccacaaagagacctgaaacagaagaaacaggccgtcttgtcaatatcctcaatttagcccttccaagactgaagtcagctagcgatacaaaggctgagagtgaaaagatcatcaaacagacacaggcacttttcaggaaccagggacagaagaaaggtgtttttcacgttgcacagcaggtggagcttgttaggccaatgcttgaagctgtaggatggcctttgcttgcaacattttctgtgaccatggaggaaggtgacagtaagcctagggttgtatcatgcatggaagggtttcgtgctggtatccatcttactcgtgttcttgggatggacaccatgcgctatgctttcttgacgtccttagtgaggtttacatttttgcatgctcccaaggagatgcgtagtaaaaatgtcgaggcactgaagactcttcttggtttagctgacactgatatggatgctttacaagatacttggaatgctgttttagaatgtgtatcgagactcgaatatatcacttcaaatccttcaatttctgcaactgtaatgctgggatcaaatcaaatatcaagggattctgtagtccaatcgctgaaagagttggctgggaagcctgctgaacaaatctttgtaaacagtgtaaaactgccaagtgattcaattgttgaattcttcaccgccctttgtggcgtttctgctgaagagctaaaacaaacacctgctcgtgtctttagcttgcagaagcttgtagagataagctattataacatggctcgcatacggctggtgtgggctagaatctggtctgtgttggcccagcattttattgctgctggaagccaccacgaggagaaagttgcaatgtatgccattgattcgctaagacaacttggtatgaagtacttggagcgtgctgaattaaacaacttcacatttcagagcgacatactgaaaccctttgtcattttaatgaggaatagtcacaactcaaaaatccgaggtttaattgttgattgcattgttcagttgatcaagtcaaaagttggcagcataaagtcagggtggcgttgtgtattcatgatatttactgcagcggctgatgacgaggatgaatcaattgttgagagtgcttttgaaaatgtagaacaagttatcttggaacattttgatcaagtcgttggtgattgcttcatggattgtgtcaactgtcttattggttttgcaaataacaagtgcactcctcggattagtttgaaggctattgctctcctgcgtatatgtgaagatcgtttggcagagggattcattccaggcggtgctgttaaacctattgatgttgttccagaggccaattttgatgtgtctgagcattactggtttcctatgctagctggtttgtctgatttgactttggactctagaccagaagtcagacattgtgcactggaagtgttgtttgatttgttgaatgaaagaggacataagttctcttctcccttctgggagagtatttttcatcgtgtactatttccaatttttgatcatgtaaggcatgctgggagggatggactttcttcttctggggatgattggcttcgtgatactagcattcattcactgcagttaatctgcaaccttttcaatacattctataaggaggtatcctttatgcttccacctcttctcagtttgctgcttgaatgtgcgaaaaaaacagaccaaactgtcgtttcaattgctcttggcgctttagttcatctgattgaagttggtggtcaccagttcagtgatggtgattgggatacattattaaagagtattagggatgcatcatacacaacacagcctcttgaattgctcaattcattaagatttcagaaatcaaaacaccagcagttactttcaagagaagaaagcaatgcacaaggcaatagttaccttgacagccagggggaaccctccatcagtgacagtaataatggtgagcataatcatccagaggcaggtctgcaaactatcctggagaattcagaagattggaacatgaaaggtttaca

SEQ ID NO: 215190 - DNA, 4017 bp, Zea Mays
cccggccccagctgcttgttatgccgggtgcccgtagcgccgccgtgccgcagacgcgcggacccctgggcccattgccctcgtggccccgtgccgtgctctggcttcctttctgaacggatcccctcccccaccaaaaaaaaaaaaaaactccgacgccttgggccgttggacgcaactcgcgagccccccgaaagcaccgcccgctcccacacccggcacgaggcggaggcacccacacccactccggtcacccaacttgactcgccctccccctacctccgtcgctcttcccgtgaaaccctccaggatccaacgaaaaaggcgaaatctccgaaccacaccgccataatcacacacgccaaccggcggcccagggccggctttcccccctggttccctcctcaaatggcctagcggaggcgggtgtctcttttctttcccctcgcgtcgcgcctcagtgagggcaaggtagagtggcactgggaaagacgcgcgccgtgccgcctcgcaatgcccgctcccgaccgtgccacggcggggggcggtgccgggggccacttccgcggccacgcgcacctcaccaactgcatccacctgcgccaccaccacgcgcacgcgcacgcgggagcgggaggcgcgtcgtcgtcgggccggaggcggagcccggcgtccgcgtcgctgatgcgcgaccttctcgcgctgcagcgctcgcgatcgctccgggacccgtccacgcgccgctccgtcgagtcgtccagggtggcggccgaccccgacgatggcaccgacgacgacgacgacgacgacgccgatctccccgccaagtcccgccgcagcgccggggcgctcaagacgctcctggaccagctagccgagaacccccatccgaagcccggccgccgcccgccccgccggttcaaacgtcgggcaggccgccgcgccgccgctgccagcaagcctccagaccgcgcggccgcgctctccgtcaactccagctcccaggaggccgtctgcggcaacaaatacctgttccatggcggcggcggcggcgacgacgacggcgatggcgtggtggagctgcagcagcatttgccgcaggactcgcgcaacgtctgtggcattccatggaactggtcgcgtctgcaccaccggggcaagtctatcctcgacatggccggccgcagcctttcgtgcggcctctccgactccaagtcggcggcggggcgaaagtccgaagcgcccgccgcctcaggtgtccgtccccttttccccgttaagtccgagaggctggcttcgtcgaccagttcggactcggacgcgctgcccctgcttgttgaggaggctgccacctccggtgctcgcaaacgcattggcgtcatttcttctggaagctactccggagagcttgggattttctctaaccagacaagcgagatggactccgacctgctgtctgagtctcagtcggggcacaagtcactggcctcgcgctcgcagcatggccgtgggcgtcatcgtagcctgacacagaagttcgcaccaaagacgttcaaagacgttgttggccagagcttggtggtgcaggcgctgtccaacgccatcctgaggaggaagattgggttggtgtatgtattctatggtccgcacggcacgggcaagacttcgtgcgcccgtgtctttgccaaggcgctcaattgcctctcctctgagcaccccaggccctgtgactcatgcacgtcgtgcattgctcacaatctcggcaagagcaggagcctgatggagattgggccggttggcaacatcgacatggagggcattgtggacgtcctcgataatgtgatgctttcacctgcaccatcacactacagggtgtttatatttgatgactgtgatactctgccagctgacacttggagtgctatctcaaaagttgtggaccgggcaccccgtcgagttgtgtttatccttgtcagtccaaaccttgaacttcctcacatcatcctgtcgagatgccagaagttctttttcccaaagctgagggagtccgacattgtcaatacattgcagtggatttgcaccagcgagagtctagatgttgataaagatgcaatgaagctaattgcatctcgttccgatggatctttgagggatgccgagatgactcttgatcaactcagtttgcttggacaaaggatttccttgtctcttgtccaagaattggttggtctggtgtctgatgataaactggtcgatttgcttgatttggctctatctgccgacatggtgaacacagtgaagacactacgagacatcacagaaaccggcgttgagcctttagcactgatgtctcagcttgccacaataattactgatattcttgctggttcgtatgcatttactcgagaaaggcccaggagaaagttcttcaaacgtcctaccttgtcaaaggaagatatggaaaaactacgtcaggccttgaaaacactatctgaagctgaaaagcagttgagggtttctagtgacaagacaacctggcttacagctgctctgcttcagcttgctcctgataagcagtacctgctgcctagttcatcaactagtacaagtttgaaccatggtgtgctggttggtccctttcctgataggggtgtagggagggccccagcagttgagaataaaggtaacctggcaggcacgtcttatggggaaaagagaactgttgaacacacagaaaatggtcatgtgttgtcaaccagttctgtcagagcaaatgagggaactaaactcagaaaagcggaaaatgaaatggtctggcaagctgtgcttgagagtatccaatcagatacattgagaaaaatgatggctaaagaggccaggctaaactctatcagccttggaacagaaccaacagtgcaactaataattagctcacatatcagtaagtccaaagccgaaaactacagagctcagattctgcaggcatttgagtccgttcttcgttctgctataatacttgaaattcgatatgaatcaaagaatgatgcaaaaccaggtcatactccatcaatgtttccttaccctgagaatgactcgacactgaggaggtcctttactaaacatagtccactctcttctggagatggatgcaatctgatccccacatattaacagaaggtgaaataattgaagttggaccttctcgcatgcattggcatgctcaaacaaataatgatgttcttgacgtaaatgaaagaagaaaggagaacacatgggaggaagaaacttcgtcatcaccaaaccaagagagcgtgactaatccaaaaggaagaaatgggaacagacagaatcgacagaacagcatagtaagaggaaaggtatctcttgctcatgttattgggagggctgaagcttgttctcagcgaggaggctggtctagacgaaaagctatatcgattgctgaaaagctagagcaagagaatttgaggatggagcctaaatcgagtctactttgttggagaacctcaaggactcgtcggaagctctcttcaattaaggtcaggaatcgaagatcacgcaccatatcaaggctcatattgtgtggaagatgcatttcgaccaaatctccaagatagaagaatttgaatcgtagaatttgcaacctgttaacttagcattcataatttattctgtctgtaccttgtaggctgtagccgtgtcagtttgtagatccttctctctctctctctctctctctctcaattctgtatatttcttgacatgtaaaaaacgacgatagaagtgacatagtaaattcttctttcaaaatgctctgtaatttttttataggaagactagaataaaaactttgtattcggaagtctctgataattgataaatgtccttagtctccatagacactgaacattattttcgcatgattgggctctaatttattacactttccactacagtgccagttatatgatgaataattggaaaaggggggaaaataac

SEQ ID NO: 215191 - DNA, 4659 bp, Zea Mays
gccccagctgcttgttatgccgggtgcccgtagcgccgccgtgccgcagacgcgcggacccctgggcccattgccctcgtggccccgtgccgtgctctggcttcctttctgaacggatcccctcccccaccaaaaaaaaaaaaaaactccgacgccttgggccgttggacgcaactcgcgagccccccgaaagcaccgcccgctcccacacccggcacgaggcggaggcacccacacccactccggtcacccaacttgactcgccctccccctacctccgtcgctcttcccgtgaaaccctccaggatccaacgaaaaaggcgaaatctccgaaccacaccgccataatcacacacgccaaccggcggcccagggccggctttcccccctggttccctcctcaaatggcctagcggaggcgggtgtctcttttctttcccctcgcgtcgcgcctcagtgagggcaaggtagagtggcactgggaaagacgcgcgccgtgccgcctcgcaatgcccgctcccgaccgtgccacggcggggggcggtgccgggggccacttccgcggccacgcgcacctcaccaactgcatccacctgcgccaccaccacgcgcacgcgcacgcgggagcgggaggcgcgtcgtcgtcgggccggaggcggagcccggcgtccgcgtcgctgatgcgcgaccttctcgcgctgcagcgctcgcgatcgctccgggacccgtccacgcgccgctccgtcgagtcgtccagggtggcggccgaccccgacgatggcaccgacgacgacgacgacgacgacgccgatctccccgccaagtcccgccgcagcgccggggcgctcaagacgctcctggaccagctagccgagaacccccatccgaagcccggccgccgcccgccccgccggttcaaacgtcgggcaggccgccgcgccgccgctgccagcaagcctccagaccgcgcggccgcgctctccgtcaactccagctcccaggaggccgtctgcggcaacaaatacctgttccatggcggcggcggcggcgacgacgacggcgatggcgtggtggagctgcagcagcatttgccgcaggactcgcgcaacgtctgtggcattccatggaactggtcgcgtctgcaccaccggggcaagtctatcctcgacatggccggccgcagcctttcgtgcggcctctccgactccaagtcggcggcggggcgaaagtccgaagcgcccgccgcctcaggtgtccgtccccttttccccgttaagtccgagaggctggcttcgtcgaccagttcggactcggacgcgctgcccctgcttgttgaggaggctgccacctccggtgctcgcaaacgcattggcgtcatttcttctggaagctactccggagagcttgggattttctctaaccagacaagcgagatggactccgacctgctgtctgagtctcagtcggggcacaagtcactggcctcgcgctcgcagcatggccgtgggcgtcatcgtagcctgacacagaagttcgcaccaaagacgttcaaagacgttgttggccagagcttggtggtgcaggcgctgtccaacgccatcctgaggaggaagattgggttggtgtatgtattctatggtccgcacggcacgggcaagacttcgtgcgcccgtgtctttgccaaggcgctcaattgcctctcctctgagcaccccaggccctgtgactcatgcacgtcgtgcattgctcacaatctcggcaagagcaggagcctgatggagattgggccggttggcaacatcgacatggagggcattgtggacgtcctcgataatgtgatgctttcacctgcaccatcacactacagggtgtttatatttgatgactgtgatactctgccagctgacacttggagtgctatctcaaaagttgtggaccgggcaccccgtcgagttgtgtttatccttgtcagtccaaaccttgaacttcctcacatcatcctgtcgagatgccagaagttctttttcccaaagctgagggagtccgacattgtcaatacattgcagtggatttgcaccagcgagagtctagatgttgataaagatgcaatgaagctaattgcatctcgttccgatggatctttgagggatgccgagatgactcttgatcaactcagtttgcttggacaaaggatttccttgtctcttgtccaagaattggttggtctggtgtctgatgataaactggtcgatttgcttgatttggctctatctgccgacatggtgaacacagtgaagacactacgagacatcacagaaaccggcgttgagcctttagcactgatgtctcagcttgccacaataattactgatattcttgctggttcgtatgcatttactcgagaaaggcccaggagaaagttcttcaaacgtcctaccttgtcaaaggaagatatggaaaaactacgtcaggccttgaaaacactatctgaagctgaaaagcagttgagggtttctagtgacaagacaacctggcttacagctgctctgcttcagcttgctcctgataagcagtacctgctgcctagttcatcaactagtacaagtttgaaccatggtgtgctggttggtccctttcctgataggggtgtagggagggccccagcagttgagaataaaggtaacctggcaggcacgtcttatggggaaaagagaactgttgaacacacagaaaatggtcatgtgttgtcaaccagttctgtcagagcaaatgagggaactaaactcagaaaagcggaaaatgaaatggtctggcaagctgtgcttgagagtatccaatcagatacattgagaaaaatgatggctaaagaggccaggctaaactctatcagccttggaacagaaccaacagtgcaactaataattagctcacatatcagtcatactccatcaatgtttccttaccctgagaatgactcgacactgaggaggtcctttactaaacatagtccactctcttctggagaaggtgaaataattgaagttggaccttctcgcatgcattggcatgctcaaacaaataatgatgttcttgacgtaaatgaaagaagaaaggagaacacatgggaggaagaaacttcgtcatcaccaaaccaagagagcgtgactaatccaaaaggaagaaatgggaacagacagaatcgacagaacagcatagtaagaggaaaggtatctcttgctcatgttattgggagggctgaagcttgttctcagcgaggaggctggtctagacgaaaagctatatcgattgctgaaaagctagagcaagagaatttgaggatggagcctaaatcgagtctactttgttggagaacctcaaggactcgtcggaagtgtcatctacagttctgtgtccctatttttcacactctactaaatagactaaacaagtgccaagggagaggaatattctgggactcttgattctgaagaggagagaatttgtgtcatctctcatgcatgctaagactctccagcaacgttctctaaatttcatcttctaaaggaatattttatgtcttttacatcactctctaaaagattttgttctctatatttttttcatttccagcaatgtcatctaaattttatcctctatatcaattgtggccacgtcaataagatgcacaacaaatgagcatagtgtatagaggacatgcacaacaaatgagtatagtgtatagaggatgaccctacgccctccattcctagcgggatgtaggcctctcttcaaattttagaggaccttttagtcttttgttggagggaaaaagtaagctacaaccgctatattttagagtttagaactatatacagtttattgatggagctagtctaaattagtatcggccatccttgcgggactttacatctcattgatatggcctgcagaggtttaacaagtgaaaattagcatttgtttatttatactcctctggtgatgacaattttattgatggtatttgccaaaattgtggtcacaacggagcacttagtagtccaaatcatgttcgggagtcagtttctggccaattgcatcagaacatttgaaatcctgcttggcctaaaatagagtcgtgcttgatgattttaccttctccgactaatccaattatttccccgcagctctcttcaattaaggtcaggaatcgaagatcacgcaccatatcaaggctcatattgtgtggaagatgcatttcgaccaaatctccaagatagaagaatttgaatcgtagaatttgcaacctgttaacttagcattcataatttattctgtctgtaccttgtaggctgtagccgtgtcagtttgtagatccttctctctctctctctctctctctctcaattctgtatatttcttgacatgtaaaaaacgacgatagaagtgacatagtaaattcttctttcaaaatgctctgtaatttttttataggaagactagaataaaaactttgtattcggaagtctctgataattgataaatgtccttagtctccatagacactgaacattattttcgcatgattgggctctaatttattacactttccactacagtgccagttatatgatgaataattggaaaaggggggaaaataac

SEQ ID NO: 215192 - DNA, 926 bp, Zea Mays
gcggtctggaggcttgctggcagcggcggcgcggcggcctgcccgacgtttgaaccggcggggcgggcggcggccgggcttcggatgggggttctcggctagctggtccaggagcgtcttgagcgccccggcgctgcggcgggacttggcggggagatcggcgtcgtcgtcgtcgtcgtcgtcggtgccatcgtcggggtcggccgccaccctggacgactcgacggagcggcgcgtggacgggtcccggagcgatcgcgagcgctgcagcgcgagaaggtcgcgcatcagcgacgcggacgccgggctccgcctccggcccgacgacgacgcgcctcccgctcccgcgtgcgcgtgcgcgtggtggtggcgcaggtggatgcagttggtgaggtgcgcgtggccgcggaagtggcccccggcaccgccccccgccgtggcacggtcgggagcgggcattgcgaggcggcacggcgcgcgtctttcccagtgccactctaccttgccctcactgaggcgcgacgcgaggggaaagaaaagagacacccgcctccgctaggccatttgaggagggaaccaggggggaaagccggccctgggccgccggttggcgtgtgtgattatggcggtgtggttcggagatttcgcctttttcgttggatcctggagggtttcacgggaagagcgacggaggtagggggagggcgagtcaagttgggtgaccggagtgggtgtgggtgcctccgcctcgtgccgggtgtgggagcgggcggtgctttcggggggctcgcgagttgcgtccaacggcccaaggcgtcggagtttttttttttttttgcacatcataatattattgaagttccaaaatcatgccaacgtgatgtccgtataataatgtgatccacataattacattggaccccacg

SEQ ID NO: 215193 - DNA, 3640 bp, Zea Mays
ctttctctctccatcttttcacgcccgttgcttgctcccccacgcttgacgctcccccatccctcctccgctgcctttctctcacttcgccgccactcccagtctctctctatctctccactccttacagctagattctagaagccaacaaaaacagacgggggcagagcgtaaggggagaatcgtgctccgggaaagcaaacctcagagaatccacctctcccccaccctctctctctctctagatctacgcaagccgcctcggtatccgcgatcgccaccgcccgcggcggctgatgcgtccgtgctgctgcgcggaggtggcgctgcgctgttagctggcgcgagagttcgtccggcccccgaccgagtgatgggggcggcggggggcggccggtgcgtccgcctcggggcggcgccggtcctcgtcctgctgctgatcgccgctgccacattgccgcggctggcgcgcgcggtcaccgacgccggcgacgtttctgctataaatggactttatgttgcacttggatcaccaaagctgccaggatggtctgctagtgctggagatccctgtggtgagagctggcagggtgtcacatgtaccggctcaagtataacctcaatctaggcagcctggggaacttcacttcaataactgaaataaatcttagcaacaacaatatcggtggaaccataccagaagatctacctgtcacactgcagaatctgtttctctcagataaccaactaactggaagcattccaatgtcattatcagaactccatagtctaacagccatgtcactgaatgataaccatctagatggaaagctaccagatgcatttgattccctcacgggacttgtaaatcttggtccattaccaccttcattgggaagcttgacatcactgactacattgcacatgcaagataatcaactatctggtacccttaatgtcttgcaggatctccccctcaaagacttaaatgtagagaataatatgttttctggaccagttcctccgaagctgctgaacataccaaacttcaaaaatgatgggaatccttttaataccagcatagctccctctacctcaccctcttcaacacctacaggctctagaccaacacaaacaccatcgtcttcttcatccccttcaggatctccgccaccatctagtgcagcatcaaactcttctagtggatctactgctcgaaatagcaactctccatcatccaagaagaacaagtcttcacccctcagaactgttggatatgttcttcttgctattgtactattcatagttctagtgctgttggtaatcttttgcctgtccaagtatcaagaaagacagtctagacgtgattattccacgtctcaattaggtagggtgcaccagagggttgaggagccaaaaagcaagcaagcttcggtgcagtctaaacatgaagccaaaaaaggttcatctgaggttcctgaaagaaagaagccccgagaaataaatttagctgtaccagttgccattgagaagcctcctgaaaagagaaaagagcgtgtaattaatttggaacgaacagaatcagagatctttgctgcagcaccacctccacctccacctccgcccccaccaccaccgcccccaacaccgccaccgccacctccgcctccacgactgccatcaccacctcctgttgaaaaagtaactgtaaatcccattgtacttccagaaaaaagagttagcaccccgccaaggactggtccctcgacatctgcaacatccttttcggtggcatcacttcagcaatatacaaatagttttcaagagcaaaatttgataagggagagtagattggggaaagtgtatttggcagaacttcctgaaggcaaattactggaagttatgaagattgataatgctaatggaagaataccagtagatgactttctagagttggttgctcgtatatcagatattagacaccctaacattcttgaattagttggatattgtgctgaatatgaacagcggttactcgtgtataactacttcagtagaaaaacattacatgatgtactacatgaaggggaggatctagatgaaccattatcctggaatgctcgcctccacattgttcttcatgcagcaaaagccttagagtatctccatgacacctgtgaacctcctgtagtacaccagaattttgaaccagccaacgtgctcctcgacaatagatgctcagtgcgtgttgctgaatgtgggctggcacaattgatggcgtctggttctgttacacagctatcaggccgtatgagagctctactcaattatgaagcacctgaaatccatgaatctgagccttttactcgtcaaagcgacgtatatagtttgggtgtggtgatgctagaacttcttactggtcgtaagccatatgacagttctcgtccacgtgatgaacaacatcttgttcgatgggctaattctcagcttcatgacatggagtccctgtcaaagatggttgatccttctatccgaggagagtgttctgtgatactgttgtcacgttttgcagacatcatcagtcagtgtattcagccgggaccagaattcaggccagcaatgtctcaaatcgtccaagacctagctaggattgtaggtgctagtggtgcggtatcagagtgacagataaagggggaacagtaaacatctagcttgactgtatgcacttgtggagacgccagaacgtttgtttcctttatctaaaaaaaaggtaaaacatctagcctcagtcgtgtggccagtgaagattcatacatcctcagcgcagtgccaggggcactctcagtatttatgttggacgatattgcggctagtgtacatgccattttggagccccatttgcttctggaaaggtgtagtggtactgtggtagtatggcacaaccagtgagatatggcttctcattgttgctagcagatattcctgagctcctctagacatgataatttcacctgcaggcagtgtatctcttgtaactaattccaattttttattactttattattacattatagctagttatgtcaaatatggtgcttttagcttgtcttgagacctatgtttctcctgggaaaagaactggcttgctgattctttgcagaggcaaagcaacctttttctgacctgtacatgaagattctcctccttgaagcgaaagcacctctgctaggtatgcgtggtgtgcttggttcctgacttttcttcgtgtggtttcttcaagatgtagaataagttatgacagtgttcaactatgctgattggggattagataaacttttgtattgatccgttcttaactgatagatggcaccctgtggttgattgcaagcttgatctgtcatgttgcgtcttgtagcatgcactgtcaggttctggatttctggctgttgtctgttgaacacttttttagcttatttcttcttcgtttccccaggttacactggtaacagaaaactcgattctagttaccactgcccaggagtatattttggcttacagttttgtatgcttgaactgatagtatcatcttttgccttttgggctttaagcagggcaaatgctttgtatcacaaaatctaga

SEQ ID NO: 215194 - DNA, 3558 bp, Zea Mays
ggatttttgtcagtctcctccccacctagtctcttgtatccaatacaacctttgccttcattgccgcagttccgtttcacatcccatcctctccatttccaccccctcccatggcctgatttccgagcccccccgccattcgccccgcccccgaatccgccgtctcatcgaacgcccggtgccgtggggagaagcgaggctccggttctttgtttcttggcggccgaaatataagggaatatgattgacgatgaggaaagccaagggattaagaaggtgcatttcagggattcgttctcccagcaccctatagttacctacaagaggcgtcggcagcagaagccacagacgcagcagcaattacggcaaccaccgccatccctacagcagcatccggagccacagctacaggtgaagctggagccaaagactgaagatgtgccggaacagcagtttccgatattgagagcaagggatattggctgggagcatgctgtggatcttgatggaaataaaagacggtggcaatgcaagttctgttctctatgtcgaagtggtggtgtaactactttgaaggctcatctcattgatgacagctgcccaaacgttccaaaggaaatttcaaagaaagtatcaaacttcattgaagagaaaagagcaacacgccttcttttgaataattatgtctttaatgttgatgaggacttcaacacaatacttcaagaagggactgtagaatatgtaaatgaacaacaaccttcaagaaaggctacatatgtgcaaacattatctaagtgtgctattaatgagatagcagcgggaagcaagcaatgtggtgcagaatgtagtggccagccagttgagcattgtgatcagcctgaagagcagtgcacaatggattatggcaggatggatcgattgactagcaataagaaccagattttggacaagaatactgagaattcaaaaaatacaaaggtacacaattaccctgcagtgctaagggacagtgcatgggaacattctctgatatatgagaaagaaaacggacactggaagtgcaagtggtgcagtattgagggtgatcatggtttaactagattgatgtggcatcttgttggatggcagaatcgacctcagtgcccaaatataccaaaggatgttgctgaaaagatgaaggatcaaatgatgtcaaagaaggagcagaaagcgagatcaggtttgtttgacggcaatggctgttgtgaggtgttgtgctcttctaatagttcacaacttgatcagaaccatctcactgcaagaatacatgacagatgttcttcccaggcttttgaccatgctaacagtgaattaaaaggatgcaacatgttatccaatactattctttcacaacagagttccaatcctcaggtgcatcatgaggatcctcaggtgtgtcatgagcaagagaggaaggaggttgccacctcttcagaacctggctgtgagcaaggtcagaggatgcagtggcagtcgcaaaataagccaatgatggaaggacctcatgacaatggattatgtggtgacacaaaccagttggaggaacaaaaaagtggctttggaattagtgactgctggaggtatgttttggatggacaaatgcacttgcctgatgtacaggagggtgctggaattgggacatgcatccgtgatgctcttctctatggttgtgctgaatttggcacagtacctgacaaaatggaaatggattgtgataaaacagtggatgcgaacactgctaagtgccagaatattcttaaggatgttttaagatcggagaactttgctttgttgtgcagtgtactctgcagaactgtacatcaagatggggaaagaactagatattttgattttggtgtgattgattcaaggatgaaaaatggaaattatgggcctgaacctgaattattcgtccatgatctgaaactgttatgggaagatcttaaagtggctggtcaagatattgttcacctagcaaataatctatcaagcctcacagaggactcctatgaaaagctggttggaagagagagaggatcagatgatgatgagctcaatgaagctgtggtggccaggtctgaaccgaaaaacctagttcaaccaaatgcatcggtacccttgacctcacaaggctttaaccaattattggatcaacccgggccttctgatccttctgttgtatacaaggacagtatctgcaaccgatgtgggaaagtagcaggagctggtagcgttctcaaatgttacaggtgcatgctaccttgccacatttcatgcattgaggctactggttcacccatttcaactggaaggtggtgttgtaaaaactgcagcgctggcactaaggaaccagttgaaggagacatggtcttagcccatggcaatccaaattgcttgcatgaaagttgtgtcgtctgcgacagacttgcggcctgcaggtctccaaaatgtgataactcaagagcattggttatttccagcgtggacccagagattgatacatgttactcatgcaagatatgtggaggcaccgaagaggatgagaagaggttcttgatatgcggcaacgtcctctgccgatacatgtactaccacattgggtgcctcaagtccatgcagatctctaccagtgtagagaggggcagcccgtgctggtactgcccgtcttgcctttgccgagtttgtctgtgtgacaaagacgacgacctgaccattctgtgcgatggttgcgacgaggcttaccatatctactgcataacacctcgccatacttcaatacccaaggggcagtggtattgctcatcgtgcagcgtggagagggcagaagaggggatgagacagtacgagaggaggacgctgaagctccaccggaaggaggatgctggactacaaagttggaattttgatggtgtggacctgctgctatctgccgcggagcagctcaggatagatgagcagctggagactcgtacagattagcgtgttgcacctacactctggtccttttgccgtgctaaagtgagtttgttgtttgaagagcagaggcctgcctcaggatcagagctcgggcaagggcagttaacaaaatttgctgcagtcctctcacgaactgatgaaaatacaaggatcttcaaacagcattcgccttttgagatgcgtgctatatgataacatgctgtaggatatttgtttcgtttatctgtctttttgctttgttgcacttgcacctgcttgagaagatacttaactcgatacaccttactggtatccaaactgcaagggatgttcttaaattcaaggaaaatctccaatttgagagagcaagccgtctttgaaaactgcctcaggtttttgttgaggctgttattatgctttgtggcctgaattattttagacatacaaacttattgcttcacgaccttcttctcaagtcggtctagatacttcttggggcaacgtcgaatgctatgtccttcatccttgcagtagtagtaaacactatttgctttgaggtctttg

SEQ ID NO: 215195 - DNA, 3436 bp, Zea Mays
cagtttccgatattgagagcaagggatattggctgggagcatgctgtggatcttgatggaaataaaagacggtggcaatgcaagttctgttctctatgtcgaagtggtggtgtaactactttgaaggctcatctcattgatgacagctgcccaaacgttccaaaggaaatttcaaagaaagtatcaaacttcattgaagagaaaagagcaacacgccttcttttgaataattatgtctttaatgttgatgaggacttcaacacaatacttcaagaagggactgtagaatatgtaaatgaacaacaaccttcaagaaaggctacatatgtgcaaacattatctaagtgtgctattaatgagatagcagcgggaagcaagcaatgtggtgcagaatgtagtggccagccagttgagcattgtgatcagcctgaagagcagtgcacaatggattatggcaggatggatcgattgactagcaataagaaccagattttggacaagaatactgagaattcaaaaaatacaaagatgttgaaaccatgccggaaaagtgagtttaacacaaggaagcacataattattgttgataaaattgggaggcattggaagtgtagatactgtggcatggatgtgtatggtaaaaagtttcagctccattatcatctagctggtgcatttcgtcaggctaagtgtccaaatgttcctagagaagtttttgcaaaagcaagacagcatgttctgacaaagaaaatgctaaaaaagagtaaagctgagcaacagattccttctagtccacatattcttgcccaatctggtgaagaacggcagaacaatgatccattttgtgggaatcagtctcaactgtcaataaacaatgaacctagggaggtacacaattaccctgcagtgctaagggacagtgcatgggaacattctctgatatatgagaaagaaaacggacactggaagtgcaagtggtgcagtattgagggtgatcatggtttaactagattgatgtggcatcttgttggatggcagaatcgacctcagtgcccaaatataccaaaggatgttgctgaaaagatgaaggatcaaatgatgtcaaagaaggagcagaaagcgagatcaggtttgtttgacggcaatggctgttgtgaggtgttgtgctcttctaatagttcacaacttgatcagaaccatctcactgcaagaatacatgacagatgttcttcccaggcttttgaccatgctaacagtgaattaaaaggatgcaacatgttatccaatactattctttcacaacagagttccaatcctcaggtgcatcatgaggatcctcaggtgtgtcatgagcaagagaggaaggaggttgccacctcttcagaacctggctgtgagcaagccaatgatggaaggacctcatgacaatggattatgtggtgacacaaaccagttggaggaacaaaaaagtggctttggaattagtgactgctggaggtatgttttggatggacaaatgcacttgcctgatgtacaggagggtgctggaattgggacatgcatccgtgatgctcttctctatggttgtgctgaatttggcacagtacctgacaaaatggaaatggattgtgataaaacagtggatgcgaacactgctaagtgccagaatattcttaaggatgttttaagatcggagaactttgctttgttgtgcagtgtactctgcagaactgtacatcaagatggggaaagaactagatattttgattttggtgtgattgattcaaggatgaaaaatggaaattatgggcctgaacctgaattattcgtccatgatctgaaactgttatgggaagatcttaaagtggctggtcaagatattgttcacctagcaaataatctatcaagcctcacagaggactcctatgaaaagctggttggaagagagagaggatcagatgatgatgagctcaatgaagctgtggtggccaggtctgaaccgaaaaacctagttcaaccaaatgcatcggtacccttgacctcacaaggctttaaccaattattggatcaacccgggccttctgatccttctgttgtatacaaggacagtatctgcaaccgatgtgggaaagtagcaggagctggtagcgttctcaaatgttacaggtgcatgctaccttgccacatttcatgcattgaggctactggttcacccatttcaactggaaggtggtgttgtaaaaactgcagcgctggcactaaggaaccagttgaaggagacatggtcttagcccatggcaatccaaattgcttgcatgaaagttgtgtcgtctgcgacagacttgcggcctgcaggtctccaaaatgtgataactcaagagcattggttatttccagcgtggacccagagattgatacatgttactcatgcaagatatgtggaggcaccgaagaggatgagaagaggttcttgatatgcggcaacgtcctctgccgatacatgtactaccacattgggtgcctcaagtccatgcagatctctaccagtgtagagaggggcagcccgtgctggtactgcccgtcttgcctttgccgagtttgtctgtgtgacaaagacgacgacctgaccattctgtgcgatggttgcgacgaggcttaccatatctactgcataacacctcgccatacttcaatacccaaggggcagtggtattgctcatcgtgcagcgtggagagggcagaagaggggatgagacagtacgagaggaggacgctgaagctccaccggaaggaggatgctggactacaaagttggaattttgatggtgtggacctgctgctatctgccgcggagcagctcaggatagatgagcagctggagactcgtacagattagcgtgttgcacctacactctggtccttttgccgtgctaaagtgagtttgttgtttgaagagcagaggcctgcctcaggatcagagctcgggcaagggcagttaacaaaatttgctgcagtcctctcacgaactgatgaaaatacaaggatcttcaaacagcattcgccttttgagatgcgtgctatatgataacatgctgtaggatatttgtttcgtttatctgtctttttgctttgttgcacttgcacctgcttgagaagatacttaactcgatacaccttactggtatccaaactgcaagggatgttcttaaattcaaggaaaatctccaatttgagagagcaagccgtctttgaaaactgcctcaggtttttgttgaggctgttattatgctttgtggcctgaattattttagacatacaaacttattgcttcacgaccttcttctcaagtcggtctagatacttcttggggcaacgtcgaatgctatgtccttcatccttgcagtagtagtaaacactatttgctttgaggtctttg

SEQ ID NO: 215196 - DNA, 1378 bp, Zea Mays
aaagggacggcgtgcgtcgcgaactggtgctccggcgggcagaccacgcggtacgtgagttccaccacagagcacaggggcggaacacacgggcactagcggcggacgcgtgtggccggggatctagatctcccatctcctccaccacaccaccaccaacgcgcgcgcctcgcctcgtctccctccagtccaaaccgccgtcgaccgccttgcccccgactgtcgcggcgcccgcactcccacccgctgctgccggatcccctgcccctaccgtacggtctgcccgctttcaccgcccgcccgcccgccgccgccagcctagctggggtcgggtggagatccaccaggaaaagagggtgctctcttctcctcgtgcgggtgttgtaattttgtcaagccggaagggcagcagtacttgtagagttgttccaccatggccaatgatggagacgatggacaaagccaggattatctcttcaaaattgtcctgatcggggattcctctgttggtaaatcgaacttgctagcaagatttgcaaggaacgagttctacccaaactccaagtccactataggagtggagttccagacacaaaagttggtaatcgatgggaaggagattaaggctcagatatgggacactgctggacaagagcgctttcgagcagtgacatctgcttactaccgaggcgctgtgggagctcttctcgtctatgatattagcaggcgtcagactttcgacagtgttggtcgatggctcaatgaactacacaatcattctgatatgaatgtcgtcacgattctggtgggtaacaaaaccgatctgaagcatgcgcgtgaggtgagcaccgcggaaggacaagcactggccgaggctcagggcctcttcttcatggaaacctcagctttggattcgtcgaatgttgcagcagcttttcaaactgtggttaaggagatctacagcatactaagcaggaaggtgtttcagtcactagagcagaagaaaagcgagctgcagtcgctaagcagcgggaaagccgtggtgctgcagggtgaagccaaccaaacaagcagtggtgggaggtggtgctgttcctcgtgacctctatggagggcgatcggattgtgagacattcgggtgtgtaaccctgtagtccgatttgtgaaaagttgcttttcccccatgttcttgttctaaaggtaagctggcgtggctgcttgtacgaaagctggtgttttccgtcggaggaaatcaatgtatagttcgattgatccttgggaggtgtcgatgatacacatgattgtgtaaagagaaaaagcgcgaccaacttgactgttgcgtcattctacatcattctagtcctagaaaccgttcttt

SEQ ID NO: 215197 - DNA, 1303 bp, Zea Mays
aaagggacggcgtgcgtcgcgaactggtgctccggcgggcagaccacgcggtacgtgagttccaccacagagcacaggggcggaacacacgggcactagcggcggacgcgtgtggccggggatctagatctcccatctcctccaccacaccaccaccaacgcgcgcgcctcgcctcgtctccctccagtccaaaccgccgtcgaccgccttgcccccgactgtcgcggcgcccgcactcccacccgctgctgccggatcccctgcccctaccgtacggtctgcccgctttcaccgcccgcccgcccgccgccgccagcctagctggggtcgggtggagatccaccaggaaaagagggtgctctcttctcctcgtgcgggtgttgtaattttgtcaagccggaagggcagcagtacttgtagagttgttccaccatggccaatgatggagacgatggacaaagccaggattatctcttcaaaattgtcctgatcggggattcctctgttggtaaatcgaacttgctagcaagatttgcaaggaacgagttctacccaaactccaagtccactataggagtggagttccagacacaaaagttggtaatcgatgggaaggagattaaggctcagatatgggacactgctggacaagagcgctttcgagcagtgacatctgcttactaccgaggcgctgtgggagctcttctcgtctatgatattagcaggcgtcagactttcgacagtgttggtcgatggctcaatgaactacacaatcattctgatatgaatgtcgtcacgattctggtgggtaacaaaaccgatctgaagcatgcgcgtgagcttttcaaactgtggttaaggagatctacagcatactaagcaggaaggtgtttcagtcactagagcagaagaaaagcgagctgcagtcgctaagcagcgggaaagccgtggtgctgcagggtgaagccaaccaaacaagcagtggtgggaggtggtgctgttcctcgtgacctgacacgaggactgcagctatggagggcgatcggattgtgagacattcgggtgtgtaaccctgtagtccgatttgtgaaaagttgcttttcccccatgttcttgttctaaaggtaagctggcgtggctgcttgtacgaaagctggtgttttccgtcggaggaaatcaatgtatagttcgattgatccttgggaggtgtcgatgatacacatgattgtgtaaagagaaaaagcgcgaccaacttgactgttgcgtcattctacatcattctagtcctagaaaccgttcttt

SEQ ID NO: 215198 - DNA, 1527 bp, Zea Mays
ttgaatcaatgtcgtgaagagtcaaaacaatataccactcttactcataactttacatagataccctccgtgcggatacgggataccaactatactttgcttccaattgactgcgatgcttctgttcaagctttctttcgttggagacatgctataagttccaacttttgctcaagccgatgctggaatatcttcctgttaaattccttccttccaaagggggtgttgtaattttgtcaagccggaagggcagcagtacttgtagagttgttccaccatggccaatgatggagacgatggacaaagccaggattatctcttcaaaattgtcctgatcggggattcctctgttggtaaatcgaacttgctagcaagatttgcaaggaacgagttctacccaaactccaagtccactataggagtggagttccagacacaaaagttggtaatcgatgggaaggagattaaggctcagatatgggacactgctggacaagagcgctttcgagcagtgacatctgcttactaccgaggcgctgtgggagctcttctcgtctatgatattagcaggcgtcagactttcgacagtgttggtcgatggctcaatgaactacacaatcattctgatatgaatgtcgtcacgattctggtgggtaacaaaaccgatctgaagcatgcgcgtgaggtgagcaccgcggaaggacaagcactggccgaggctcagggcctcttcttcatggaaacctcagctttggattcgtcgaatgttgcagcagcttttcaaactgtggttaaggagatctacagcatactaagcaggaaggtgtttcagtcactagagcagaagaaaagcgagctgcagtcgctaagcagcgggaaagccgtggtgctgcagggtgaagccaaccaaacaagcagtggtgggaggtggtgctgttcctcgtgacctgacacgaggactgcagctatggagggcgatcggattgtgagacattcgggtgtgtaaccctgtagtccgatttgtgaaaagttgcttttcccccatgttcttgttctaaaggtaagctggcgtggctgcttgtacgaaagctggtgttttccgtcggaggaaatcaatgtatagttcgattgatccttgggaggtgtcgatgatacacatgattgtgtaaagagaaaaagcgcgaccaacttgactgttgcgtcattctacatcattctagtcctagaaaccgttctttcattttgaattactccgaacgtagacatctataagtaccagacaccgtgctttcgccagtcttaggatctgtctggcacggtaaagggattgtgttgggttttcattaagagaaaaatatacattaaattttgtcaacttcaacattggtggtctctatcctatgatgatcaacttcgaacgtagtgtttggttgaggagccaagtagaacggagtcgttccatctttgattctaggaatggagccgctctgttctgtgtttggtaatttggaacggagcggttatgtt

SEQ ID NO: 215199 - DNA, 1088 bp, Zea Mays
ccggtcgaacctggcgccgcccacccgccgtctgtctcgctgctccccatcgctcttggcctttcgtcgtgactcgctccctccccgactccctgcatcgctccccatcccatcttgtcctggacacctgggaagcctccttctgttctttttcgtttcattcttggccacagacttcacatgcccacaaccccatggaggagaaaccagactaggaccaatacccatcaattccttcagtgttttacgccggtcaccgtggagctccgtgtggtggggttcggcaaggaggtggtgctaaagcagtggtggcggatgcgctggagacttcgcctggccatgctactccgcctagaagcgcccacatccggtcgtcgccccattcgctggtgccgcgctccgatccaccccgcccctattccgcctaggctgagctccgcctccactgtagctccgcctcaacgtctggcccaaagtggtctttgccacgttcttgaactcccccaacaccacgacggggtgttcactatgcttatggatgcaaatcgtataaatggtataaaatatctctaaaggatatgatgtccaatcttttttcggagggttactgctgagctgctaaaacaagcgctaacagggattatggtactacctctgttcataaaaaggatacaaataccaatactccaaaggtaataacatatagctcactatttttttgtgattcatcaacatgttgaagtaagaacccttggcatcaaagaagaaacacataatgctttcaacgcgcgcgggcgcgcatcagttactagttcataattcacacgcaaaaaaagccacgaacgggaggactgatccttgtgaagcaaaaagggagaaccggctacacgacatttgcaacgcgcgggaaactagttgggatacacttttctatgatacccaaaaaaaatgagagagatttgccttgaattttatagggaataatagtcattgtacgacaactagtagagactattattgcttcgtgctcacgaggtttcttaggaatcatgcaatgttcttgagcctttcatgtttaaaaaaattag

SEQ ID NO: 215200 - DNA, 2092 bp, Zea Mays
ctcctcaatcaaatttggaaccagtacagggtctttacaagaaaacgaccgataccgtctccgcctttccttccttttgcgctagcttccacagcatcaccaccgccgccccagctcgcttccctccccgctacacggacacggccgctcagcgctcaccaccgcttccatgctcctcgcctcgtctcccgctcgcgagacgtagctccagatcctctcccccacccacggcagcaccgcattaccctcagatccacccccgcgagcctcatttcagatccacccatgcgcctcccggtccttttcgccctgcagctggtcgccttggcggcggcagcttcggcggccgaggccgcggcgacgttctcctcgaggatggtgcaccgtctgtccgacgaggcccggctggaagcgggcccgcgcatggggttgtggccgcagcgcggaagcgggggctactaccgcgcgctgctgaggagcgatctccagcggcagaagcggcggctcgcgggcaagaaccagctcctctcgctctcaaagggcggcagcaccttctcccccggcaacgacttaggctggttatactacgcttgggtggatgttgggacgcctactacctcctttttggttgcattggatactggaagtgacctgttctgggtaccctgtgactgtattcagtgtgcccctttgtctagctaccgtggaaatctggtgctccgtcgtaaatggagcatctattatgcaggatagagatcttggaatatacaagcctgccgaatcaacaacaagtcggcatcttccttgcagccacgagctatgtcaaccgggttcaggctgcacaaacccaaagcaaccttgcacatacaatattgactacttttcagaaaatactaccagctctggtttgctaattgaggattccctacacttgaactccagggagggccatgcaccagtaaatgcttcagttattattggctgtggtcgaaagcaaagtggtgactatctggatggcattgcaccggatggactccttggccttggaatggcagacatttcagttcccagtttccttgcaagagctggactagttcggaattccttctcgatgtgcttcaaggaagatagttctgggagaattttctttggagatcaaggagtgtcctctcaacaatccacaccgtttgttcctctgtatggcaaacttcaaacttatgctgttaatgtcgacaaatcttgtattggacataaatgtcttgagggttctagcttccaggctttagtcgatagtggaacatcatttacttctcttcctcctgatgtttacaaggctttcacaacggagtttgacaaacaaattaatgcttcaagggtgccttacgaagacagtacctggaaatattgttacagtgctagtcctcttgagatgcctgatgtgccaaccataatcctggcattcgctgcaaacaagagcttccaggctgttaatcctatcttgccatttaatgacgaacagggagcgcttgccaggttctgcttagctgtactgccatcaacggaacctattggaattattggccagaatttcctggttggataccacgttgtcttcgacagagagagcatgaagttgggctggtaccgctctgaatgtcgcgacgttgacaacagcacgaccgtgccgctgggcccatcgcagcacggcagttcagaggacccgttgccgtcgaacgagcagcagacttccccgcccgtgacgcctgcaacgacaggcacggctcctccctccagtgcaacgacgaaccgacagatgctctttgctagctcttacccgttgctgtttctgacaatgtccactgtgttcttcatctcatgagcaactgataatctgatatgctggtaatcgatagccctctgtatattgtatgtgctttatatgtggtgccttttgctctatttttttttgaggaaacagtagggaactaaggccgatccctactgaaatagaattaaaccaaaacaaacaaaagtacagaacggtacagcacaggttcaggagacaaaaaaaggagactaaggggaagtgttt

SEQ ID NO: 215201 - DNA, 3754 bp, Zea Mays
aatttaacaaattcctctcccgtcccctttcccttcggggatggtattcgtcgtcttggcttcatcctctcgcccgccgtctcgactgtagcaagcggggctgctgtccgccgcattcaggagccatgcgtgaggggatgagggagagggacagaggcgggagcccggatgcgtcaggtcctccgcccttccgcggcccggcgtacaagacgaagctgtgcgcgctttggaggggcaggggcggctgcccccgccccaactgcggtttcgcccacggcgaggctgagctccgaaggccgccccctcgcgcctccttccagcctcgcccacgacctgggctttgcatcaccttatcatcttcttctgggttttaccgtacccaaaatgttgtcgattccatgccaatttgtcggattaggttatttggatggtttcccgagcaagagacaccagtgcgctcttcttcaaagagatgcatattcggcctgtttattcatcgagttattgggatgattggttgatgactggagacacagcccaatgtttgaatgctagtggtgcagcaaacactgacagatagcaatgtgatctgaatcatatgatctcaggaggagagttagcgaacagggaagatagttgcaactgcaagaattatataatgttaacaatttgcaagtgcatcctttgaggatgtacaaatggggttgcagatgttaatggctgacaattctgggaggttttatagtttctacccgttgctgagaagactctacccttcaattgcataacagtatgatggtttggcacctgaatcttttctcagtttgtgttatatcttctcatcttatggtgcatatacaccatgattcctgtgtagtggtacttgaactgagtgcttgctgccgcagaacacaaaaatcatcaacaagcctgatttcattgcagataatcttggcattgctggttattattttgattttacaatagatatctcatggacagatttgttgagattgactgcttccagaggatggcacatcttatttccatcctggcctttgtttcagttggcaatcggtcatttatgatacttgaatgcttaacctgcctcagaagaactgaacatggaagatattatacattttatcttctcgatgggattcatgctatggtcagtgagctttaacaatgctattagaagcttttgcaactaattgaaacatgccgtttgaatacactgcatcaagctatatctgtggctttattgttacctgcacttcaagtatcatcttggaacaagatttttggcagtcatatggataacatctgatcaaatgaaattaaatttatttggtgctattcgagttttggaagattttacgtcatggtgattggaacatgacatctaattaattttggtgattccatccaaatttacttcaggtgattcgtattagaagtactggatcaattctaagtggttaatcatgataatcatgtattggcatctactctttcattagttgtattggctcgtctgtgtttgtggtctatggtgtattggtgttattgtgggccctctaatttttgagctaattgaataaccatatggctcaaggttgtggtaaggttaatgggtttctgtgttgccttgtatctatgcagccccatctaactcttgttctttgatggcataatgtttttttgggtaaatcttccaccttcctgatttgtagggagaagggattacagagatcatgagtttagactcaggcctgatagaagacactcaccccatgggaggtattcccctgaaagagatatcaggcgtcgttcatttcatgataagagaccaagttctgaagataggggtaatcactttttctgtgcacatttgtgccaataaaaatatttgccactgtccattgtatcttctaactactccctgagatttgatttgcaggatctagtcattcaagatcacctattaggaagaggtatgtaggaacgaataacaattattagggattcaagatctagtcattagaagtacttaaatttgtttattacatcgggctagtttatcttcatgtaccatcatgacttaatccctgctaatttattggtttcctaattttttatatgtgcgagctgcaatgttaagtttgtggtttatgagaccttttattctattgttcaaccatgatctaccatggagtctcattaccatccatttataactttggggtggggttgtagccgtgtagggtcatgaatgttggtatcaccaaggagggttttgatcttatgttaggcatgtgatctgtatacatgctttttttgcaagtttatggcttgcttgtgaaattgcctatctttatgtttatgttctatggctgctcagtgagagaaaacatagtaaaagtcctgatggtggagaaaccgattcatccgtaagtgttcgaagtcctgataacgaagacagaggaaaagatgaaaggtacttaagcagtgatgagaaaaatggtcatgaagatcaactgaaacaaatgcatctggacatggaagcattgcgtgaagacaaatcaaagctggagatgatattagagaagaagactgatgaagagcacaaactttgtagcagagtagaagatcttgaattgcaattgaacaaagagaaagaagattgccaaaggatgtcctccaaaaccaaaaagctaatcaaagcacatgggcgttatataaaagcacaggaggatttaaagaggtctcaggctcgctttgagaggctagcagatttgcttgcttcagatattttgaagccttgtaccaaggagcagggttccatagggattactgccaatgaagatccatataatgctaatgaaatgagcccaagtgaccaaagacaaaaccatgtttcagcatcgagaaaaagacttatttccctcccaacaagtgaagaagcaaaaactggaaagagacagagagagaatggtgatgatatgatcccaacatcagagaactatagacctgaagatgccctagaacatctccaagatagcaagggaactgatctaccagaatcatttacagtgaagaagttaagggagggtgacaacgatgatgtaggaaacattgtctcttcaagcaatatttttgcggataggtacacgggcgatgatgaggaagttgatgttgattagtgagcggatgctgtcggtggttgataatgatttgagctgtaggaagctatctcaacagacgacatggatgccagcttctaaaactacttttatgccttttgcattgggtaataggggctggtatatctggtagagctatttatgtgcttagacttgagttgtgatgctgtcaaacatatctatacttctttttcttttgtgtctcctggggctcgaagaggatactaatctgtgctcgcctcatgtattattcttagccagtatgagtattatttgagacttttggattggttgtgttattccgcctcagcctcaggttacaaaccatgcatccatatccatctacctatcaggaaatgcatgcgtgatccttaaacttaccgaaggtcttctaagtctgtattctgatactagaggttcatagagtttgtggacttatgttcaaagtgcacaaaaaatgtttacaagtttgacttgtcaacatggaatctcaacattgccatgctatgtacttcatgttagcgaccttagggcgttctgagtatttt

SEQ ID NO: 215202 - DNA, 2690 bp, Zea Mays
aatttaacaaattcctctcccgtcccctttcccttcggggatggtattcgtcgtcttggcttcatcctctcgcccgccgtctcgactgtagcaagcggggctgctgtccgccgcattcaggagccatgcgtgaggggatgagggagagggacagaggcgggagcccggatgcgtcaggtcctccgcccttccgcggcccggcgtacaagacgaagctgtgcgcgctttggaggggcaggggcggctgcccccgccccaactgcggtttcgcccacggcgaggctgagctccgaaggccgccccctcgcgcctccttccagcctcgcccacgacctgggctttgcatcaccttatcatcttcttctgggttttaccgtacccaaaatgttgtcgattccatgccaatttgtcggattaggttatttggatggtttcccgagcaagagacaccagtgcgctcttcttcaaagagatgcatattcggcctgtttattcatcgagttattgggatgattggttgatgactggagacacagcccaatgtttgaatgctagtggtgcagcaaacactgacagatagcaatgtgatctgaatcatatgatctcaggaggagagttagcgaacagggaagatagttgcaactgcaagaattatataatgttaacaatttgcaagtgcatcctttgaggatgtacaaatggggttgcagatgttaatggctgacaattctgggaggttttatagtttctacccgttgctgagaagactctacccttcaattgcataacagtatgatggtttggcacctgaatcttttctcagtttgtgttatatcttctcatcttatggtgcatatacaccatgattcctgtgtagtggtacttgaactgagtgcttgctgccgcagaacacaaaaatcatcaacaagcctgatttcattgcagataatcttggcattgctggttattattttgattttacaatagatatctcatggacagatttgttgagattgactgcttccagaggatggcacatcttatttccatcctggcctttgtttcagttggcaatcggtcatttatgatacttgaatgcttaacctgcctcagaagaactgaacatggaagatattatacattttatcttctcgatgggattcatgctatgggagaagggattacagagatcatgagtttagactcaggcctgatagaagacactcaccccatgggaggtattcccctgaaagagatatcaggcgtcgttcatttcatgataagagaccaagttctgaagataggggatctagtcattcaagatcacctattaggaagagtgagagaaaacatagtaaaagtcctgatggtggagaaaccgattcatccgtaagtgttcgaagtcctgataacgaagacagaggaaaagatgaaaggtacttaagcagtgatgagaaaaatggtcatgaagatcaactgaaacaaatgcatctggacatggaagcattgcgtgaagacaaatcaaagctggagatgatattagagaagaagactgatgaagagcacaaactttgtagcagagtagaagatcttgaattgcaattgaacaaagagaaagaagattgccaaaggatgtcctccaaaaccaaaaagctaatcaaagcacatgggcgttatataaaagcacaggaggatttaaagaggtctcaggctcgctttgagaggctagcagatttgcttgcttcagatattttgaagccttgtaccaaggagcagggttccatagggattactgccaatgaagatccatataatgctaatgaaatgagcccaagtgaccaaagacaaaaccatgtttcagcatcgagaaaaagacttatttccctcccaacaagtgaagaagcaaaaactggaaagagacagagagagaatggtgatgatatgatcccaacatcagagaactatagacctgaagatgccctagaacatctccaagatagcaagggaactgatctaccagaatcatttacagtgaagaagttaagggagggtgacaacgatgatgtaggaaacattgtctcttcaagcaatatttttgcggataggtacacgggcgatgatgaggaagttgatgttgattagtgagcggatgctgtcggtggttgataatgatttgagctgtaggaagctatctcaacagacgacatggatgccagcttctaaaactacttttatgccttttgcattgggtaataggggctggtatatctggtagagctatttatgtgcttagacttgagttgtgatgctgtcaaacatatctatacttctttttcttttgtgtctcctggggctcgaagaggatactaatctgtgctcgcctcatgtattattcttagccagtatgagtattatttgagacttttggattggttgtgttattccgcctcagcctcaggttacaaaccatgcatccatatccatctacctatcaggaaatgcatgcgtgatccttaaacttaccgaaggtcttctaagtctgtattctgatactagaggttcatagagtttgtggacttatgttcaaagtgcacaaaaaatgtttacaagtttgacttgtcaacatggaatctcaacattgccatgctatgtacttcatgttagcgaccttagggcgttctgagtatttt

SEQ ID NO: 215203 - DNA, 1934 bp, Zea Mays
tgcttcagggagaagggattacagagatcatgagtttagactcaggcctgatagaagacactcaccccatgggaggtattcccctgaaagagatatcaggcgtcgttcatttcatgataagagaccaagttctgaagataggggatctagtcattcaagatcacctattaggaagaggtatgtaggaacgaataacaattattagggattcaagatctagtcattagaagtacttaaatttgtttattacatcgggctagtttatcttcatgtaccatcatgacttaatccctgctaatttattggtttcctaattttttatatgtgcgagctgcaatgttaagtttgtggtttatgagaccttttattctattgttcaaccatgatctaccatggagtctcattaccatccatttataactttggggtggggttgtagccgtgtagggtcatgaatgttggtatcaccaaggagggttttgatcttatgttaggcatgtgatctgtatacatgctttttttgcaagtttatggcttgcttgtgaaattgcctatctttatgtttatgttctatggctgctcagtgagagaaaacatagtaaaagtcctgatggtggagaaaccgattcatccgtaagtgttcgaagtcctgataacgaagacagaggaaaagatgaaaggtacttaagcagtgatgagaaaaatggtcatgaagatcaactgaaacaaatgcatctggacatggaagcattgcgtgaagacaaatcaaagctggagatgatattagagaagaagactgatgaagagcacaaactttgtagcagagtagaagatcttgaattgcaattgaacaaagagaaagaagattgccaaaggatgtcctccaaaaccaaaaagctaatcaaagcacatgggcgttatataaaagcacaggaggatttaaagaggtctcaggctcgctttgagaggctagcagatttgcttgcttcagatattttgaagccttgtaccaaggagcagggttccatagggattactgccaatgaagatccatataatgctaatgaaatgagcccaagtgaccaaagacaaaaccatgtttcagcatcgagaaaaagacttatttccctcccaacaagtgaagaagcaaaaactggaaagagacagagagagaatggtgatgatatgatcccaacatcagagaactatagacctgaagatgccctagaacatctccaagatagcaagggaactgatctaccagaatcatttacagtgaagaagttaagggagggtgacaacgatgatgtaggaaacattgtctcttcaagcaatatttttgcggataggtacacgggcgatgatgaggaagttgatgttgattagtgagcggatgctgtcggtggttgataatgatttgagctgtaggaagctatctcaacagacgacatggatgccagcttctaaaactacttttatgccttttgcattgggtaataggggctggtatatctggtagagctatttatgtgcttagacttgagttgtgatgctgtcaaacatatctatacttctttttcttttgtgtctcctggggctcgaagaggatactaatctgtgctcgcctcatgtattattcttagccagtatgagtattatttgagacttttggattggttgtgttattccgcctcagcctcaggttacaaaccatgcatccatatccatctacctatcaggaaatgcatgcgtgatccttaaacttaccgaaggtcttctaagtctgtattctgatactagaggttcatagagtttgtggacttatgttcaaagtgcacaaaaaatgtttacaagtttgacttgtcaacatggaatctcaacattgccatgctatgtacttcatgttagcgaccttagggcgttctgagtatttt

SEQ ID NO: 215204 - DNA, 4277 bp, Zea Mays
atgccgacatatgggatgccgcctccggactttgcactgccaatgccaatgttggcgcctccacccccgcctccgcctccgtcacaattccctatgggatttcagacaccacccgcttcagttgccgcacctggagatgggtctggtcaggacgacacaacacattcgtgggtgaacaccattttcaacacgcagagtccagccggaggagctaaaaaaagggtgatcctcttcatggctccgacgatcctaggcttggttcccccaatcctttcccttgcatgcatgtcgcaaagctccatgcaggtgccagtagtatctgacaggttgttactttctataatctcagtggacacaggcaaaacaattgccaggtccagtaaagctgccgctcgaaatggaatttgtcaatggcctgactcgatcctggaatcaatatggttttctcgagatgaagtgtcaaaagaatatgaagattgtcgatgtaggattgttgtttccatgggatcaacaagaggtgctattctcggggaagtttttctaaacttgaataactatctgagttcggatggctcgactgcaatctcattgccattgaagaaatgcaattcgggaacaattttacagcttaagattcaatgccttggcacaaagtctaaatcaagatggtcaaatgtatttcaggattcaagcttctcaccatctcaaaggaatgattctgatgggggattgtacatagagaggcaagatactgctaattcttttattgactatatctgtgtgggtcgtgctgatctaattaatagatctaatgattcatctttcagttctcaaacttcaggtcaaaacatgctgcaggagagtattgatgagtcatccttaagtggtttcaatcatttgtcgtcaggggcatctggttcatccaaagatcttcttgatgccgctgaagaaacaattgaagaacttcttatcgaggcacaaatgtgggagagccattatcaaaaattgaaaattgatctagagaaattacagaaggagtctgatgaaaaatccaagaatcagactgagatattgctagaactttctgcttcacaagccgaacaagagtcgttgagacaagaaattgaagaattgaaattgtctttgaaggtggctactgaacgacaaacagttggtggaatttccaaatctggtgatgcaatagatgtccaatttgagctaaaagatgaggtacactttttgagggaatcaaatgaaaacttaacaatgcaactgaagaagagtcaagatgcaaatatagagcttgtttctattcttcaggaactggaagaaacaatagaggcacaaagaacaacaatctccaatttcactcaaatgagtaatatgattgatcaagatatacccacgaatgcattatcagctcaagaggatgcagagtgggaaagaaagatgtcattgaaagaagatgaaatcatagcattgagggagaaattggatcgtgtactcagcatagaaaatccaggtggtgttggttctgatgctatatatcttgaactggaaaaggagaatgattttttgaaggttaaaatgcaagatcttgagaatgattgttctgaattaacagaggaaaatttggagcttatacacaaattgaaagaagttagtggggtcgaagaacaagattcttgcctttctgatattgaggtaatgttaaatgcgacaggtctttctgggacttcaaaatctagagcaaaatacctagaaagaaaatgtgctgaccttgagcagaagatgttgaattttcaatcggagtctagagaactagaagagaagctcaaaaaaagccacgaggatctaaaaggacaaactcttgaattatctgagcttagagagaacctaagtagattccgtgctatggagctagagagaggggaaatcaatttttcaagaggctaccagttaagaagtgaagaactaggagatattgaaaccgaactgaaactgttgaagagtactgttcaactcaaagaaaaagagatcgaaggattacaacattctaaactagaaatggaaacctttatagatagtgtacttggaccaaagatacatgagcttgaaatctacaaagtggaactagagttgcatatatcaaggctagaagatgaaaaaatagaattattggagtccatttctggaatggaggttgagttgactaatttgacaagtgagtacgagtcatgtatagttcaaatggatgattctagaacaatgatcatagatctcaaggataaagtagaaaggaatcaaatggagttggaagctcaaaaggtggaattgaagaaaaaacaactagaatttcagaaaatatttttagaggcacaagatgattcagaggctctaagaagattgaatgctaaactgcaggctaaagttcataatcttactgaagaatacaattctcttcaagaattaacggatgatctaaagaaggaaaagttggaattacacagttttgctaaacaattagagcagaaattggagcactcgaaaagaaggaccacagatttttgtacaactgtggacttactagaggtaaaactttcttcgattcagaaagatatatctttaaaagagcaatcttttctcttggaactagacaatatatttcatgagcacaaggatcatgaagaaaagataaatcgtgcacatttccttttaaacaagattgataaagaaaaggctattgagatagagaatcttgagagggaggtcatcagccttactgcgcaactatcttcaacacatggggagcaagcaagttccatggtggatactattcgtgaggcctccatccttcgagcagacaaggcaaaacttcaggctaatcttcatgatgtaaatgaacagttgagacattatgaatctctactagaagatatacacaaggagtcaaaaaggaagattaaatcccttaccgattcactcaatgtatcgaaacaaaatgaagaaatgctgaagatagatgccgaggctgtcagaaggctgatggaagctgctaaatccaatgaagaaaatttaagaataacttcaaatgaactagaactgaaatataaatctagcgattatgagaaacaacaaataatggaagaaaattatggattaaaaattcaagttcgaaaaatagcaggtgtccaagatgaacttttggaagtgcaaagttcccttgatgaggctcaatttgaaaaggagagactagaagggatacttcggttgatatctgaagaatgtgatgaactaaaggtgcaaaatgccatgttaacagacaaagtctcaatgatgcaggatacttcaaacaatatcattgaagaaaaacaaactaaaacatccatgcaaacaaagatgagtaccataaatgaggggaacaatgatctagctactgataacagaggttgttgtctagttaatgaggaaccagacctgcaagtaaaggtccaatcattggaaagcggacttgccgaagttctagagaaaaatagcatgtatatgacacaggtgaagagccccactacagagcagcaagctgggagtaggaatggagaggggaataacgatgacaaaatagcacacctagaatcagaactaaaatacatacaagacaagttattaaacatgagcttgcagtatgcggaagtagaggcccaacgggaggaattagtgatggagcttaaaaatgtgaatgcaaagaaggggggacggtggttctagcaattagtgacagagctcaaaagctggatgccacagtcatgaggcccacatgccacagcacagcgaaggggctctgtcattcatatcaggaagaagagaacacaccttccactcgggaaacatgttgtgaaaactgccagaggcatccagatcttggaggtcaccatcgcgagaattgagcaagcgcagcaagaaccacaggtgttttgtagcctcagaaacaaatcagacaatgaatattttgagaacttgggatgccctggtcgtcttgagctgccaatattatacgactatgttggctagagtgaccaatcatgtttatatgatcatacaaatgaccctgcctttttatactacgcacaacatagctgctgatagacgtagctcctcctgaactgtgcctggaaagaattagatatatggtattaatattatgtgctagttctttttactctgcaaagaacttgtaggagacttttgtggaggtaacatgtatgcatgatttgtcttta

SEQ ID NO: 215205 - DNA, 4292 bp, Zea Mays
atgccgacatatgggatgccgcctccggactttgcactgccaatgccaatgttggcgcctccacccccgcctccgcctccgtcacaattccctatgggatttcagacaccacccgcttcagttgccgcacctggagatgggtctggtcaggacgacacaacacattcgtgggtgaacaccattttcaacacgcagagtccagccggaggagctaaaaaaagggtgatcctcttcatggctccgacgatcctaggcttggttcccccaatcctttcccttgcatgcatgtcgcaaagctccatgcaggtgccagtagtatctgacaggttgttactttctataatctcagtggacacaggcaaaacaattgccaggtccagtaaagctgccgctcgaaatggaatttgtcaatggcctgactcgatcctggaatcaatatggttttctcgagatgaagtgtcaaaagaatatgaagattgtcgatgtaggattgttgtttccatgggatcaacaagaggtgctattctcggggaagtttttctaaacttgaataactatctgagttcggatggctcgactgcaatctcattgccattgaagaaatgcaattcgggaacaattttacagcttaagattcaatgccttggcacaaagtctaaatcaagatggtcaaatgtatttcaggattcaagcttctcaccatctcaaaggaatgattctgatgggggattgtacatagagaggcaagatactgctaattcttttattgactatatctgtgtgggtcgtgctgatctaattaatagatctaatgattcatctttcagttctcaaacttcaggtcaaaacatgctgcaggagagtattgatgagtcatccttaagtggtttcaatcatttgtcgtcaggggcatctggttcatccaaagatcttcttgatgccgctgaagaaacaattgaagaacttcttatcgaggcacaaatgtgggagagccattatcaaaaattgaaaattgatctagagaaattacagaaggagtctgatgaaaaatccaagaatcagactgagatattgctagaactttctgcttcacaagccgaacaagagtcgttgagacaagaaattgaagaattgaaattgtctttgaaggtggctactgaacgacaaacagttggtggaatttccaaatctggtgatgcaatagatgtccaatttgagctaaaagatgaggtacactttttgagggaatcaaatgaaaacttaacaatgcaactgaagaagagtcaagatgcaaatatagagcttgtttctattcttcaggaactggaagaaacaatagaggcacaaagaacaacaatctccaatttcactcaaatgagtaatatgattgatcaagatatacccacgaatgcattatcagctcaagaggatgcagagtgggaaagaaagatgtcattgaaagaagatgaaatcatagcattgagggagaaattggatcgtgtactcagcatagaaaatccaggtggtgttggttctgatgctatatatcttgaactggaaaaggagaatgattttttgaaggttaaaatgcaagatcttgagaatgattgttctgaattaacagaggaaaatttggagcttatacacaaattgaaagaagttagtggggtcgaagaacaagattcttgcctttctgatattgaggtaatgttaaatgcgacaggtctttctgggacttcaaaatctagagcaaaatacctagaaagaaaatgtgctgaccttgagcagaagatgttgaattttcaatcggagtctagagaactagaagagaagctcaaaaaaagccacgaggatctaaaaggacaaactcttgaattatctgagcttagagagaacctaagtagattccgtgctatggagctagagagaggggaaatcaatttttcaagaggctaccagttaagaagtgaagaactaggagatattgaaaccgaactgaaactgttgaagagtactgttcaactcaaagaaaaagagatcgaaggattacaacattctaaactagaaatggaaacctttatagatagtgtacttggaccaaagatacatgagcttgaaatctacaaagtggaactagagttgcatatatcaaggctagaagatgaaaaaatagaattattggagtccatttctggaatggaggttgagttgactaatttgacaagtgagtacgagtcatgtatagttcaaatggatgattctagaacaatgatcatagatctcaaggataaagtagaaaggaatcaaatggagttggaagctcaaaaggtggaattgaagaaaaaacaactagaatttcagaaaatatttttagaggcacaagatgattcagaggctctaagaagattgaatgctaaactgcaggctaaagttcataatcttactgaagaatacaattctcttcaagaattaacggatgatctaaagaaggaaaagttggaattacacagttttgctaaacaattagagcagaaattggagcactcgaaaagaaggaccacagatttttgtacaactgtggacttactagaggtaaaactttcttcgattcagaaagatatatctttaaaagagcaatcttttctcttggaactagacaatatatttcatgagcacaaggatcatgaagaaaagataaatcgtgcacatttccttttaaacaagattgataaagaaaaggctattgagatagagaatcttgagagggaggtcatcagccttactgcgcaactatcttcaacacatggggagcaagcaagttccatggtggatactattcgtgaggcctccatccttcgagcagacaaggcaaaacttcaggctaatcttcatgatgtaaatgaacagttgagacattatgaatctctactagaagatatacacaaggagtcaaaaaggaagattaaatcccttaccgattcactcaatgtatcgaaacaaaatgaagaaatgctgaagatagatgccgaggctgtcagaaggctgatggaagctgctaaatccaatgaagaaaatttaagaataacttcaaatgaactagaactgaaatataaatctagcgattatgagaaacaacaaataatggaagaaaattatggattaaaaattcaagttcgaaaaatagcaggtgtccaagatgaacttttggaagtgcaaagttcccttgatgaggctcaatttgaaaaggagagactagaagggatacttcggttgatatctgaagaatgtgatgaactaaaggtgcaaaatgccatgttaacagacaaagtctcaatgatgcaggatacttcaaacaatatcattgaagaaaaacaaactaaaacatccatgcaaacaaagatgagtaccataaatgaggggaacaatgatctagctactgataacagaggttgttgtctagttaatgaggaaccagacctgcaagtaaaggtccaatcattggaaagcggacttgccgaagttctagagaaaaatagcatgtatatgacacaggtgaagagccccactacagagcagcaagctgggagtaggaatggagaggggaataacgatgacaaaatagcacacctagaatcagaactaaaatacatacaagacaagttattaaacatgagcttgcagtatgcggaagtagaggcccaacgggaggaattagtgatggagcttaaaaatgtgaatgcaaagaaggggggacggtggttctagcaattagtgacagagctcaaaagctggatgccacagtcatgaggcccacatgccacagcacagcgaaggttttttgtctctatgtctgtttttggaaccaaggataggggctctgtcattcatatcaggaagaagagaacacaccttccactcggaggcatccagatcttggaggtcaccatcgcgagaattgagcaagcgcagcaagaaccacaggtgttttgtagcctcagaaacaaatcagacaatgaatattttgagaacttgggatgccctggtcgtcttgagctgccaatattatacgactatgttggctagagtgaccaatcatgtttatatgatcatacaaatgaccctgcctttttatactacgcacaacatagctgctgatagacgtagctcctcctgaactgtgcctggaaagaattagatatatggtattaatattatgtgctagttctttttactctgcaaagaacttgtaggagacttttgtggaggtaacatgtatgcatgatttgtcttta

SEQ ID NO: 215206 - DNA, 3672 bp, Zea Mays
cgctcaagggcccatctgcatgccttcttcgacactgtggtgctcagatatcctctccaccaccgacgacgaccaccaccatggcagtcgccttccttgtgcacctctctcgccacgccaccaccacccctacctccgcagcgcgcggcctccctccggtgcctcctcatagccccctccaccagcatcatcctcccgtccccatctgctccacccaccaaagaagagcatctggatctcttctttttcgaatccacaaaatggttgttcagctactgctatattgctgaccagattgatttacaaattcagtttgaggtaccttcgttagagtgcatgcttactcaaggttgttgtgtttctttgtttctatgacttggatagaatatggttacttctttctggtgtgatatattatgcaatgcatgaccactgaatgtcttaggtttgcctcatgtcctctacatagaacacgagactgttgttttccttttttgctattgaccaagaagagatccagatgttgtgatattcacagaggtaactgcatgcggagtaactaatattggcttttatttatcatttagtaccaaattgttgacctccaactgtatacattttgttagctatttatgtttgcattttagttggtgatatgggttaataagctgatcagatccctccctctgtttgccattattatactttcatataatgcatagtactacatgttttctttgaccttcatttgattactgaccattgtgttataaagctacttctaacttgtgtgccaaattacatgttacgactattcattcgattatctggccatggtggattacccacttccatcagaatttcacatgcctttgtcagccaatcctattaaagaagttagtccttaaacatcaatttccatgcatcatgtcgctctgtatatcatgtcttgctaagtttaagcatttgtgaatcatgtcgctatgtatatcatggctaggtggtaattgcccatatgtttacatgagcagtgcgtacaacacatatgcgcagattgtaaatcaatggcataatgttagttgtgacataagatgagcaacactaactcctttgtttggccattggtcgatgttcaaatatatttgtatttgacaaaggaaattattatatggtgaaagttgtgctgacctttttttagttatagcaaaagcttcttctgaagggtacaactgtgactaaatatttcatttttggtgaaaattgttatatggcttgattatctgaatgggaaatacattagttgaaactgaaaaacaaaatcgagtatacacagtaacatccatatttttttgggatgcagattgggccactaaattcattgtgttttggactttcttttagatattttatttcttgcttttctggaactaaattgtgtacgacaaactgtatatattaataaaaggacttctcttatttcatttatgcattgtccttaccccggtaccacacatgaaactgaacgtaggacggtaggagtatatttgttatgtagaccaaatggctaaaaccatccaatattttcataaactgaaaatgcagagaaagcaacaaagttgtatcaatacagccatataggcttagtaggagcttctaatatctagcactaataatatgtagaatgacatatgactgaacaaacaatatgaggactggtaacaatattgatttcgctaatagggcttagattggatactatgatttgttcccatgtgatttttccagtcctctgtagggcttgaagatcatcctttggctcatttatgatatattggcccatggtctacgtgttaagccgcctttgttttaccacctcaatatattgtttccttggttttgtattttttaatttaaaatcacctaccctggtgccttgtcggggagtggccagcgaccgctccacatgaccacatcgactgaggacatgagggaggcaccggtagtcacagaggtgttgtacacgtggacaaacatcggcaaggggtggcagtcgcgctggttcgcgatccatggcagagtgctctcctactcgaagatcctgcctccaaggacgctgccgcggggaggacctgggcgcggatcttgaactaaaactataggatgcctatattcagtacaagtaagctttttttgcttggacagtctatttctctttgcttggacaatttcttttagattcaggtgcaagactcgaacgtcgcgctctacagccggcagaagtctgcggaggtgaagttgtacgagactcggatgatgcccaccatgtggtcgttcaaaacccctcaagttatagtacctgtcggaaggttgccggggcgccgttgcagcatgacttccagaagcaccagcgccacgctggccaagatctcgtcgaccacacacaccgctgttgatgcagtctggagaggctccttgcatatttgactgactgtgattatggtatggaggtttggttgctttggagaggaagcaaaaggcatcgatgcattgaaaaggagacgaacgacgatcgagaggctgttctacaagcttataattgataatgtggcggagctgcttcattttgtctacacaacaactgtaggtgaggcctgccagaaatatgggtccatctttggacgaccacagggtttgtatgtcagcctgaaggacaaggggaaggtcctagaagttctaaggaactggccacataggaacattcaagttatctgtgttactgatggtgagcaaatcttgggacttggagatttgggttggcagggaatgggaattcatgtaggcaaactttctctatatagtgctcttggaggatttgatccatcagttctaagcgttcatatattttatctactcttttttggttgcatctcttaaaatggtcatgtatgtttggtaccaacaaacaattgaattatctcaagtggcgagttctaaattacgttgcagtgttttcctatcacaattgatgttggcacaaataatgagaaactgcttaatgatgagttctacattggacttcggaaaaaacgtgtgactgtcgaggagtatgatgagcttattgaagagttcatggctgctgttaagaaattctatggtgagaaagtcctcattcaatttgagtactttaccaatcataatgcctttgatctgcttgaaaatataacaagagccatcttgttttcaatgatgatattcagggccaacatcagttcactatttgtgaatcttgcttttgtcagttgcaaatcagcttgtacttgtagcagcaactggatagggtcctgcaatgctcactccacggggtgcgggctcgtcgtctaccattgttgcctctctgtgctggttcctaccaacagttagttataacaatctgggcggctttgcaactatcaaccaccttcacttctaggttataacacgtctttcagtaatgcgttgattccaagctcttgctgagattattgttttgctttcctattgtgaaacatgaaaggtggtccgactcctaggtatgatcattcagctgttgtttacgctgactgatatcttctaatctttggtggctcttctcactctaccttctctttgttatctatcacggttgaatctggt

SEQ ID NO: 215207 - DNA, 4022 bp, Zea Mays
tttgaagccagagcctccccaggcacccagtcgctactctatctctcttctttctcctctcgtctccactctccactgcccgctcgatacgggcgggcacgactggtgccaagttgttttcttcgccctccccccttccgcggcgcgttgtagaaagcgagcggggggtagtaggatccatcggtaggtcgtcccatcccgtcgcaccgcccgctacatacgccgcggcgggtaccttgcttccgttcatggcatgtttgtctcggacggtgggttagccatggacgccggaggccgtgcgggcgtgagcggccccgccgcggcgaacggctcgttcggactcgtccgcaccgtggtggggtactccacctcgcccctcttcttctggctcctcaccgtcgcgctcgtcgccgccatccacatcgtctccggctcgtcctccaagcctgccaggaacaatgagacggaggagaggaagaaggcgcgccgcgataggttcctcccggccgccgaggaacgggaggcgtcgggcaggggagatgaccgggttctggagatgatgcgcagtttcagcttcatgcaggcgaccgaggaggatttcatggagggcatgaccgcatacgagcacaacggcgttggcgacggcacagcgcacgggcctgtcgcgccggagccgcctgcgctgacggcgactagcctcagcttcaggtttcagcaccagatgcccgaagttccaacggagacggcgctggtttcgagagaattcactgcggcaagacaagagacggcggtagtttcgagagaactgacagcagcgagagacgatgatggacgacaacgagaggaagagaaggaaccacactttcctttggaaccattcgctccgttgcagacggcggcagacatgcaagaacaccggcacgacgaagcagaggaaacagagttcctggcggaggagccggcagaagagcggagcggagaggttgcgcaggaggaggcagcgccacccaagaccgtcgcggccacgcacaactatcagttcctgactgagcgcgacttccgggggttcgtcagggagccggaggccgtgacggtgcgcgtccaggaatctttcgtgccgtcgccgcctccggcgcaccagcccgaggagcgacgggtggtcgacgtctcctcccgcagcggccggttcctcacggcgagggacttccggccggcgaacgagcccgacgtgtgcgagagcgtggcgtcgtccgggaagtggacgccgccgcctccgaggccgaggccgaagccgaagccgaagcctgcgagctccccgtccgctgcttccatgggcggcggcggcggcttcacgtcggagttctccggtttcggcgactcggactccgagtccagcgccagcgacggctactcggtgaaggatctcgtcgtcgactccgacagcgattggttcctctcagagaaggagttcccggcgtctgcacttggctccggcaacctcaaaacttacaaggccaaggtgctcagggcgatcgaagccatggaggcggcgtccaacctggagccgtcttaccaggaggactcagcgacgacagtgtcgccgagctcggtccggcagcgctcaccggacaccgttcccgatggttctcccaagttccctgaggacgtgtggtctcgcagcccttcgccggacgtcgagtacaaagaggacgaggaggaggtaacgagagaagctgaagcacagtatgatgaggacatcgaacagcgaagcacgggggaagaggaggagggcaagggcatcgacatgagcgatgacgagcactcgtcgggcggcaaggaggtagaatccgcaccaatctatgatctggctcctgttgctgacgactgtatggatcattcagagaaggggatcatcactctaaatgatcattcaggaggtcaagctgcttctgatgctcaaagaagtccagaggcagtctctgccagacaattagctgccgtaccatcagatcaagttgctggcccagtcaagagaagtccggagccaccggagcaggaatttgttggtatggttgatcattcactcgagcacagttcttacgaccggaaacaaactgccagcgaaagcgatcagtcatatgaaatagtatttgatgacaaaagaaggccgcagcgtgcagagacaggatttcttggtacgagcagcccctcacatgaactcgtttctgaagtttgggaagagatcgtcaccagaaacgatcaaccgcccctagggccccatgctgatgagcaaggcctggatacagcagaggaagagtatgtgggcacaggtgatcagccacatggtgcagtttctgatgagaagagcggtgcagagactccggagcaagaattcagccttaccgaccaccgaaacgtagcagttcctgacgccaggaacatctcggagaccagagaagatgaggaacaagccagtgcagatgatcattcggacaatgcagtcaccgggaaggcaaaggtatatgacgaagacggggaggaccgggaagcgaggtggaaggatctgacagacgaggaggaggacgagctggagtcgctgtgggagcaccaggatctggtagagcagctgaagctcgagctgaaaaaggttcggtcgtcggtcgggctgcccacgatcctcgaggagtcggacacaccaaaggctccggtggaggacctcaagccatggagtatggatgctaagttccttcgcgaggaccccatggacgagctgaacaagttctacaagagctacagggagaggatgaggaagttggacattttgtgctaccagaagatgtacgcaatagatttcctacagctcagagggtcccagcagtccaacaacaacaacaacaactctgtaaagtccttgtcgcctacggtggcgtccatcctgtcgcataacttccggtcatcgcgccggagatctcccgaggacccgtcggaacggttcctcagggagctccgctacgacctggagacggtgtacgtcgggcagatgtgcctgtcgtgggagttcctccggtggcagtacgagcaggcgcgcgacctcccggagtccgactcctaccacagccaccagtacaaccaggtggccggcgagttccagcagttccaggtcgtggtgcagaggttcgtggaggacgagtcgttcaaaggccctaggctgtcgaactacatcaacaaccggtgcgtcctccgcaacctgctgcaggtgcccgtgatcaaagcctgaaggacaggatggaggaccagcgcaaggggaactacgtgataaccagcgaggagctggaggacgtcatggaagaggcgatgcacgtcctgtgggagttcatcaaggccgacagggccgagacgacgacgacggcggcggcggcatcggtgctcaagggcctgtcgagcagcaacgtcgagctccaggaccctctggatcatggcctcatggcgcacatccattccgcgttacagaagaaagagaagaggctcaaggacctgctcaggacgggcaactgcatcgcgaagaagtttaagaagcccaaggaggacaggtccaaccagaacctcttcttctcgcaggtggacatgaagctggtggcgcgggtgctgaggatgcccaggatcaccagcgagcagctgcagtggtgcagggccaagctcgacaagatcgtactggtagataggaagatccacagggaggcttcatttttgttgtttccctgctgagagagagagagagagagtacagcatatatgttttcttctttttctcttgttcccttttgctcgatgaaaccagtccacgagtatagggtttctttagccttttggcaatccagtcttttacgcatgtctgtccatagttaccctgaaattacatccaccgcaatgtacatgcatactccattgcctcttcagtagaatgaaccgtcttcttttctgtcgctgaacaccgccgcgtgctgtggatgtgcagtgcaaag

SEQ ID NO: 215208 - DNA, 3413 bp, Zea Mays
cgcgagcgcctccgccacccacgtacgcgcgcccggaggaaaaccaaacgccaaattgaagcagcaattatcaaaacgcctggctgtccgcattacattcccaatccactaaccgatcgatgcgctcgtcggggccggcgggcaaagccaccagtggtcagagatctagctatggcgccggcgcttctgctgctgcgacttctggcattgattgcgacggcaagggaggcctgcgcggcgagggcgttcgccgcggcgtccaacgcgacggcgcatggggcgacggtggtggccgggaagctgaacgtgcacctggtgccgcactcgcatgacgacgtcgggtggctcaagaccgtcgaccagtactatgtcggatctaacaacagcatccagggcgcgtgcgtgatgaacaccctcgactccgtggtcgacgcgctcgccagggaccccgcccgcaagttcgtcgtcgtcgagcaggcttttttccaaaggtggtgggcagagaaaatcccaaacattcaggcagtagtccgcaagctcgtggattcgggtcagctagagttcataaatggtggatggtgcatgcatgatgaagctgctgtccattatattgacatgattgatcagaccacgcttggtcaccggatgatcaagaaacaattcaacaagactccaagagctggctggcaaatcgatccttttggacattctgcagttcaagcttatttgcttggagcagagcttggcttcgattctttgcattttgcaagaatcgattaccaagataaggaaaagcgtaaagctggcaaaggcttagaggttatatggcgcggctcaagaactttcggttcatcttcacagatatttacaaatgtatttcctgtcgattatagccctccagatggctttggctttgaagttttagatgaaaatatcttgcctgtccaggatgacatgctgatgtttgactataatgttgaagaacgagttaatgattttgttgttgcagccatagaacaggcaaattttacgcgtacaaaccacataatgtggaccatgggagatgattttagttatcagtatgcagaatcttggttccggaatatggacaaacttatctatcacgtgaacaaggatggccgagtgcatgcgctgtattctaccccatccatttacacagatgcaaaacatttttcaaatatatcttggccagtaaaatatgacgatgatttcccctatgctgattcgaaaaattcatattggactgggtactatacaagccgtccaactttcaagcgatatgttcgagtgcttagtggttattacctggctgcacgtcaaatagaatttttagtgggtaggagtttcttagggatgttcacgaccagcttggaagacccaatggcaattgcccagcatcatgatgcagtctcaggtacagcaaaacaacacacgacagatgactactcgaaacgccttgctcttggagcatctaaggttgagaaaggagtcaatgttgctctgacctgtttactaagttccaacggaacatgtgcgccttcagtacaaaaatttagtcagtgcccacttctcaatataagctactgcccttcaactgaggaaacagtttcaggggcaaagaatttagttgtagttgtttacaatcctcttggaagggaacgtagtgacttcatacagattcctgtcaatgatgaaaaccttgttgtaaaaagctctgatgggactattattgagtcacaactagttgaggttgataatgtgacaagaaatttaaggaaagtttatgtaaaagcgtatcttggaatcacaacaaacaaaccaccaatgtattggttactttttcaagcttctgtgccgccaatggggtggaattcttactacatttcgagatccacaggatccaacagcattaggtatgttgcaaccatggtttctccaaggaatgacacggttgaagttggaccagggtctctaaaactttccttctcatcagcatctggacaactggagagaatattcaattctgtctcaggagtggatctaccaattcaacaaagctttttttggtatagttcaaatcaaggtgatatcgtggatgcacagggatctggagcatatgtatttagacccaatggtactacaccaactattgtatcatcatcggttagaaactatagggaagattgggatcttgaagtgacagaaccagttgcaggaaattactacccggtcaatctaggcgtgtatgtagccgatggaaaatatgagctgtcagtacttgtggaccgtgctgttggagcatcaagtattcaggatggtcagctagagattatgctacacaggcgtgtaatcagagatgacgacaaaggtgttgatgaaccacttggtgaagttgtttgtttggatggaagttgcaaggggctcacagtgaggggaacatactatgtcaaagttgacaagatagggcatggagctcactggcgaagaacatatggccaacaagtctattcaccctatcttcttgcttttactcatgaggatgagacaagttggaaatcctacaatgttgccaaacaaagcacgatggatgagaattacagtcttcctgataatgttgccattattaccttgcagaatctagatgatgacaccacattactccgcttggcccatctatttcaggatctagaggacgctcagtattcagtgatagcaaaagttgaactaagaagggtgttcggaaagagaaccatcaaggaattagctgagactaacctttctgccaatcaaaagaagtcagagatgaaaaagctcaactggagagtattggggaacgataaaagtgatcccatcccactgaaaggtggtcccgttgatagtcaagctcttgtcgttgaactcggacccatggagatacgcacattcttgctgaagttctagattgcatacacttagtaattgcctagtttttaaaggggaaaaagaaacatcagaatctaggacccatttggctatcattggttttcaattgactgggtaagaggacatcaataccaattctacattctattctcgctgctttcatgtatatatctctcaatcacccactagctagttggactctcatcagacttcgcttagagttcttgacccaagcatgcatattgaattcatatatcttgatattgtgaggtttgttttagaatatgatacccctgcttatatgaaacttgtcaaggatctctgaaaagatattgtgagtacaacacaagattgaactatatcaagaatgatagacaatctcacagaaactcatagatgacaggttgaagcaaccacgacatgagattaggatctggtgaaggcaattagggctgataacgagccgagct

SEQ ID NO: 215209 - DNA, 3370 bp, Zea Mays
ccgcgagcgcctccgccacccacgtacgcgcgcccggaggaaaaccaaacgccaaattgaagcagcaattatcaaaacgcctggctgtccgcattacattcccaatccactaaccgatcgatgcgctcgtcggggccggcgggcaaagccaccagtggtcagagatctagctatggcgccggcgcttctgctgctgcgacttctggcattgattgcgacggcaagggaggcctgcgcggcgagggcgttcgccgcggcgtccaacgcgacggcgcatggggcgacggtggtggccgggaagctgaacgtgcacctggtgccgcactcgcatgacgacgtcgggtggctcaagaccgtcgaccagtactatgtcggatctaacaacagcatccagggcgcgtgcgtgatgaacaccctcgactccgtggtcgacgcgctcgccagggaccccgcccgcaagttcgtcgtcgtcgagcaggcttttttccaaaggtggtgggcagagaaaatcccaaacattcaggcagtagtccgcaagctcgtggattcgggtcagctagagttcataaatggtggatggtgcatgcatgatgaagctgctgtccattatattgacatgattgatcagaccacgcttggtcaccggatgatcaagaaacaattcaacaagactccaagagctggctggcaaatcgatccttttggacattctgcagttcaagcttatttgcttggagcagagcttggcttcgattctttgcattttgcaagaatcgattaccaagataaggaaaagcgtaaagctggcaaaggcttagaggttatatggcgcggctcaagaactttcggttcatcttcacagatatttacaaatgtatttcctgtcgattatagccctccagatggctttggctttgaagttttagatgaaaatatcttgcctgtccagaacgagttaatgattttgttgttgcagccatagaacaggcaaattttacgcgtacaaaccacataatgtggaccatgggagatgattttagttatcagtatgcagaatcttggttccggaatatggacaaacttatctatcacgtgaacaaggatggccgagtgcatgcgctgtattctaccccatccatttacacagatgcaaaacatttttcaaatatatcttggccagtaaaatatgacgatgatttcccctatgctgattcgaaaaattcatattggactgggtactatacaagccgtccaactttcaagcgatatgttcgagtgcttagtggttattacctggctgcacgtcaaatagaatttttagtgggtaggagtttcttagggatgttcacgaccagcttggaagacccaatggcaattgcccagcatcatgatgcagtctcaggtacagcaaaacaacacacgacagatgactactcgaaacgccttgctcttggagcatctaaggttgagaaaggagtcaatgttgctctgacctgtttactaagttccaacggaacatgtgcgccttcagtacaaaaatttagtcagtgcccacttctcaatataagctactgcccttcaactgaggaaacagtttcaggggcaaagaatttagttgtagttgtttacaatcctcttggaagggaacgtagtgacttcatacagattcctgtcaatgatgaaaaccttgttgtaaaaagctctgatgggactattattgagtcacaactagttgaggttgataatgtgacaagaaatttaaggaaagtttatgtaaaagcgtatcttggaatcacaacaaacaaaccaccaatgtattggttactttttcaagcttctgtgccgccaatggggtggaattcttactacatttcgagatccacaggatccaacagcattaggtatgttgcaaccatggtttctccaaggaatgacacggttgaagttggaccagggtctctaaaactttccttctcatcagcatctggacaactggagagaatattcaattctgtctcaggagtggatctaccaattcaacaaagctttttttggtatagttcaaatcaaggtgatatcgtggatgcacagggatctggagcatatgtatttagacccaatggtactacaccaactattgtatcatcatcggttagaaactatagggaagattgggatcttgaagtgacagaaccagttgcaggaaattactacccggcgtgtatgtagccgatggaaaatatgagctgtcagtacttgtggaccgtgctgttggagcatcaagtattcaggatggtcagctagagattatgctacacaggcgtgtaatcagagatgacgacaaaggtgttgatgaaccacttggtgaagttgtttgtttggatggaagttgcaaggggctcacagtgaggggaacatactatgtcaaagttgacaagatagggcatggagctcactggcgaagaacatatggccaacaagtctattcaccctatcttcttgcttttactcatgaggatgagacaagttggaaatcctacaatgttgccaaacaaagcacgatggatgagaattacagtcttcctgataatgttgccattattaccttgcagaatctagatgatgacaccacattactccgcttggcccatctatttcaggatctagaggacgctcagtattcagtgatagcaaaagttgaactaagaagggtgttcggaaagagaaccatcaaggaattagctgagactaacctttctgccaatcaaaagaagtcagagatgaaaaagctcaactggagagtattggggaacgataaaagtgatcccatcccactgaaaggtggtcccgttgatagtcaagctcttgtcgttgaactcggacccatggagatacgcacattcttgctgaagttctagattgcatacacttagtaattgcctagtttttaaaggggaaaaagaaacatcagaatctaggacccatttggctatcattggttttcaattgactgggtaagaggacatcaataccaattctacattctattctcgctgctttcatgtatatatctctcaatcacccactagctagttggactctcatcagacttcgcttagagttcttgacccaagcatgcatattgaattcatatatcttgatattgtgaggtttgttttagaatatgatacccctgcttatatgaaacttgtcaaggatctctgaaaagatattgtgagtacaacacaagattgaactatatcaagaatgatagacaatctcacagaaactcatagatgacaggttgaagcaaccacgacatgagattaggatctggtgaaggcaattagggctgataacgagccgagct

SEQ ID NO: 215210 - DNA, 1780 bp, Zea Mays
atcgatcgcaagctaactatgactgcaacgcgtctccggcctcctgctccacttcccagctgtatatatatacacatagctctctttcgtcaccgccaccggccggcaagctagatgcactgaccacggtgacccatctcgatcgatcggcggcttcgctagctagctgggacacagcccccatataaatcatccactcctccgtagcaagcacatcctgaagctgcctttcttttccaataagctaagcagcaggtgcaaagggaattcgagatccagagagctagctgatcgatggatccgaaagttggcgttgctctgaccctctccctcgtcggcgggctaagcacctcccttggtgcactgttggctatcctcaaccatgcgccaaacaacagaacactcgggattctacagggctttgctactgggctcatgctcagcatgtctttctttgacttggcttacgatgctgtcaacgccatcggctttctgagagggaacctctggtttttcgctggagcgctgctgttctcaacaatcgcggacgttttccctgagccagactgcagtgcggcagatgaaaatgggaagcagcagggtggaaaggaactcatgatgagacatcgccgaagagttatatttagcgtcattgtcacagcaattgttgctggtgtgagtttacaaaacttccctgtgggcactgctgcatttcttggaacaacaaagggcttccgtgttggtttgaacttggctcttgctatagcactacactacattccagagggtatttcagtagctctcccagcatactttgccactagcagcaaatggcaagccttcaaattagcaactctatctggttttgcagagccactgggtgtgattattgtggcatacctattcccaagcaatttgaaccctgaaatactggaaggtctacttggattagtgggaggagtcatggcttttctaacattgtatgaaatgctaccactagcatttgaatatgcaggacgcaaggatgctgttaaagcagtatttgttggtatggcctttatgtctatgagcttgtattttctagatgctagcctcccaaaggagatgagcgcttaacataatttgcgcctaaaccaattcatgtgatggtcaagagaatttcatcatgggtgctgcaacaaggtgttagtgggaaggacgtgcatccaactcgagatcatgagagatgagatgtttccagcaacagtacacaatacaacgactgacagatcaagcttttatcaatgtccatgggacatgtgaccaaaatggtttgcaacacaatcatatttatataaaaaagggaagtacaattgtacaaacaggcatatgctaacaacatatcatgtacattttaattagattcggtcatatcatgtacatagagggtaagattaattgtatatactgaataaagtaggcacaaaacactgatacgatgtaaaataatggaaataaacggttgcatacatgatgaatgattgaccgacgtatctgctgaacaaactttaaacgggctatacaagttatgaggcaaagagactttactcttttaaacatggttataataaattcaatttactcatgtttaatctggctataataagtttaatctacttgttgtgcatccattataagtttataactattggacctttactcatatatagagagagaggacaacactttttatctagtgtgatatcgtcaacatctggatccaaccgaacatatttgaccg

SEQ ID NO: 215211 - DNA, 1703 bp, Zea Mays
aagctagatgcactgaccacggtgacccatctcgatcgatcggcggcttcgctagctagctgggacacagcccccatataaatcatccactcctccgtagcaagcacatcctgaagctgcctttcttttccaataagctaagcagcaggtgcaaagggaattcgagatccagagagctagctgatcgatggatccgaaagttggcgttgctctgaccctctccctcgtcggcgggctaagcacctcccttggtgcactgttggctatcctcaaccatgcgccaaacaacagaacactcgggattctacagggctttgctactgggctcatgctcagcatgtctttctttgacttggcttacgatgctgtcaacgccatcggctttctgagagggaacctctggtttttcgctggagcgctgctgttctcaacaatcgcggacgttttccctgagccagactgcagtgcggcagatgaaaatgggaagcagcagggtggaaaggaactcatgatgagacatcgccgaagagttatatttagcgtcattgtcacagcaattgttgctggtgtgagtttacaaaacttccctgtgggcactgctgcatttcttggaacaacaaagggcttccgtgttggtttgaacttggctcttgctatagcactacactacattccagaggtaatttactctgcattggcttttgtgaagggtatttcagtagctctcccagcatactttgccactagcagcaaatggcaagccttcaaattagcaactctatctggttttgcagagccactgggtgtgattattgtggcatacctattcccaagcaatttgaaccctgaaatactggaaggtctacttggattagtgggaggagtcatggcttttctaacattgtatgaaatgctaccactagcatttgaatatgcaggacgcaaggatgctgttaaagcagtatttgttggtatggcctttatgtctatgagcttgtattttctagatgctagcctcccaaaggagatgagcgcttaacataatttgcgcctaaaccaattcatgtgatggtcaagagaatttcatcatgggtgctgcaacaaggtgttagtgggaaggacgtgcatccaactcgagatcatgagagatgagatgtttccagcaacagtacacaatacaacgactgacagatcaagcttttatcaatgtccatgggacatgtgaccaaaatggtttgcaacacaatcatatttatataaaaaagggaagtacaattgtacaaacaggcatatgctaacaacatatcatgtacattttaattagattcggtcatatcatgtacatagagggtaagattaattgtatatactgaataaagtaggcacaaaacactgatacgatgtaaaataatggaaataaacggttgcatacatgatgaatgattgaccgacgtatctgctgaacaaactttaaacgggctatacaagttatgaggcaaagagactttactcttttaaacatggttataataaattcaatttactcatgtttaatctggctataataagtttaatctacttgttgtgcatccattataagtttataactattggacctttactcatatatagagagagaggacaacactttttatctagtgtgatatcgtcaacatctggatccaaccgaacatatttgaccg

SEQ ID NO: 215212 - DNA, 1836 bp, Zea Mays
cactatggtgaaatggtgcatgattctgaagtaaacgatattgttactccctataggacaagttataaagggatgggatttgggcatcaagaccatgaaaaaaggcgaaaatgctgtgttcaccatcccaccagagcttgcatatggtgaagatggctcaccaccagtcatccctccaaatgccacactgcaatttgatgttgagcttctgtcatgggtgtgtatcaaggacatttccaaggatggaggcatcttaaaaaaggtagtagccaagggcgataagtgggagaaccccagagatcctgatgaagttgttgttaagtatgaagcaaggcttgaggatggaacagttgtatcgaaatctgatggtgttgagttcactgtgagagatggcgtattctgccctgccatatcaaaggctgtcaagactatgaagaaaaacgagaaggcccacctcactgtcatgccacaatatggctttggtgtgaaaggtagacaggcatctggagaagaagcttctgtgcctcctaacgcgacattgcacattgatcttcaagtggtgtcctggaggacagtcactgagttaggcagtgacaaaaagatccttaagaagatccttaaggagggcgaaggctatgattgtcccaatgattgtgcagttgtccgagtgaaacttattgggaagttggaggatggtaccttgtttgtcaagaaaggtcatgatggtgaggagccatttgagttcaagactgatgaggatcaagtgattgaagggcttgacaaagcagtactcagcatgaagaaaggagaagtatccttggtcactattcctccacatcatgcctttggaactaatgaaacaactaaagatctggctacagttccaccaaactcatatgtttactacgaaatggagcttgtctcatttgataaggagaaagattcatgggacttgaagaacgttgctgagaagattgaagcagctgctaagaagaaagaagaagggaatgtgtggtttaaaattggcaagtatgccagggcttctaagagatatgaaaaggctttgagctttgtcgagtacgatagctccttcactgaagaagagaagcagctatcgaaaccacttcagataagctgcaagctcaacaatgccgcatgtaaactaagacttaatgattacaaggaagcaaaggaactgtgtaccgagaagggcacaggcacacatgcatcttgttgatcttgatttggcagaggcagatatcaagaaagctctagaaatagatcctgacaacagggatgtgaagatggggtacaagaggctaaaggagaaggtcaaggagtacaaaagaagggatgccaaattatatggcaacatgatttccaagttgagcaagcttgaagacacggaagataatggccaaatgagtcaggcagtaaacaagaagcgtgagctcttatggccactggcggaaatgcttaggagattcttcactgccgatggtagcaagggttccacgctgtggcttgtgctgaggctattgatcccggtaatagtattggttgcagtttgtgtgggttacttcatgcacagcagtgttgaagagatagactgcatcaactgttagttgagcagggtatctgtgctcaccttctgtcctttttcaggtgagtgtttatcgttgtatagatctgatgagtactacacgtatttgttggttgtgtgggttgaggacttgagggcgaagtattcacgtgtactgtactgttaaacttgacttgtctaatagttgcttccactgtctcaaaaagaaagataatcttgttttttcagttgtc

SEQ ID NO: 215213 - DNA, 1001 bp, Zea Mays
gtataaatgttcatatattgaattgaacttgatgatgacttgatgagaaaaggcagtccgaatctgccaggatcagggataagtatcccgacagaattcctgtgattgttgagaaagctggcaaaactgatgtccccgagattgataagaagaagtaccttgtccctgctgatctcactgtcggccagtttgtctatgtggtgaggaagagaatcaagctgagcccagagaaggccatctttgtctttgtgaagaacaccttgccaccaactgcctctttgatgtctgcaatctacgaagagaacaaggacgaggatggcttcctttacatgacctacagtggtgaaaacaccttcggctctgcctagagcaatcgcccctgccactgtaaataaacgagcatgatggggctgctgctattgtaaacctgtgtatatacctcagtctctagtatgctgctgccggattgcttcaatggcttcaatgacacccttagctttcaactgtttggatttctcctgtgacattgaattccttcggtatcgaaacatttgatcatttcactattacttcacttaccttatctcatcagatgcgtgattgctgtttatctgtgctcatcgtgtttgttttaagctgcaactgcaatctgctgacggccaagctgatgctatatttttcttgatggaatcgatagattcccgcagtagataaaggggtgtttggtttaagaaattaatccatccaaaatgaggtgatgcatcgtgagttagttccttaaatttggtaggatgactcatactcagtccttatatcagtactatctaactatgaaatcaaataaaaaagtgaggaataagaacagtactaactacgaaaccaaataaaaaaatgaggaagtccttatatcagtactatctaactatgaaatcaaataaaaaagtgaggaataagaacagtactaactacgaaaccaaataaaaaaaatgaggaataagaaa

SEQ ID NO: 215214 - DNA, 1300 bp, Zea Mays
atgcggcccaggcgccccaccttccctcctcctatatacacactcgatacctagggtttccttctctcacttctgtacccaacagaagagcggcggcgcggacggacaaggagcaggcggaagaggagttgtgccaaggcacaatgggtatctcgcgtgactcgatgcacaagcgccgagccaccggtggaaagcagaaggcctggaggaagaagcgaaagtatgagcttggtcgccagccagccaacaccaagttgtcaagcaataagacagttaggagggtccgtgttcgtggaggtaatgtgaaatggagggctcttcgccttgatactggtaactactcatggggaagtgaagctgttacccgcaagacccgtatcctcgacgtggtctacaatgcgtcaaacaatgagcttgaagaagaaaacccctgctgcaaagaaggataatgctgagggacaagaggttgaggcagcagctgaggaaacgaaaaagagcaaccatgtcacgaggaagcttgagaagcgcaaggagggacgtacccttgacccacacattgaggagcaatttggcagtggacggttgctggcatgcatttcttcccgccctggacagtgtggccgtgctgatgggtacatccttgagggtaaagagcttgagttctacatgaagaagctacagaggaagaagggcaagagcgctgtagcttagagcattctcatggattgtcttgcaccgaaatgtgtgtcctgatgagtacactttttttggttagtcgtctcaagttcagagcgttatgccatgttttcagacctgattagtacactcttttctaaaagcgattgagctctagtccaatgtattgataatatctgctgttgtcctattgcggtgatgtttatttgccctgttcgctagctgcaatagttcctatttgagcagggtatgattatttgttgactagttgagtgcccgtgcgttgcaacggcaacatataataccatgatgaattatgtacaaatgtgtgtttcattattatagtactatgtacgtgctttacacacaatcatatttgatacccataaaaaatatatgttctatacacatttagatctcgagatgtctcgttccctccaacgaaataagtccaagaaattttgtttgaggcttaaatgacctcaaaacaaatgtttacattctgacaaatctttttaagatgctagaacatattcgatctttaaaaagaaccataggttccaatctgaaaaatcagcttgccgacattgacttggctccacgg

SEQ ID NO: 215215 - DNA, 1294 bp, Zea Mays
tatgtctatgaggattgaggaggaataacagctacatctgttcttgtccatgtttctgtagcatcagtagcgcagcgtggttgtacgtttgctgtgttgctgtatcactctgcgtctctgcaagtgctaaaccagtcactttatggacggtggttcctgtggtctcgagggagcgtcggtagtgacatctactactagcgctggtattcagcttctgccagagaagcactgcgccgatgaagcttgtggagccatggcacgcagtaatggtcctgaaggagtgccagtagtgacttctgctgatgaccctccgacccgtgccgatattccatttctctgcaattcagttgatgaaacctgtgaagccacaggggacggcagtgctcccttggatgctcagatatgtacgggtttctctaagttgatcagcttggaggtgaagaaaggcctccagaagtgcgcgacgttcccaccctcgtctggtcagcctcagcaggaggattgttcatgctcccatgtaggtgatggcctcacgggtgctcctgctttctagcgatctgtgtccttacctgtgataaatacatgtgtgagctaaatctattgatctgcttgtttatgtaacggtacttcaaaactgtatcaccggttatgtcttggcatgcttctttacggatctgttatccatgcatggcagacaatagttggcattttagcagcacaacaatatttctaactattaagtgttaattatctaatgttatttctaactattaagtgttaattatctaatgtatttaatgaagtaacacagttagacttgcctaaagaggccagtgaagcttcactggctgcatagagaagtacatttttattatcatgtaaatgcatggttctttggaaccatttggcctatctgattaattattactataaccgggaatgggagcccgaggctataacccggactcctcgccctcgtacctcgttgctggcgaagagcgtcatcaatggcgagtggaggttcactacacagaggcccgccggatcttggagcatcattcgcggtcttggcgcgtctacgcaactgtatcctaagggcatcgaagaggagagacggtacgccggtggcgacaaggtacggtagatttgaactggagtgtggaggtatcgtcggccagtgccatgcacccaggaggaactcttgtgtgggtgtgggcagggctagaaggaagaaccatgcatgctactacattcatataatctttttcagagggggtcaatgcttactttagct

SEQ ID NO: 215216 - DNA, 2050 bp, Zea Mays
ttcggctgcttctatcttgcagctcagaaacatgtggtcagtttccctccactccgtcggtttttttttttccttccattatctgcatgagcagataactccaaacgacgggctgagaggtgctgtgacactgcaggcgataaaggtatataagccaaacgcttttgcaaactgggagcctgggatcaccaaatggaccgtgttcttctgagctcccacttgccatctcacgctcatgcaaacacgaggttgcagcagggtcctggtggcctcaacagtataggatttgcagtcataaaaaagggatgcttgaagttaagatgttacgcgatcggcgatgaactcggtggtccagggcgctttagtaagcatttcatcgagaacagtaatggacctgttttccagggactcgatgcgtctgctggttcttttagaactgtcggtgctgaaatcactcaggacactggagatttctttgtcagtgacgcagagggtgatccagacaaacctaccgatgggttctcctcgatcgaccaggctataggtgctttgcgtgaagggaagtttgttattgctgtagatgatgagaacggcgacaacgaaggcgaccttgtgatggcggccactctagtggaccagaagtcagtcgcattcatgatcaggaatggctctgggattatctcggtaggcatggaggaggaggacctgactagactgatgattccgatgatgtcccctatcacagaaatcgaagatatcacggctgctgcttccacggtgacagtggatgccagggttggcatatctacgggtgtgtcggctgcagacagggcgaagaccatcctcactctagcctcctctgactccaagcccagtgatctgaggagaccaggccacatattccccctcaagtaccggaacgggggcgtgctgaagagagctggccacacagaagcgtcggtggatctggttgcgttggcaggtctccgtcctgtgtccgttctctccaccgtcatggaccccagggacggttcgatggcaggcgtaacggttctccagcagatggctatggagcatgacatacccatcgtttcgattgctgatctcatccggttagtatatcctaaggtataggagaaagcgggagaagctggtggagctgattgctgtgtctcgcttgccgacgaaatggggcctcttccgagcctactgctaccagtccaggctcgatggaaccgagcacatcgctgttgtgaagggcgatatcggcgacggcgaagaggtcctggtgagggtgcactcggagtgcctgacgggggacatcctcggctcagcccgctgcgactgcggcaaccagctggagctggcgatgcagctgatcgagaaggccggccgtggcgtgctcgtgtacctccgcggccacgagggccgcggcattggcctgggccagaagctccgcgcctacaacctccaggacgagggccacgacaccgtcgaggccaacgtcgagctcggcctcgccgtggacgcccgcgagtacggcatcggcgcccagatactccgtgacatcggcgtgcgcacgatgcggctgatgaccaacaaccccgccaagttcatcgggctcaagggctacgggctcgccgtggtggggagggtgccggtgatctctcccatcaccaaggagaaccagaagtacctcgagaccaagcgcaccaagatgggccacgtctacggctccgatctcccgggaagcctgccggagttcgccaacccacaagaggcccccacagaacaagacgacgacgataaccaaaactgataaaaaaactatacggtgtcgtttttttaggaaaagataccaatataaccacaaattcttgtattccactgagaacgagtattgcagagtatttatttatcaactgcaaaattattaagtataatagagatacaaacttttatcaacgcctcttttacggaggtaaagcatgtttctccctaatatttattagagcctcatgtaagagaagcggatcaagctctcggccag

SEQ ID NO: 215217 - DNA, 1900 bp, Zea Mays
ttcggctgcttctatcttgcagctcagaaacatgtggtcagtttccctccactccgtcggtttttttttttccttccattatctgcatgagcagataactccaaacgacgggctgagaggtgctgtgacactgcaggcgataaaggtatataagccaaacgcttttgcaaactgggagcctgggatcaccaaatggaccgtgttcttctgagctcccacttgccatctcacgctcatgcaaacacgaggttgcagcagggtcctggtggcctcaacagtataggatttgcagtcataaaaaagggatgcttgaagttaagatgttacgcgatcggcgatgaactcggtggtccagggcgctttatgacgcagagggtgatccagacaaacctaccgatgggttctcctcgatcgaccaggctataggtgctttgcgtgaagggaagatgatgagaacggcgacaacgaaggcgaccttgtgatggcggccactctagtggaccagaagtcagtcgcattcatgatcaggaatggctctgggattatctcggtaggcatggaggaggaggacctgactagactgatgattccgatgatgtcccctatcacagaaatcgaagatatcacggctgctgcttccacggtgacagtggatgccagggttggcatatctacgggtgtgtcggctgcagacagggcgaagaccatcctcactctagcctcctctgactccaagcccagtgatctgaggagaccaggccacatattccccctcaagtaccggaacgggggcgtgctgaagagagctggccacacagaagcgtcggtggatctggttgcgttggcaggtctccgtcctgtgtccgttctctccaccgtcatggaccccagggacggttcgatggcaggcgtaacggttctccagcagatggctatggagcatgacatacccatcgtttcgattgctgatctcatccggtataggagaaagcgggagaagctggtggagctgattgctgtgtctcgcttgccgacgaaatggggcctcttccgagcctactgctaccagtccaggctcgatggaaccgagcacatcgctgttgtgaagggcgatatcggcgacggcgaagaggtcctggtgagggtgcactcggagtgcctgacgggggacatcctcggctcagcccgctgcgactgcggcaaccagctggagctggcgatgcagctgatcgagaaggccggccgtggcgtgctcgtgtacctccgcggccacgagggccgcggcattggcctgggccagaagctccgcgcctacaacctccaggacgagggccacgacaccgtcgaggccaacgtcgagctcggcctcgccgtggacgcccgcgagtacggcatcggcgcccagatactccgtgacatcggcgtgcgcacgatgcggctgatgaccaacaaccccgccaagttcatcgggctcaagggctacgggctcgccgtggtggggagggtgccggtgatctctcccatcaccaaggagaaccagaagtacctcgagaccaagcgcaccaagatgggccacgtctacggctccgatctcccgggaagcctgccggagttcgccaacccacaagaggcccccacagaacaagacgacgacgataaccaaaactgataaaaaaactatacggtgtcgtttttttaggaaaagataccaatataaccacaaattcttgtattccactgagaacgagtattgcagagtatttatttatcaactgcaaaattattaagtataatagagatacaaacttttatcaacgcctcttttacggaggtaaagcatgtttctccctaatatttattagagcctcatgtaagagaagcggatcaagctctcggccag

SEQ ID NO: 215218 - DNA, 2923 bp, Zea Mays
cgacgcttcactctgcccctccctcctcccttcgtcttccaccattcactatagcggagcgcaggctggtggacgccgaaggtgaattcggtggcgccggtgccgaacccgatattcatggacgcctctcccctgaacccgccgccgctggtggaggaggagcttgtgctgcgccgcagtgctcgttgcctcaataggccaacccggcccagctacgcggaacaggagcctcctaaaaaacccggcggccggggccggagcaagcggaagagggacgaggagaaaccggagctggcaccggcgcagcagggtgccaagagtccggacaggaaggactccaaggatgaggcgggtgagaagaagccgacgcccatgattgcggcgctgccggtctcttgcgctggcgttgctgctgaagacgatgcgacggggaccgggaagagcgccaagctgagggtgaaggagacactgagggcgttcaatagccactacctccactttgtgcaggaggagcagaagagagctcaggctgcgctacaggagattaacgctaagagtggcctcaaacgtcagaccaaggggggtgaaaagaaacgcccatcaaagcggcctgacctgaaagcaatcaccaagatgcaagaaatgaatgccgtgctttatccagagaaaacgattggacatctaccagggatcgatgttggagatcatttctattctcgcgctgaaatggtagtgttgggcatacacagccattggctcaatggcattgacttcatggggctgaaataccaaggaaaggagtattcaaacttaactttcccactggccacctgtatcgtaatgtcgggggtatatgaagatgatctagacaaagctgatgaaattatttatactggtcaaggaggaaatgatttgcttggtaaccatcgccaaattggctctcaacagttgaaacgtgggaatttagcgttgaagaatagcagggagaatggtaatcctgtccgagttgttcgaggacatttgtcaaagaatagctacactggaaagatctacacctatgatgggctttacaaggttgtagatgactgggtgcagaagggagtgcaaggccatgttgttttcaaatttaagttgaagcggcttgagggtcagccatcattgacaacctctgaggtgcgatttactcgtgcagaagctccgacaactatttccgaattacccgggctggtttgtgatgacatctctggagggcaagaaaatattcctattcctgctactaacttggttgatgatccacctgttcctccatctggtttcaagtacttgaaatctctacaaattccaaaggacatcaagattccgtctagtattattggctgtgattgtgaaggaggttgtgctagcaacaaaaaatgtttgtgtgctcagcgcaatggttctgatctgccttatgtatcatataagaacattggcaggttggtggagccgaaagcagttgtatttgaatgtggggctaactgcagctgcaaccatgattgtgtaaacagaacatctcaacaaggtttgcagtaccgcttagaggtatttaagacagcttcaaaaggatggggagtcaggacttgggacactatcctccctggggctcccatctgtgagtacacaggggtgttgaggaggaccgaagatttggatggttcacagaacaactattgttttgacattgactgtcttcaaaccatgaagggtttggatggaagggagaaaagggctggatccgaaatgcacctgcctaatcttcatcctgagaatgattcagatgcacaacctgcacctgagtactgcatagacgctcactctattggcaactttgcaagatttataaatcacagctgccaacctaaccttttcgtccagtgcgtcttgagctcacacaatgatgttaaactggcgaaagtgatgcttttcgctgctgacaccatacttcctcttcaggagctatcctatgactacggttatcgattggacagtgttgttgggcctgatggaaaaattgtgaagctggcctgccactgtggtgctcctgattgccggaagcgcctctactaacctgcagtgtgtttatttctatttggatttttgaggaaacagcttatattgtaggaaaaacagtcatggtacctatgtagttgacatgctcttgatcatatatagcaaaagaggagcaatttatggggtgttcggtttaagaatgagttagtatatcatcttctcatttactatttttgcttggtttatgtaataaaatgagtcgatctatcaccaccttattcctcatagttagttagttagcactaacattagaaatgaagtcatcttatcaaatttaaggaatgagcttatgatgtaccaccttaatttggatgaagtgattcatcaaacaaacaccctattgatataatatagcattcttgttttgtgataattagagatttagaggacatggtggtcatggtagcatattttgccgacaatcttcgattaactgatatatctggacatctggtcctgcaacacttatcctctggataaatatatatacgttacatgtttcctcaatgagtcaatggcttggatctgtgttttttctatcatttgccgtctcgcgcgtgcgtgtctgtgcttaatcgataaatacacggactactcaggtacctttttcaaattgtgatggcaactgaattgtcaaatagcgacaaatacgacacaacaatatcgatttatgtagcattttctctaacaatgacttaaatttcgaatttcccatgtctcggtactgtcaatagctgcaaaggcttcgggtgttgctgttgccgcaggtttcatgtcttctcattcatatgatttcatcatgacaccaatttag

SEQ ID NO: 215219 - DNA, 2644 bp, Zea Mays
atgccgtacgaaagctggtggacgccgaaggtgaattcggtggcgccggtgccgaacccgatattcatggacgcctctcccctgaacccgccgccgctggtggaggaggagcttgtgctgcgccgcagtgctcgttgcctcaataggccaacccggcccagctacgcggaacaggagcctcctaaaaaacccggcggccggggccggagcaagcggaagagggacgaggagaaaccggagctggcaccggcgcagcagggtgccaagagtccggacaggaaggactccaaggatgaggcgggtgagaagaagccgacgcccatgattgcggcgctgccggtctcttgcgctggcgttgctgctgaagacgatgcgacggggaccgggaagagcgccaagctgagggtgaaggagacactgagggcgttcaatagccactacctccactttgtgcaggaggagcagaagagagctcaggctgcgctacaggagattaacgctaagagtggcctcaaacgtcagaccaaggggggtgaaaagaaacgcccatcaaagcggcctgacctgaaagcaatcaccaagatgcaagaaatgaatgccgtgctttatccagagaaaacgattggacatctaccagggatcgatgttggagatcatttctattctcgcgctgaaatggtagtgttgggcatacacagccattggctcaatggcattgacttcatggggctgaaataccaaggaaaggagtattcaaacttaactttcccactggccacctgtatcgtaatgtcgggggtatatgaagatgatctagacaaagctgatgaaattatttatactggtcaaggaggaaatgatttgcttggtaaccatcgccaaattggctctcaacagttgaaacgtgggaatttagcgttgaagaatagcagggagaatggtaatcctgtccgagttgttcgaggacatttgtcaaagaatagctacactggaaagatctacacctatgatgggctttacaaggttgtagatgactgggtgcagaagggagtgcaaggccatgttgttttcaaatttaagttgaagcggcttgagggtcagccatcattgacaacctctgaggtgcgatttactcgtgcagaagctccgacaactatttccgaattacccgggctggtttgtgatgacatctctggagggcaagaaaatattcctattcctgctactaacttggttgatgatccacctgttcctccatctggtttcaagtacttgaaatctctacaaattccaaaggacatcaagattccgtctagtattattggctgtgattgtgaaggaggttgtgctagcaacaaaaaatgtttgtgtgctcagcgcaatggttctgatctgccttatgtatcatataagaacattggcaggttggtggagccgaaagcagttgtatttgaatgtggggctaactgcagctgcaaccatgattgtgtaaacagaacatctcaacaaggtttgcagtaccgcttagaggtatttaagacagcttcaaaaggatggggagtcaggacttgggacactatcctccctggggctcccatctgtgagtacacaggggtgttgaggaggaccgaagatttggatggttcacagaacaactattgttttgacattgactgtcttcaaaccatgaagggtttggatggaagggagaaaagggctggatccgaaatgcacctgcctaatcttcatcctgagaatgattcagatgcacaacctgcacctgagtactgcatagacgctcactctattggcaactttgcaagatttataaatcacagctgccaacctaaccttttcgtccagtgcgtcttgagctcacacaatgatgttaaactggcgaaagtgatgcttttcgctgctgacaccatacttcctcttcaggagctatcctatgactacggttatcgattggacagtgttgttgggcctgatggaaaaattgtgaagctggcctgccactgtggtgctcctgattgccggaagcgcctctactaacctgcagtgtgtttatttctatttggatttttgaggaaacagcttatattgtaggaaaaacagtcatggtacctatgtagttgacatgctcttgatcatatatagcaaaagaggagcaatttatggggtgttcggtttaagaatgaaattagagatttagaggacatggtggtcatggtagcatattttgccgacaatcttcgattaactgatatatctggacatctggtcctgcaacacttatcctctggataaatatatatacgttacatgtttcctcaatgagtcaatggcttggatctgtgttttttctatcatttgccgtctcgcgcgtgcgtgtctgtgcttaatcgataaatacacggactactcaggtacctttttcaaattgtgatggcaactgaattgtcaaatagcgacaaatacgacacaacaatatcgatttatgtagcattttctctaacaatgacttaaatttcgaatttcccatgtctcggtactgtcaatagctgcaaaggcttcgggtgttgctgttgccgcaggtttcatgtcttctcattcatatgatttcatcatgacaccaatttag

SEQ ID NO: 215220 - DNA, 2867 bp, Zea Mays
atgccgtacgaaagctggtggacgccgaaggtgaattcggtggcgccggtgccgaacccgatattcatggacgcctctcccctgaacccgccgccgctggtggaggaggagcttgtgctgcgccgcagtgctcgttgcctcaataggccaacccggcccagctacgcggaacaggagcctcctaaaaaacccggcggccggggccggagcaagcggaagagggacgaggagaaaccggagctggcaccggcgcagcagggtgccaagagtccggacaggaaggactccaaggatgaggcgggtgagaagaagccgacgcccatgattgcggcgctgccggtctcttgcgctggcgttgctgctgaagacgatgcgacggggaccgggaagagcgccaagctgagggtgaaggagacactgagggcgttcaatagccactacctccactttgtgcaggaggagcagaagagagctcaggctgcgctacaggagattaacgctaagagtggcctcaaacgtcagaccaaggggggtgaaaagaaacgcccatcaaagcggcctgacctgaaagcaatcaccaagatgcaagaaatgaatgccgtgctttatccagagaaaacgattggacatctaccagggatcgatgttggagatcatttctattctcgcgctgaaatggtagtgttgggcatacacagccattggctcaatggcattgacttcatggggctgaaataccaaggaaaggagtattcaaacttaactttcccactggccacctgtatcgtaatgtcgggggtatatgaagatgatctagacaaagctgatgaaattatttatactggtcaaggaggaaatgatttgcttggtaaccatcgccaaattggctctcaacagttgaaacgtgggaatttagcgttgaagcagggagaatggtaatcctgtccgagttgttcgaggacatttgtcaaagaatagctacactggaaagatctacacctatgatgggctttacaaggttgtagatgactgggtgcagaagggagtgcaaggccatgttgttttcaaatttaagttgaagcggcttgagggtcagccatcattgacaacctctgaggtgcgatttactcgtgcagaagctccgacaactatttccgaattacccgggctggtttgtgatgacatctctggagggcaagaaaatattcctattcctgctactaacttggttgatgatccacctgttcctccatctggtttcaagtacttgaaatctctacaaattccaaaggacatcaagattccgtctagtattattggctgtgattgtgaaggaggttgtgctagcaacaaaaaatgtttgtgtgctcagcgcaatggttctgatctgccttatgtatcatataagaacattggcaggttggtggagccgaaagcagttgtatttgaatgtggggctaactgcagctgcaaccatgattgtgtaaacagaacatctcaacaaggtttgcagtaccgcttagaggtatttaagacagcttcaaaaggatggggagtcaggacttgggacactatcctccctggggctcccatctgtgagtacacaggggtgttgaggaggaccgaagatttggatggttcacagaacaactattgttttgacattgactgtcttcaaaccatgaagggtttggatggaagggagaaaagggctggatccgaaatgcacctgcctaatcttcatcctgagaatgattcagatgcacaacctgcacctgagtactgcatagacgctcactctattggcaactttgcaagatttataaatcacagctgccaacctaaccttttcgtccagtgcgtcttgagctcacacaatgatgttaaactggcgaaagtgatgcttttcgctgctgacaccatacttcctcttcaggagctatcctatgactacggttatcgattggacagtgttgttgggcctgatggaaaaattgtgaagctggcctgccactgtggtgctcctgattgccggaagcgcctctactaacctgcagtgtgtttatttctatttggatttttgaggaaacagcttatattgtaggaaaaacagtcatggtacctatgtagttgacatgctcttgatcatatatagcaaaagaggagcaatttatggggtgttcggtttaagaatgagttagtatatcatcttctcatttactatttttgcttggtttatgtaataaaatgagtcgatctatcaccaccttattcctcatagttagttagttagcactaacattagaaatgaagtcatcttatcaaatttaaggaatgagcttatgatgtaccaccttaatttggatgaagtgattcatcaaacaaacaccctattgatataatatagcattcttgttttgtgataattagagatttagaggacatggtggtcatggtagcatattttgccgacaatcttcgattaactgatatatctggacatctggtcctgcaacacttatcctctggataaatatatatacgttacatgtttcctcaatgagtcaatggcttggatctgtgttttttctatcatttgccgtctcgcgcgtgcgtgtctgtgcttaatcgataaatacacggactactcaggtacctttttcaaattgtgatggcaactgaattgtcaaatagcgacaaatacgacacaacaatatcgatttatgtagcattttctctaacaatgacttaaatttcgaatttcccatgtctcggtactgtcaatagctgcaaaggcttcgggtgttgctgttgccgcaggtttcatgtcttctcattcatatgatttcatcatgacaccaatttag

SEQ ID NO: 215221 - DNA, 2872 bp, Zea Mays
atgccgtacgaaagctggtggacgccgaaggtgaattcggtggcgccggtgccgaacccgatattcatggacgcctctcccctgaacccgccgccgctggtggaggaggagcttgtgctgcgccgcagtgctcgttgcctcaataggccaacccggcccagctacgcggaacaggagcctcctaaaaaacccggcggccggggccggagcaagcggaagagggacgaggagaaaccggagctggcaccggcgcagcagggtgccaagagtccggacaggaaggactccaaggatgaggcgggtgagaagaagccgacgcccatgattgcggcgctgccggtctcttgcgctggcgttgctgctgaagacgatgcgacggggaccgggaagagcgccaagctgagggtgaaggagacactgagggcgttcaatagccactacctccactttgtgcaggaggagcagaagagagctcaggctgcgctacaggagattaacgctaagagtggcctcaaacgtcagaccaaggggggtgaaaagaaacgcccatcaaagcggcctgacctgaaagcaatcaccaagatgcaagaaatgaatgccgtgctttatccagagaaaacgattggacatctaccagggatcgatgttggagatcatttctattctcgcgctgaaatggtagtgttgggcatacacagccattggctcaatggcattgacttcatggggctgaaataccaaggaaaggagtattcaaacttaactttcccactggccacctgtatcgtaatgtcgggggtatatgaagatgatctagacaaagctgatgaaattatttatactggtcaaggaggaaatgatttgcttggtaaccatcgccaaattggctctcaacagttgaaacgtgggaatttagcgttgaagaatagcagggagaatggtaatcctgtccgagttgttcgaggacatttgtcaaagaatagctacactggaaagatctacacctatgatgggctttacaaggttgtagatgactgggtgcagaagggagtgcaaggccatgttgttttcaaatttaagttgaagcggcttgagggtcagccatcattgacaacctctgaggtgcgatttactcgtgcagaagctccgacaactatttccgaattacccgggctggtttgtgatgacatctctggagggcaagaaaatattcctattcctgctactaacttggttgatgatccacctgttcctccatctggtttcaagtacttgaaatctctacaaattccaaaggacatcaagattccgtctagtattattggctgtgattgtgaaggaggttgtgctagcaacaaaaaatgtttgtgtgctcagcgcaatggttctgatctgccttatgtatcatataagaacattggcaggttggtggagccgaaagcagttgtatttgaatgtggggctaactgcagctgcaaccatgattgtgtaaacagaacatctcaacaaggtttgcagtaccgcttagaggtatttaagacagcttcaaaaggatggggagtcaggacttgggacactatcctccctggggctcccatctgtgagtacacaggggtgttgaggaggaccgaagatttggatggttcacagaacaactattgttttgacattgactgtcttcaaaccatgaagggtttggatggaagggagaaaagggctggatccgaaatgcacctgcctaatcttcatcctgagaatgattcagatgcacaacctgcacctgagtactgcatagacgctcactctattggcaactttgcaagatttataaatcacagctgccaacctaaccttttcgtccagtgcgtcttgagctcacacaatgatgttaaactggcgaaagtgatgcttttcgctgctgacaccatacttcctcttcaggagctatcctatgactacggttatcgattggacagtgttgttgggcctgatggaaaaattgtgaagctggcctgccactgtggtgctcctgattgccggaagcgcctctactaacctgcagtgtgtttatttctatttggatttttgaggaaacagcttatattgtaggaaaaacagtcatggtacctatgtagttgacatgctcttgatcatatatagcaaaagaggagcaatttatggggtgttcggtttaagaatgagttagtatatcatcttctcatttactatttttgcttggtttatgtaataaaatgagtcgatctatcaccaccttattcctcatagttagttagttagcactaacattagaaatgaagtcatcttatcaaatttaaggaatgagcttatgatgtaccaccttaatttggatgaagtgattcatcaaacaaacaccctattgatataatatagcattcttgttttgtgataattagagatttagaggacatggtggtcatggtagcatattttgccgacaatcttcgattaactgatatatctggacatctggtcctgcaacacttatcctctggataaatatatatacgttacatgtttcctcaatgagtcaatggcttggatctgtgttttttctatcatttgccgtctcgcgcgtgcgtgtctgtgcttaatcgataaatacacggactactcaggtacctttttcaaattgtgatggcaactgaattgtcaaatagcgacaaatacgacacaacaatatcgatttatgtagcattttctctaacaatgacttaaatttcgaatttcccatgtctcggtactgtcaatagctgcaaaggcttcgggtgttgctgttgccgcaggtttcatgtcttctcattcatatgatttcatcatgacaccaatttag

SEQ ID NO: 215222 - DNA, 550 bp, Zea Mays
gattgtgtgatgctttatacatttgtttgttctagcagagttaaagcctgaggaggttgctggtatcataaaggactttaatgaacctggtactcttgcaccaactggtcttttcgttggaggtacaaagtacatggtgatccaaggtgaacctggagttgtcatccgaggaaagaaggtacagtggggaatagattgtctgatagaagaaatgctttgatcattcccttttcgtatgcttatgttaattttaccgaaaaaacaaactcaattcatatctgtagtactccctccgttcttttttatttgttgcgttttagctcaaaaatgaactaccgggcgacaaatattcgaaagcggaggtagcactatattagcgttatgatatctaaatggatcaagctcttatagaattattacgcaagaggaatactgtatcaaatatgcctggatacatggtcatgatcactttcagttaattaatattcctgatgaactctgttagctgcatctgcaagcttttgtagcatgtattcaagatcactctacg

SEQ ID NO: 215223 - DNA, 5084 bp, Zea Mays
accttttgctctttaagatgtttatcagtactccgtcgacaaagctctggcagaagttatacgctaattcaattctgatgtaccagcagcagtcggcaataatctcacccttccatggaccaagctcatcgtcctcccggaggagagagaaagagagcagcaaaagtagactgatagccgtagtggttggtgcaagtcgctaggagagagaagagatagggataggaagagagagtgtgtggaagctagggaagagagagagagggaggggagatgcacacgcagagacgcaagcgatagaattgctaaacaaacaaaaaaaaaaaggcgagcaagagagagagagagaaggcaggcgaaccaaaccccaaggaggccaagacgcggacggcagcaggcaggcagccatgccgcggtcgccgtcaccatcgccgtcgccatccccatcgccggagaggcgccagaaccagcaccagcccgcgcgccggagggccgccgccgcctcgtcccagatgctgctgctccaccaccaccaccgcggcggcggcggccgctcgccgtcgccgccgccccgccgctcgctccgcccgcgccgcgccgccgccccctcctcccgcccgctcgtcgacgacttcttccccttcccctcctcgccgtcctcctcaccctctcgcccccgccagcgggggctgtcgccggagccgtccagctccgactccggatgcgacggtggcgccgccggctcctcggtctccgaccggcgccggcgcaagctcaagctcgtcgtcaagctctctcagctgcccccggaccagaatcaccgccgggccccactccccccacagtactctgacggctccgacggggctgatgacctggccggggacggaagcggcgacgaggagcaggtcaagccgcccaagaagcgccggatcgagccgcgcgccgacagatctcgccatcgcgaggttgttgctggtggtaggagcgaccccgcgagcgcgccgcggacgaagcggtcttcggtgccagggacagcgaggacgacgccactgccggaccggaaggcgctggagatgattctcgagaaacttcaaaagaaggatacatatggagtgtttgcggagcctgtggatccagaggagctgcctgattaccacgatgtgattgagcacccaatggacttcagcaccgtcaggaagaagcttgccaggaatgcatatcgctcgttcgagcaatttgaggatgatgtattcttaatttgcagcaacgcgatgcagtacaatgcacctgatacaatttatttcagacaggctcattccatacaagagctggcaagaaagaagtttcaggaactgagggatgaaggcatacctacagaaaatccgataaagagtgaacagaaaagtagaccaaatttctgcagtggagaacaggttaaaaaacctgttttgaggtatctggatgatgatctagacttcctgtcccgcaaagatcaagataaaagatccaattcaaataatgtgaatgatgacatgagcttcaacggtcatgttaagaaaaccttgtccaagaatgcaccggatcaaagttgcttattacagaaagagcggattaataaacccatctccagaaattcagaggacaatttaagttcctcattccacaaaaagcagcgtaagaaactgatctccagacattcggaggacgacctgaactgcccatctggcagagaccgagctaggaaagtcatttcaaaaaattcagaaaatgatgaaaactcccctttccacaaacatcaagtcaagaagtcagctccgcagagatcaatcgatggtctctcattccaggaaaagcacattaagaagccaattgatggaaatggagaagatccaggtttttcatcctgcaaaagacgcatcgaggatcccttttgcacaaatgttgaagatgcaagcttctcatctacgaaaaggctgtctgagaagcccatgtctgagaagcccatcagtataaacaaagaagaggaccttgaccattgccaccaggaatcatctaagaaacctagttgcagagttgagcaagatgatcatggttactcatgtgatgaagaggctgttaaaaagccgggttgtatggatagccacgatgcccaaggttcagatatctctgctgcaactattgcttctgttggagatggctctaatggtttaagcatgccacagcctaataattctgaacctactggttgtactgtcgccaatggggttatagacaaagatatcagctctccactagatgaaataagatctgagaagactgacgatattttggccaagcctagctacaagacaattgtggtagatgagaacagacggaaaacttatgatgcatctgaaggacagtctccaatggaatctgatccagtttttgatgttttctctgcggaaccaaaagagctcgtgaatgttggccttgatgctgaacactcatatgcatatgcaaggagtctggctcgttttgctggttcatttggcgctcaaggctggagaattgcttctgaccgcattcggcaagcattacctgctgatgtaaagtatggtcgtggttgggttggagaatatgagcccccattactgcctattcttgttgtgaatgatcaacctagatacctgaagagctctgagacaaatagacaaaggaatgcttctctgcctagggataatgaaaggctcagatcaacagaaacaaataatccgaaggatatgagacggatgaccactgacaacaatgtagttggagtgcctggacaattagacagtccagaatttaagccaagattatttggtgtttccaatgagcttcaacacaggagcacaggcacattatcactgcatgagaaccatagagtatctggtaatgttgcgaaaaccaaaagaacaaccaatgagaaaacgagaaaaggcacttcatcttccagtgcccgacctcgtgaaatgcagctacagaaaggagcttcttctggtgcacttgataaccttgcctcaaacaaaatggctggccagcctagaccgtttttgcaaccaccagaatcaaatagaacccagccaatgagaaaaattgactcatcaaaaaacaaaattccaattgaaatggcaccacagcaagttgagtgtgcaaaaggtgctgcttctggtgtgcatgacactcctttgtcagatgggcagcctaaacacttcttccagtcacaagcagcagcttcctctggtgtgcatgatatgcattcctctaatgggcagcctaaacactacttccagtcacaagcagcagcttcctctgatatgcatgctatgccttcctcaaatgggcagcctaaacactacttcaagtcacacgcagcagtttcctctgtcgtgcatgatatgccttcctccaatgggcagcctaaacaaattttccagtcacaagcagtagcttcttctggtgggcatgatatgccctcaaatgggcagtctaaacccttgttccagtcccaagaagcaactatactacagcccaaaaatgaagcaacgtgggtgtaccatggacgacctggtgatggaaaggttggaacatcaaacaaaagcagaccatcgaccagtattgggttcatcaataaaaatcatcaatcagtaaatgctgcaacttttgccatgaatttgaatggacagaagattgtcagtgaccatgcaaaatcagcaggcacaactgcaatgcctgtccaggtaaatataccaaacagaggtcttgatgctcctcggaacatgttctcagcatttccagctgctgttagggagaaccatagcattccaccagctccaatggctcaatcttggatttcatttggtgctactacagagaacaaaccaaccattgtcagcccaacttcccttgacaataattgtggctggaaaatgccatttgctaacgtccaaccttctgatgataccaaaataaatgccgttcctcagttatttaggcatcctgtccaggtagctagagagaactcggttcaaagcaagggtttggtaatatttccccagttggtgcagccagatttcgcgagatcacaagggcaaccacagtggcaggggctggttccccacatgcaacagaagccaggcaaggatgtactccgcccggacttgaacatcgggttcccatctccacgttcaccaccagcccgacaatcgtctggcatcaatttggaagcacagcagccagaccttgctttgcagttatgagctggggatagacactaccgggatttatgctataatctctaagcatgtaaaggcacgatgagctgaggtgtgaaagaaagcgaggacaattgggacatccggtacagggatcggtgatgatcgattgggatgtaggccttacatgccacatggcatcatcgcagctcatcaactcatcgcgtcgctgtacaaaagatatcagaaaatggatggatggacactgcttgaaatgagatcatgtctactgggggcattgtgataggagttcaaatcccagcattcggagaaatgctttgggagtttgggtggcatacatgtaggtagcatactagcaatgcccatgatcagaatactttggaggaacctctctgaccacaatacagctttcttcggtggaaattttggcaccagaatttaggctttcatttggtagtgtagacccctgtgtaatgcccgtatcgaaatgtatgttggttgtaaatggttttgcgttgaatagattgttagagtagggcagtggggagtggcctttacccccgtcttctgaatgaaattgcttcttttgtccatgatgtatgtagtagcaggaagccaggaactgaggtctgtgccctattcagttcaaatggcatgctgaagctaaaaaaggttgccaattctctcgttgcgatgcactgattcgtttgtccttgcatttgattctagccttgaagctgggatgtcattaatgatgagcaacgccaggcatgactttgctgataaactcttattcactggacataagtttgtttgaaactggaa

SEQ ID NO: 215224 - DNA, 3848 bp, Zea Mays
tcgtatatgatgatgtattcttaatttgcagcaacgcgatgcagtacaatgcacctgatacaatttatttcagacaggctcattccatacaagagctggcaagaaagaagtttcaggaactgagggatgaaggcatacctacagaaaatccgataaagagtgaacagaaaagtagaccaaatttctgcagtggagaacaggttaaaaaacctgttttgaggtatctggatgatgatctagacttcctgtcccgcaaagatcaagataaaagatccaattcaaataatgtgaatgatgacatgagcttcaacggtcatgttaagaaaaccttgtccaagaatgcaccggatcaaagttgcttattacagaaagagcggattaataaacccatctccagaaattcagaggacaatttaagttcctcattccacaaaaagcagcgtaagaaactgatctccagacattcggaggacgacctgaactgcccatctggcagagaccgagctaggaaagtcatttcaaaaaattcagaaaatgatgaaaactcccctttccacaaacatcaagtcaagaagtcagctccgcagagatcaatcgatggtctctcattccaggaaaagcacattaagaagccaattgatggaaatggagaagatccaggtttttcatcctgcaaaagacgcatcgaggatcccttttgcacaaatgttgaagatgcaagcttctcatctacgaaaaggctgtctgagaagcccatgtctgagaagcccatcagtataaacaaagaagaggaccttgaccattgccaccaggaatcatctaagaaacctagttgcagagttgagcaagatgatcatggttactcatgtgatgaagaggctgttaaaaagccgggttgtatggatagccacgatgcccaaggttcagatatctctgctgcaactattgcttctgttggagatggctctaatggtttaagcatgccacagcctaataattctgaacctactggttgtactgtcgccaatggggttatagacaaagatatcagctctccactagatgaaataagatctgagaagactgacgatattttggccaagcctagctacaagacaattgtggtagatgagaacagacggaaaacttatgatgcatctgaaggacagtctccaatggaatctgatccagtttttgatgttttctctgcggaaccaaaagagctcgtgaatgttggccttgatgctgaacactcatatgcatatgcaaggagtctggctcgttttgctggttcatttggcgctcaaggctggagaattgcttctgaccgcattcggcaagcattacctgctgatgtaaagtatggtcgtggttgggttggagaatatgagcccccattactgcctattcttgttgtgaatgatcaacctagatacctgaagagctctgagacaaatagacaaaggaatgcttctctgcctagggataatgaaaggctcagatcaacagaaacaaataatccgaaggatatgagacggatgaccactgacaacaatgtagttggagtgcctggacaattagacagtccagaatttaagccaagattatttggtgtttccaatgagcttcaacacaggagcacaggcacattatcactgcatgagaaccatagagtatctggtaatgttgcgaaaaccaaaagaacaaccaatgagaaaacgagaaaaggcacttcatcttccagtgcccgacctcgtgaaatgcagctacagaaaggagcttcttctggtgcacttgataaccttgcctcaaacaaaatggctggccagcctagaccgtttttgcaaccaccagaatcaaatagaacccagccaatgagaaaaattgactcatcaaaaaacaaaattccaattgaaatggcaccacagcaagttgagtgtgcaaaaggtgctgcttctggtgtgcatgacactcctttgtcagatgggcagcctaaacacttcttccagtcacaagcagcagcttcctctggtgtgcatgatatgcattcctctaatgggcagcctaaacactacttccagtcacaagcagcagcttcctctgatatgcatgctatgccttcctcaaatgggcagcctaaacactacttcaagtcacacgcagcagtttcctctgtcgtgcatgatatgccttcctccaatgggcagcctaaacaaattttccagtcacaagcagtagcttcttctggtgggcatgatatgccctcaaatgggcagtctaaacccttgttccagtcccaagaagcaactatactacagcccaaaaatgaagcaacgtgggtgtaccatggacgacctggtgatggaaaggttggaacatcaaacaaaagcagaccatcgaccagtattgggttcatcaataaaaatcatcaatcagtaaatgctgcaacttttgccatgaatttgaatggacagaagattgtcagtgaccatgcaaaatcagcaggcacaactgcaatgcctgtccaggtaaatataccaaacagaggtcttgatgctcctcggaacatgttctcagcatttccagctgctgttagggagaaccatagcattccaccagctccaatggctcaatcttggatttcatttggtgctactacagagaacaaaccaaccattgtcagcccaacttcccttgacaataattgtggctggaaaatgccatttgctaacgtccaaccttctgatgataccaaaataaatgccgttcctcagttatttaggcatcctgtccaggtagctagagagaactcggttcaaagcaagggtttggtaatatttccccagttggtgcagccagatttcgcgagatcacaagggcaaccacagtggcaggggctggttccccacatgcaacagaagccaggcaaggatgtactccgcccggacttgaacatcgggttcccatctccacgttcaccaccagcccgacaatcgtctggcatcaatttggaagcacagcagccagaccttgctttgcagttatgagctggggatagacactaccgggatttatgctataatctctaagcatgtaaaggcacgatgagctgaggtgtgaaagaaagcgaggacaattgggacatccggtacagggatcggtgatgatcgattgggatgtaggccttacatgccacatggcatcatcgcagctcatcaactcatcgcgtcgctgtacaaaagatatcagaaaatggatggatggacactgcttgaaatgagatcatgtctactgggggcattgtgataggagttcaaatcccagcattcggagaaatgctttgggagtttgggtggcatacatgtaggtagcatactagcaatgcccatgatcagaatactttggaggaacctctctgaccacaatacagctttcttcggtggaaattttggcaccagaatttaggctttcatttggtagtgtagacccctgtgtaatgcccgtatcgaaatgtatgttggttgtaaatggttttgcgttgaatagattgttagagtagggcagtggggagtggcctttacccccgtcttctgaatgaaattgcttcttttgtccatgatgtatgtagtagcaggaagccaggaactgaggtctgtgccctattcagttcaaatggcatgctgaagctaaaaaaggttgccaattctctcgttgcgatgcactgattcgtttgtccttgcatttgattctagccttgaagctgggatgtcattaatgatgagcaacgccaggcatgactttgctgataaactcttattcactggacataagtttgtttgaaactggaa

SEQ ID NO: 215225 - DNA, 2585 bp, Zea Mays
cattaacatctgcctaaacacatgatggccgagtgcatgcattatattctactccgtccatctacacagatgctaaacatgcatcaaacgaatcttggccagtaaaatacgatgattatttcccctacgccgattcaacaaatgcatactggactgggtattttacaagccgtccaactttcaagcgatacattcgagtgtacagtggatactatctggctgcgcgtcaaatagaatttttgatgggtaggagctccttgggattgttcacttccagcttggaagatgcaatgggtattgcccagcatcatgatgcaatctcaggtactgcaaaacagcacacgactgatgactactcaaaacggattgctattggagcatcaaaggtcgaaaaaggtgtaaacgctgctctgacttgtctaaccaactctaacaaaacatgtgtatcctctgtaccaaaatttagtcagtgtccacttctcaatataagctactgcccttcgactgaggaagcaatttcagcaacaaagcatttagttgtagttgtttacaatcctcttggttggaaacgtagtgacttcataagggttcctgtcaatgatgaagacctggtggtcaaaagctctgatggaaatactgttgtgtcacaaatagttgtggttgataatgtgacaaacaacttaagaaagttatatgtgaaggcttatcttggagtcacagcaaacaaggcccctaagtattggctaacatttcaagcttctgtaccaccaatgggatggaattcttactttattttgaaatcaactggatctggatacaacaacactgaacatgtccccgtcgtggttcctccaagtaacaacacaattgaagctggacaagggcatttaaagatgtcattctcttcagcatctggacaactagagagaatattcaattctgcctcaggaggagacttaccaattcaacaaagctttctttggtatagatcaagtaaaggagatgccttggacccacaggcatctggagcttatatatttagaccagatggtaatacaccaactattgcctcatcatcggtgactcttaaagttatccgtggacctctatttgatgaagtccatcaacaattcagctcgtggatttatcagattacacgactctacaagaacaaggagcatgctgaagttgaatacacgattgggccaatccctgttgacgatgacgtaggaaaggaggttatcacacagttgacagcaaatatgagtacaaacagtacattttatacagattccaatggaagggatttcctcaaaagggtgagaaactacagggaggattggaaccttcaagtgactcaaccagttgcaggaaattactacccggttaatctcggagtgtacatagtagatgagaaatatgaactatctgtccttgtggaccgtgctgccggagcatccagcattcaggatggtcagctagagattatgctacacaggcgtttgcttaaagatgatggcagaggtgtcgcggagccacttgatgaagtggtttgtgtggatcaagattgccaagggctaacggccaggggcacttactatatcaatgtcgagaagctaggccatggagctcattggcgccgtacatatggccagcaagtctactctccctttctccttgcttttactcatgaggatgcgacaagctcaaaaccctacagtgtggccaaagatagtatgatggatgggaattacagccttcctgacaacgttgcgattgtcactttgcagaatcttgatgatggtaccacactactccgcttggcccatcttttccaagctggcgaggacccgagatattcagaggtagcagaggttgatctgaaaaaggtctttggaaagagaactatcaaggaactgaccgagactaacctctccgcaaatcaaaagaagtcagagatgaagcagctcaactggagagttattgaggacgctgaaagtggtcctgccccggtaaaaggtggcccagttgattgtcgtgctctggtcgttgcgctgggacccatggagatacgcaccttcttgctgaaattttaatcgcatttaccgtgcttgtaattgtaaagaaaaaacaatgataaatggagaacttgctatcgttatttccttttgtaaaaaaaagatgaaatacccaaatagaacgttaaatttgcgcaaggtatgtacaatctacatcatgtgttttctattatatggttgctcatattagatcgcatcttggcttacaaaatgcatgatatccatgctgtggtggatgccatgtgagcttgcatatcctcaaagcacacacgtggctgcattaagcaatattactccctcctttcttttttatttgttgcattttagttaaaaagaaactagccgacgataaatagtcgagaacgagagtagtaacacctattagattattttcaacatattacttgtatcttttattttaaattttactatagttttattctctattttaaacttcaagtggcttatgcggtagatggaatccgctcacctctgccacacctccat

SEQ ID NO: 215226 - DNA, 3155 bp, Zea Mays
ctggttttatccatccatgccaagtttcgatgcacagttttcatgtattaccaaatgtccatatgtgaagaaccattaacatctgcctaaacacatgatggccgagtgcatgcattatattctactccgtccatctacacagatgctaaacatgcatcaaacgaatcttggccagtaaaatacgatgattatttcccctacgccgattcaacaaatgcatactggactgggtattttacaagccgtccaactttcaagcgatacattcgagtgtacagtggatactatctggctgcgcgtcaaatagaatttttgatgggtaggagctccttgggattgttcacttccagcttggaagatgcaatgggtattgcccagcatcatgatgcaatctcaggtactgcaaaacagcacacgactgatgactactcaaaacggattgctattggagcatcaaaggtcgaaaaaggtgtaaacgctgctctgacttgtctaaccaactctaacaaaacatgtgtatcctctgtaccaaaatttagtcagtgtccacttctcaatataagctactgcccttcgactgaggaagcaatttcagcaacaaagcatttagttgtagttgtttacaatcctcttggttggaaacgtagtgacttcataagggttcctgtcaatgatgaagacctggtggtcaaaagctctgatggaaatactgttgtgtcacaaatagttgtggttgataatgtgacaaacaacttaagaaagttatatgtgaaggcttatcttggagtcacagcaaacaaggcccctaagtattggctaacatttcaagcttctgtaccaccaatgggatggaattcttactttattttgaaatcaactggatctggtgaatgacttcatcttaatacttattttcatcaaactacaagtccttgagaaaatactattgttctttatgccaacaatttaatatcgttcttcttcaaacatgaaaccgctttatcaatagagagttatgatataacagagtaaggcatgcggcatggtaatatcacatattcacatgtctcataactagctttagttgtcacattaaactaccataaggacatgcaaagtttattttggctatttacaccaacttcagctttagtcactatataaaattgaaaaaaacccttacccaacaagattggttgtagacttgtagttatataacttatattcgattaagatgatagattttgatccgttttggatctttttccctctcttcttaatgaaatgatgcgcatgtctcttgcgcgttcgagaaaaaaaagagatagattttgaacacttttttaagttaagaaacagaaattgttcctaccacctatccaggatacaacaacactgaacatgtccccgtcgtggttcctccaagtaacaacacaattgaagctggacaagggcatttaaagatgtcattctcttcagcatctggacaactagagagaatattcaattctgcctcaggaggagacttaccaattcaacaaagctttctttggtatagatcaagtaaaggagatgccttggacccacaggcatctggagcttatatatttagaccagatggtaatacaccaactattgcctcatcatcggtgactcttaaagttatccgtggacctctatttgatgaagtccatcaacaattcagctcgtggatttatcagattacacgactctacaagaacaaggagcatgctgaagttgaatacacgattgggccaatccctgttgacgatgacgtaggaaaggaggttatcacacagttgacagcaaatatgagtacaaacagtacattttatacagattccaatggaagggatttcctcaaaagggtgagaaactacagggaggattggaaccttcaagtgactcaaccagttgcaggaaattactacccggttaatctcggagtgtacatagtagatgagaaatatgaactatctgtccttgtggaccgtgctgccggagcatccagcattcaggatggtcagctagagattatgctacacaggcgtttgcttaaagatgatggcagaggtgtcgcggagccacttgatgaagtggtttgtgtggatcaagattgccaagggctaacggccaggggcacttactatatcaatgtcgagaagctaggccatggagctcattggcgccgtacatatggccagcaagtctactctccctttctccttgcttttactcatgaggatgcgacaagctcaaaaccctacagtgtggccaaagatagtatgatggatgggaattacagccttcctgacaacgttgcgattgtcactttgcagaatcttgatgatggtaccacactactccgcttggcccatcttttccaagctggcgaggacccgagatattcagaggtagcagaggttgatctgaaaaaggtctttggaaagagaactatcaaggaactgaccgagactaacctctccgcaaatcaaaagaagtcagagatgaagcagctcaactggagagttattgaggacgctgaaagtggtcctgccccggtaaaaggtggcccagttgattgtcgtgctctggtcgttgcgctgggacccatggagatacgcaccttcttgctgaaattttaatcgcatttaccgtgcttgtaattgtaaagaaaaaacaatgataaatggagaacttgctatcgttatttccttttgtaaaaaaaagatgaaatacccaaatagaacgttaaatttgcgcaaggtatgtacaatctacatcatgtgttttctattatatggttgctcatattagatcgcatcttggcttacaaaatgcatgatatccatgctgtggtggatgccatgtgagcttgcatatcctcaaagcacacacgtggctgcattaagcaatattactccctcctttcttttttatttgttgcattttagttaaaaagaaactagccgacgataaatagtcgagaacgagagtagtaacacctattagattattttcaacatattacttgtatcttttattttaaattttactatagttttattctctattttaaacttcaagtggcttatgcggtagatggaatccgctcacctctgccacacctccat

SEQ ID NO: 215227 - DNA, 3403 bp, Zea Mays
gactatgctgttacaaaaacatccatgtcgtactcactcaaaggtacacagcctgtctcccaaattgtgagtactagcagatacaaggataccccacacaagataacatggataagcattggaggattctgaggataccaaggaccacaaaggataggaagatgagagcacaagccacagggaagctttcttccaaaggtggtgggcacagaaaagcctgacagtccaggccacagtacacaaactggtcgattcgggtcagctagagttcataaatggtgggtggtgtatgcatgatgaagctgttgtgcattacattgacatgattgatcagaccacacttggccaccgggtgatcaagaaacaattcaaaaagattccgagagctggctggcaaatcgatcctttcggtcattctgcagttcaagcttatttgcttggagcagagcttggtttcgattccgtgcattttgcaagaatcgattaccaagatagggcaacccggaaagcaaataagggcctagaagttatatggcgtggctcaagacctgttggttcatcatcacagatcttcacgaatgtatttccagtccattatagcgcaccagttggcttcagcttcgaagttttggctgaaaatgtcatacccgttcaggatgacatgtcgctgtttgactacaatgtccaagaacgtgtagatgattttgttgctgcagccatagcacaggcaaacgttacacgtacaaaccacataatgtggaccatgggggatgattttaactaccagtatgctgaatcctggttccgaaatatggacaaacttatccagtatgtgaacaaggatggccgagtgcatgcattatattctactccgtccatctacacagatgctaaacatgcatcaaacgaatcttggccagtaaaatacgatgattatttcccctacgccgattcaacaaatgcatactggactgggtattttacaagccgtccaactttcaagcgatacattcgagtgtacagtggatactatctggctgcgcgtcaaatagaatttttgatgggtaggagctccttgggattgttcacttccagcttggaagatgcaatgggtattgcccagcatcatgatgcaatctcaggtactgcaaaacagcacacgactgatgactactcaaaacggattgctattggagcatcaaaggtcgaaaaaggtgtaaacgctgctctgacttgtctaaccaactctaacaaaacatgtgtatcctctgtaccaaaatttagtcagtgtccacttctcaatataagctactgcccttcgactgaggaagcaatttcagcaacaaagcatttagttgtagttgtttacaatcctcttggttggaaacgtagtgacttcataagggttcctgtcaatgatgaagacctggtggtcaaaagctctgatggaaatactgttgtgtcacaaatagttgtggttgataatgtgacaaacaacttaagaaagttatatgtgaaggcttatcttggagtcacagcaaacaaggcccctaagtattggctaacatttcaagcttctgtaccaccaatgggatggaattcttactttattttgaaatcaactggatctggatacaacaacactgaacatgtccccgtcgtggttcctccaagtaacaacacaattgaagctggacaagggcatttaaagatgtcattctcttcagcatctggacaactagagagaatattcaattctgcctcaggaggagacttaccaattcaacaaagctttctttggtatagatcaagtaaaggagatgccttggacccacaggcatctggagcttatatatttagaccagatggtaatacaccaactattgcctcatcatcggtgactcttaaagttatccgtggacctctatttgatgaagtccatcaacaattcagctcgtggatttatcagattacacgactctacaagaacaaggagcatgctgaagttgaatacacgattgggccaatccctgttgacgatgacgtaggaaaggaggttatcacacagttgacagcaaatatgagtacaaacagtacattttatacagattccaatggaagggatttcctcaaaagggtgagaaactacagggaggattggaaccttcaagtgactcaaccagttgcaggaaattactacccggttaatctcggagtgtacatagtagatgagaaatatgaactatctgtccttgtggaccgtgctgccggagcatccagcattcaggatggtcagctagagattatgctacacaggcgtttgcttaaagatgatggcagaggtgtcgcggagccacttgatgaagtggtttgtgtggatcaagattgccaagggctaacggccaggggcacttactatatcaatgtcgagaagctaggccatggagctcattggcgccgtacatatggccagcaagtctactctccctttctccttgcttttactcatgaggatgcgacaagctcaaaaccctacagtgtggccaaagatagtatgatggatgggaattacagccttcctgacaacgttgcgattgtcactttgcagaatcttgatgatggtaccacactactccgcttggcccatcttttccaagctggcgaggacccgagatattcagaggtagcagaggttgatctgaaaaaggtctttggaaagagaactatcaaggaactgaccgagactaacctctccgcaaatcaaaagaagtcagagatgaagcagctcaactggagagttattgaggacgctgaaagtggtcctgccccggtaaaaggtggcccagttgattgtcgtgctctggtcgttgcgctgggacccatggagatacgcaccttcttgctgaaattttaatcgcatttaccgtgcttgtaattgtaaagaaaaaacaatgataaatggagaacttgctatcgttatttccttttgtaaaaaaaagatgaaatacccaaatagaacgttaaatttgcgcaaggtatgtacaatctacatcatgtgttttctattatatggttgctcatattagatcgcatcttggcttacaaaatgcatgatatccatgctgtggtggatgccatgtgagcttgcatatcctcaaagcacacacgtggctgcattaagcaatattactccctcctttcttttttatttgttgcattttagttaaaaagaaactagccgacgataaatagtcgagaacgagagtagtaacacctattagattattttcaacatattacttgtatcttttattttaaattttactatagttttattctctattttaaacttcaagtggcttatgcggtagatggaatccgctcacctctgccacacctccat

SEQ ID NO: 215228 - DNA, 4017 bp, Zea Mays
gccatcatggcgccgacgcttctgctggtagcccttgtagcgctcgcggtggcagcagcaacgccgatggtgatggaggcatcggcgttcacggaggggtgcaacaataggagcacgccgggtggtggtggaggcaccgcggtggggaacaagctgaacgtgcacttggtgccgcactcgcacgacgacgtcgggtggctcatgaccatcgaccagtactacgtcggatccaacaactccatccagggcgcgtgtgtgatgaacacactcgactccgtggtggacgcgctcgccaaggatcctgctcgcaagttcatcgtcgtcgagcaggctttcttccaaaggtggtgggcacagaaaagcctgacagtccaggccacagtacacaaactggtcgattcgggtcagctagagttcataaatggtgggtggtgtatgcatgatgaagctgttgtgcattacattgacatgattgatcagaccacacttggccaccgggtgatcaagaaacaattcaaaaagattccgagagctggctggcaaatcgatcctttcggtcattctgcagttcaagcttatttgcttggagcagagaatcgattaccaagatagggcaacccggaaagcaaataagggcctagaagttatatggcgtggctcaagacctgttggttcatcatcacagatcttcacgaatgtatttccagtccattatagcgcaccagttggcttcagcttcgaagttttggctgaaaatgtcatacccgttcaggatgacatgtcgctgtttgactacaatgtccaagaacgtgtagatgattttgttgctgcagccatagcacaggcaaacgttacacgtacaaaccacataatgtggaccatgggggatgattttaactaccagtatgctgaatcctggttccgaaatatggacaaacttatccagtatgtgaacaaggatggccgagtgcatgcattatattctactccgtccatctacacagatgctaaacatgcatcaaacgaatcttggccagtaaaatacgatgattatttcccctacgccgattcaacaaatgcatactggactgggtattttacaagccgtccaactttcaagcgatacattcgagtgtacagtggatactatctggctgcgcgtcaaatagaatttttgatgggtaggagctccttgggattgttcacttccagcttggaagatgcaatgggtattgcccagcatcatgatgcaatctcaggtactgcaaaacagcacacgactgatgactactcaaaacggattgctattggagcatcaaaggtcgaaaaaggtgtaaacgctgctctgacttgtctaaccaactctaacaaaacatgtgtatcctctgtaccaaaatttagtcagtgtccacttctcaatataagctactgcccttcgactgaggaagcaatttcagcaacaaagcatttagttgtagttgtttacaatcctcttggttggaaacgtagtgacttcataagggttcctgtcaatgatgaagacctggtggtcaaaagctctgatggaaatactgttgtgtcacaaatagttgtggttgataatgtgacaaacaacttaagaaagttatatgtgaaggcttatcttggagtcacagcaaacaaggcccctaagtattggctaacatttcaagcttctgtaccaccaatgggatggaattcttactttattttgaaatcaactggatctggtgaatgacttcatcttaatacttattttcatcaaactacaagtccttgagaaaatactattgttctttatgccaacaatttaatatcgttcttcttcaaacatgaaaccgctttatcaatagagagttatgatataacagagtaaggcatgcggcatggtaatatcacatattcacatgtctcataactagctttagttgtcacattaaactaccataaggacatgcaaagtttattttggctatttacaccaacttcagctttagtcactatataaaattgaaaaaaacccttacccaacaagattggttgtagacttgtagttatataacttatattcgattaagatgatagattttgatccgttttggatctttttccctctcttcttaatgaaatgatgcgcatgtctcttgcgcgttcgagaaaaaaaagagatagattttgaacacttttttaagttaagaaacagaaattgttcctaccacctatccaggatacaacaacactgaacatgtccccgtcgtggttcctccaagtaacaacacaattgaagctggacaagggcatttaaagatgtcattctcttcagcatctggacaactagagagaatattcaattctgcctcaggaggagacttaccaattcaacaaagctttctttggtatagatcaagtaaaggagatgccttggacccacaggcatctggagcttatatatttagaccagatggtaatacaccaactattgcctcatcatcggtgactcttaaagttatccgtggacctctatttgatgaagtccatcaacaattcagctcgtggatttatcagattacacgactctacaagaacaaggagcatgctgaagttgaatacacgattgggccaatccctgttgacgatgacgtaggaaaggaggttatcacacagttgacagcaaatatgagtacaaacagtacattttatacagattccaatggaagggatttcctcaaaagggtgagaaactacagggaggattggaaccttcaagtgactcaaccagttgcaggaaattactacccggttaatctcggagtgtacatagtagatgagaaatatgaactatctgtccttgtggaccgtgctgccggagcatccagcattcaggatggtcagctagagattatgctacacaggcgtttgcttaaagatgatggcagaggtgtcgcggagccacttgatgaagtggtttgtgtggatcaagattgccaagggctaacggccaggggcacttactatatcaatgtcgagaagctaggccatggagctcattggcgccgtacatatggccagcaagtctactctccctttctccttgcttttactcatgaggatgcgacaagctcaaaaccctacagtgtggccaaagatagtatgatggatgggaattacagccttcctgacaacgttgcgattgtcactttgcagaatcttgatgatggtaccacactactccgcttggcccatcttttccaagctggcgaggacccgagatattcagaggtagcagaggttgatctgaaaaaggtctttggaaagagaactatcaaggaactgaccgagactaacctctccgcaaatcaaaagaagtcagagatgaagcagctcaactggagagttattgaggacgctgaaagtggtcctgccccggtaaaaggtggcccagttgattgtcgtgctctggtcgttgcgctgggacccatggagatacgcaccttcttgctgaaattttaatcgcatttaccgtgcttgtaattgtaaagaaaaaacaatgataaatggagaacttgctatcgttatttccttttgtaaaaaaaagatgaaatacccaaatagaacgttaaatttgcgcaaggtatgtacaatctacatcatgtgttttctattatatggttgctcatattagatcgcatcttggcttacaaaatgcatgatatccatgctgtggtggatgccatgtgagcttgcatatcctcaaagcacacacgtggctgcattaagcaatattactccctcctttcttttttatttgttgcattttagttaaaaagaaactagccgacgataaatagtcgagaacgagagtagtaacacctattagattattttcaacatattacttgtatcttttattttaaattttactatagttttattctctattttaaacttcaagtggcttatgcggtagatggaatccgctcacctctgccacacctccat

SEQ ID NO: 215229 - DNA, 4859 bp, Zea Mays
atggcacatgcgcacggggcccgcgcgctcggagggcggcagcggcgggccgtgtggccaccgctacactccgagtccagagaaatacagcgcattggcgcatggcctcccggcggagttcgcccgcggcggcctctgtggccgcgcgctctcggcatgtgagcccatgaggcgcgtgagcaggagctcgtggctggcaccaaggtgcggcactgcggccgctgccacttaaatcgcctggctcgcgcgcggaagacgggagggagaggcctcctctcatatccaccgcaactagtccaccgtaaaagcatgagctcccgcgcggctcggccatggcgagccagcgcaacccgtgaacgcggcggccggcgcaagcacaggatggactgcgcgccctttgcggccatctgtgagcggcggcgcaagatccgcgtctggcgcagagaagaaaggcgcggcggcgctcgggaccctggctcgcgtgcgcagggccgcgatgtcatggcagcgcctcccatccgctgcggcctggcgaccccgacgtccatgacaatatcacgcgcgggagcggaggtcccagaagataagcggcggcgtgaggagcagagcacgtctgttgatgattaatatgaggtcttgttggagccttaagtcttgccgaagatacaaaggtcccaccaggcagggtgaccacagctggttggttggttacgaaggagcccatcgtgagggcagggcccggtactcatcacaaaagaaacgccaactccaagaaaccaacgggtctgcgctgtaggcgaattcccactccacgccatcatggcgccgacgcttctgctggtagcccttgtagcgctcgcggtggcagcagcaacgccgatggtgatggaggcatcggcgttcacggaggggtgcaacaataggagcacgccgggtggtggtggaggcaccgcggtggggaacaagctgaacgtgcacttggtgccgcactcgcacgacgacgtcgggtggctcatgaccatcgaccagtactacgtcggatccaacaactccatccagggcgcgtgtgtgatgaacacactcgactccgtggtggacgcgctcgccaaggatcctgctcgcaagttcatcgtcgtcgagcaggctttcttccaaaggtggtgggcacagaaaagcctgacagtccaggccacagtacacaaactggtcgattcgggtcagctagagttcataaatggtgggtggtgtatgcatgatgaagctgttgtgcattacattgacatgattgatcagaccacacttggccaccgggtgatcaagaaacaattcaaaaagattccgagagctggctggcaaatcgatcctttcggtcattctgcagttcaagcttatttgcttggagcagagcttggtttcgattccgtgcattttgcaagaatcgattaccaagatagggcaacccggaaagcaaataagggcctagaagttatatggcgtggctcaagacctgttggttcatcatcacagatcttcacgaatgtatttccagtccattatagcgcaccagttggcttcagcttcgaagttttggctgaaaatgtcatacccgttcaggatgacatgtcgctgtttgactacaatgtccaagaacgtgtagatgattttgttgctgcagccatagcacaggcaaacgttacacgtacaaaccacataatgtggaccatgggggatgattttaactaccagtatgctgaatcctggttccgaaatatggacaaacttatccagtatgtgaacaaggatggccgagtgcatgcattatattctactccgtccatctacacagatgctaaacatgcatcaaacgaatcttggccagtaaaatacgatgattatttcccctacgccgattcaacaaatgcatactggactgggtattttacaagccgtccaactttcaagcgatacattcgagtgtacagtggatactatctggctgcgcgtcaaatagaatttttgatgggtaggagctccttgggattgttcacttccagcttggaagatgcaatgggtattgcccagcatcatgatgcaatctcaggtactgcaaaacagcacacgactgatgactactcaaaacggattgctattggagcatcaaaggtcgaaaaaggtgtaaacgctgctctgacttgtctaaccaactctaacaaaacatgtgtatcctctgtaccaaaatttagtcagtgtccacttctcaatataagctactgcccttcgactgaggaagcaatttcagcaacaaagcatttagttgtagttgtttacaatcctcttggttggaaacgtagtgacttcataagggttcctgtcaatgatgaagacctggtggtcaaaagctctgatggaaatactgttgtgtcacaaatagttgtggttgataatgtgacaaacaacttaagaaagttatatgtgaaggcttatcttggagtcacagcaaacaaggcccctaagtattggctaacatttcaagcttctgtaccaccaatgggatggaattcttactttattttgaaatcaactggatctggtgaatgacttcatcttaatacttattttcatcaaactacaagtccttgagaaaatactattgttctttatgccaacaatttaatatcgttcttcttcaaacatgaaaccgctttatcaatagagagttatgatataacagagtaaggcatgcggcatggtaatatcacatattcacatgtctcataactagctttagttgtcacattaaactaccataaggacatgcaaagtttattttggctatttacaccaacttcagctttagtcactatataaaattgaaaaaaacccttacccaacaagattggttgtagacttgtagttatataacttatattcgattaagatgatagattttgatccgttttggatctttttccctctcttcttaatgaaatgatgcgcatgtctcttgcgcgttcgagaaaaaaaagagatagattttgaacacttttttaagttaagaaacagaaattgttcctaccacctatccaggatacaacaacactgaacatgtccccgtcgtggttcctccaagtaacaacacaattgaagctggacaagggcatttaaagatgtcattctcttcagcatctggacaactagagagaatattcaattctgcctcaggaggagacttaccaattcaacaaagctttctttggtatagatcaagtaaaggagatgccttggacccacaggcatctggagcttatatatttagaccagatggtaatacaccaactattgcctcatcatcggtgactcttaaagttatccgtggacctctatttgatgaagtccatcaacaattcagctcgtggatttatcagattacacgactctacaagaacaaggagcatgctgaagttgaatacacgattgggccaatccctgttgacgatgacgtaggaaaggaggttatcacacagttgacagcaaatatgagtacaaacagtacattttatacagattccaatggaagggatttcctcaaaagggtgagaaactacagggaggattggaaccttcaagtgactcaaccagttgcaggaaattactacccggttaatctcggagtgtacatagtagatgagaaatatgaactatctgtccttgtggaccgtgctgccggagcatccagcattcaggatggtcagctagagattatgctacacaggcgtttgcttaaagatgatggcagaggtgtcgcggagccacttgatgaagtggtttgtgtggatcaagattgccaagggctaacggccaggggcacttactatatcaatgtcgagaagctaggccatggagctcattggcgccgtacatatggccagcaagtctactctccctttctccttgcttttactcatgaggatgcgacaagctcaaaaccctacagtgtggccaaagatagtatgatggatgggaattacagccttcctgacaacgttgcgattgtcactttgcagaatcttgatgatggtaccacactactccgcttggcccatcttttccaagctggcgaggacccgagatattcagaggtagcagaggttgatctgaaaaaggtctttggaaagagaactatcaaggaactgaccgagactaacctctccgcaaatcaaaagaagtcagagatgaagcagctcaactggagagttattgaggacgctgaaagtggtcctgccccggtaaaaggtggcccagttgattgtcgtgctctggtcgttgcgctgggacccatggagatacgcaccttcttgctgaaattttaatcgcatttaccgtgcttgtaattgtaaagaaaaaacaatgataaatggagaacttgctatcgttatttccttttgtaaaaaaaagatgaaatacccaaatagaacgttaaatttgcgcaaggtatgtacaatctacatcatgtgttttctattatatggttgctcatattagatcgcatcttggcttacaaaatgcatgatatccatgctgtggtggatgccatgtgagcttgcatatcctcaaagcacacacgtggctgcattaagcaatattactccctcctttcttttttatttgttgcattttagttaaaaagaaactagccgacgataaatagtcgagaacgagagtagtaacacctattagattattttcaacatattacttgtatcttttattttaaattttactatagttttattctctattttaaacttcaagtggcttatgcggtagatggaatccgctcacctctgccacacctccat

SEQ ID NO: 215230 - DNA, 1308 bp, Zea Mays
tggagcagagatcttcacgaatgtatttccagtccattatagcgcaccagttggcttcagcttcgaagttttggctgaaaatgtcatacccgttcaggatgacatgtcgctgtttgactacaatgtccaagaacgtgtagatgattttgttgctgcagccatagcacaggcaaacgttacacgtacaaaccacataatgtggaccatgggggatgattttaactaccagtatgctgaatcctggttccgaaatatggacaaacttatccagtatgtgaacaaggatggccgagtgcatgcattatattctactccgtccatctacacagatgctaaacatgcatcaaacgaatcttggccagtaaaatacgatgattatttcccctacgccgattcaacaaatgcatactggactgggtattttacaagccgtccaactttcaagcgatacattcgagtgtacagtggatactatctggctgcgcgtcaaatagaatttttgatgggtaggagctccttgggattgttcacttccagcttggaagatgcaatgggtattgcccagcatcatgatgcaatctcaggtactgcaaaacagcacacgactgatgactactcaaaacggattgctattggagcatcaaaggtcgaaaaaggtgtaaacgctgctctgacttgtctaaccaactctaacaaaacatgtgtatcctctgtaccaaaatttagtcagtgtccacttctcaatataagctactgcccttcgactgaggaagcaatttcagcaacaaagcatttagttgtagttgtttacaatcctcttggttggaaacgtagtgacttcataagggttcctgtcaatgatgaagacctggtggtcaaaagctctgatggaaatactgttgtgtcacaaatagttgtggttgataatgtgacaaacaacttaagaaagttatatgtgaaggcttatcttggagtcacagcaaacaaggcccctaagtattggctaacatttcaagcttctgtaccaccaatgggatggaattcttactttattttgaaatcaactggatctgggagacttaccaattcaacaaagctttctttggtatagatcaagtaaaggagatgccttggacccacaggcatctggagcttatatatttagaccagatggtaatacaccaactattgcctcatcatcggtgactcttaaagttatccgtggacctctatttgatgaagtccatcaacaattcagctcgtggatttatcagttttggtctctgggaccttctttcttcttaattt

SEQ ID NO: 215231 - DNA, 2134 bp, Zea Mays
atggcacatgcgcacggggcccgcgcgctcggagggcggcagcggcgggccgtgtggccaccgctacactccgagtccagagaaatacagcgcattggcgcatggcctcccggcggagttcgcccgcggcggcctctgtggccgcgcgctctcggcatgtgagcccatgaggcgcgtgagcaggagctcgtggctggcaccaaggtgcggcactgcggccgctgccacttaaatcgcctggctcgcgcgcggaagacgggagggagaggcctcctctcatatccaccgcaactagtccaccgtaaaagcatgagctcccgcgcggctcggccatggcgagccagcgcaacccgtgaacgcggcggccggcgcaagcacaggatggactgcgcgccctttgcggccatctgtgagcggcggcgcaagatccgcgtctggcgcagagaagaaaggcgcggcggcgctcgggaccctggctcgcgtgcgcagggccgcgatgtcatggcagcgcctcccatccgctgcggcctggcgaccccgacgtccatgacaatatcacgcgcgggagcggaggtcccagaagataagcggcggcgtgaggagcagagaatcgattaccaagatagggcaacccggaaagcaaataagggcctagaagttatatggcgtggctcaagacctgttggttcatcatcacagatcttcacgaatgtatttccagtccattatagcgcaccagttggcttcagcttcgaagttttggctgaaaatgtcatacccgttcaggatgacatgtcgctgtttgactacaatgtccaagaacgtgtagatgattttgttgctgcagccatagcacaggcaaacgttacacgtacaaaccacataatgtggaccatgggggatgattttaactaccagtatgctgaatcctggttccgaaatatggacaaacttatccagtatgtgaacaaggatggccgagtgcatgcattatattctactccgtccatctacacagatgctaaacatgcatcaaacgaatcttggccagtaaaatacgatgattatttcccctacgccgattcaacaaatgcatactggactgggtattttacaagccgtccaactttcaagcgatacattcgagtgtacagtggatactatctggctgcgcgtcaaatagaatttttgatgggtaggagctccttgggattgttcacttccagcttggaagatgcaatgggtattgcccagcatcatgatgcaatctcaggtactgcaaaacagcacacgactgatgactactcaaaacggattgctattggagcatcaaaggtcgaaaaaggtgtaaacgctgctctgacttgtctaaccaactctaacaaaacatgtgtatcctctgtaccaaaatttagtcagtgtccacttctcaatataagctactgcccttcgactgaggaagcaatttcagcaacaaagcatttagttgtagttgtttacaatcctcttggttggaaacgtagtgacttcataagggttcctgtcaatgatgaagacctggtggtcaaaagctctgatggaaatactgttgtgtcacaaatagttgtggttgataatgtgacaaacaacttaagaaagttatatgtgaaggcttatcttggagtcacagcaaacaaggcccctaagtattggctaacatttcaagcttctgtaccaccaatgggatggaattcttactttattttgaaatcaactggatctggatacaacaacactgaacatgtccccgtcgtggttcctccaagtaacaacacaattgaagctggacaagggcatttaaagatgtcattctcttcagcatctggacaactagagagaatattcaattctgcctcaggaggagacttaccaattcaacaaagctttctttggtatagatcaagtaaaggagatgccttggacccacaggcatctggagcttatatatttagaccagatggtaatacaccaactattgcctcatcatcggtgactcttaaagttatccgtggacctctatttgatgaagtccatcaacaattcagctcgtggatttatcagttttggtctctgggaccttctttcttcttaattt

SEQ ID NO: 215232 - DNA, 1101 bp, Zea Mays
agctgcactgcagcacacgcgccaccgaagcgctctgcccacctcgctcccctccagtggccgccagcgcggctcagcggtccatcctcctgacgccacctgcaacggcgtcaggcggtgatccattccaactcgcgctccgtcctggcaatcactttgggaaggtggtcagtggaatagctttgcttaaaaagcttgaagcagttggtagtgaaactggaaatccttcttatcaagtgaaaattgtagactgtggtgaagtttccaacacaaattctcaggatccgctaaagggagataaagtaagctcaaagacagataacagcagttcagacagtgaaaagggtggccatcgtaccaagcgttccttaccgaaaggaatgatccaggtggaagctccaggaacaatcccattcagtttgatgtaaatttaatgaaaccagtaaatgtagatggcaacattggtggtgataatgcagaggctagcatgtctagaactggtgaaggaaggcatctgccaagcaatgaacctttgtccaccaatggtaaagatttaggtgtgggttctgcagacaatgggcaacctcaacaaatcaggaaaggacgtggttttactcagaagtatgggtatgcacgccgatataggacgccatctcccgagcgtccctctgtttgaccccgctacgatggagggagagatgatagatggaacaatttcaataggtatgaaagaaatggtccttacagtagacgctcgccagtaaggagataccatggctcgccaagagccaatagcccatccagtactacccaagcctcaaccgttcaaagtgttgctcgaaggggatatgtacagtgttttctttaaatgaaaccgactcatactactcggcctacacagtgcccattctgcaaaacgcccaattatgctgtggagtatcgtggcatcaaaacaaaggagtaaaggagcatagagcagtttacagacaattgaaaaagagaattgatcttttttatgggcgaagtgttgaagatggctttggtgaaggaaatgtcttgttagcatcaagtaagtggcgacatcacaacccctacaagctt

SEQ ID NO: 215233 - DNA, 1172 bp, Zea Mays
ttactctgcgaaagttgcggcggaggcggaacagctagcgggcggcggcggaggcaggtgaacgcacgagacagcggctgcttcggcgatggtggagaagccctggcgcttcttgtgcttggcgttggccgtgcatttgacgaagacgattccccgacgcttcaccaccttgcagaaccggcacaggcgcttcaccgccgcacggaccttcatcttcttctttgttcccccgctcgcctcggggccttctcgtcttccttccgatgctcggcgacctggatgccctgcaacttctcctccttcgtccgccagacaccatggatggaagcagttggtggtacgggaacgtccgcacgccgaacccagtcatgtcacaggcggcgtccatatccgctagccccgggctcaccatctcaacgaatcatgctcttgaaagcgagtcagactccgatagcgaatcgctgtatgaggtagagggagttccatacgagcgaggtaacagatccattgagacgaagcgaataagaaggatggtgtccaacagggagtctgcgcggcggtctaggaggaggaaacatgcacagttgtctgaccttgagtcacaggtttgaacgactcaaaggtgaaaacgtaacactgttccagcaattttcagatgccaaccaacagttcagtactgcagtcacagacaacagaatcctcaaattcgatgtagaagcgttaagaatcaaggtaaagatggcagaggatatggtagcgagaagtgttgtatcgtgtggcctaggtgaccttggcctggcaccatacgtgaactcaaggaagatgtgtcaagctttgaatgtgctcacagggttggatttactagggagtgatgcgttcagtggtccaaccgcaggtacacgagtacagaagtcaccagtacagagcactgcaagcctagagagtctggataaccgaaagtccaacgaggtgaccagttgcgcagcggacatttgcccttgaacttcaagccattgatctgattcaaagcttgctccacccccccaaaaaaaggaccagagtttgtcaactcaaatagctggtggcttgagcagagcttgcacatttttgccaatagtgtctagagttctattttttttactgttattagctgctattttgactatcttctg

SEQ ID NO: 215234 - DNA, 3858 bp, Zea Mays
tcggttcgacaactcgatttcgatcccccacttgtttcagagatatctgaagggagcagaagcaggagcagcagagcgagcaggcagagaagggacgatcgagcaagcaagctccgggcagggagagatgaggaagcccaggctgagtgtcggcggcggcggcggcctcctccatggctttccctcccccgtgctgctgttcttgctgctgctgctgctgagttcttggagggtggctgcccaggcgcagcaggcgcctcagactgatccggtggaagcggcggcggtgaacgcgatcctgagcaagctgaggctgagcgcgccgccgtcgtggaacatcagcgggaacccctgcagcggcgccgcgacggacgacacgtccatcgacgacaaccctgcgttcaacccggccatcaagtgcgactgttccgaccaaaacaacacgctctgccatgtcactagactgaagataaacacactggacgcagttggccccatacctgaggagctgcggaacctcactcacctcgttaaactggacttcagaaaaaattacttctacgggccattaccagcattcattggagaactaactgctctggaatcaatgaccgtgggcatcaatgcactatctggacctgtcccaaaggagcttggaaatcttaccaatctcttatcactggcattgggctcaaataattttaacggcacacttcctgatgagctggggaaactgacaaaacttcgacaaatatacattgatagtaacgacttcagtggttctctaccatcgacattgtcccagctgaagaacctgtcaatcttgtgggcatcagacaataatttcagtgggcagattcctgattatcttgggagtttgactaacttgacccaactgaggctccaagggaactcttttcaaggtcccattcccacaagtctttctaatcttgtcaacttaaaaaaattaaggataggcgatatagtgaatggaagctcttcgctgtcattcattggcaatttgacatctttgggtgaactagtgttgaggaacagcattatatctgatacactagcatcggtagacttctccaactttgtaaatttatacttattggacctgagtttcaacaatatcacaggacaaatacctcaatcaattttgaatcttacatctcttagttatttatttctagggaataatagcctttcgggaagtctgcctgccacaaaaagtcccttagtgaccaatatagatttttcatacaaccatatctcaggaaactttccttcttgggctactgacaaaaatttacaattgaatttggtagcaaacgactttgtgatggatagctccaataacagtgttttgccatggggattggagtgtcttcagcatagtactccctgtttcctcggttctccaaagtctgcgtcctttgcggtggactgtggtggtagtagagcaatatcaggttcagataattctgtctatcaagctgataatgccaaccttagtgctgcatcgtactatgttgcgggtgcacctacatgggccgttagcagcgttgggttattcttggacgcagatgcacccaatgcaagttacatcatctacagttcacgccagttcgagaacaccctagactctgcactgttccaaacagcaaggatgtcgccatcatccctgagatactatggcattggacttgagaatggaaattacacggtcacacttcaatttgcagaggttgactttccagacatgcagtcttggagaagctgagggaggagggttttcgatatctatgtccagggagagcgcaaggagcagaactttgacattagaaaggcagctggagggaaatctttcactgctgttaagaagcagtatgttgttccagtaaccaaaaacttccttgagattcatctcttctgggctggcaagggcacttgttgcattccttataagggatactatggtcctgcaatatcagccctgagtgcaactccaaatttcgttcctacagtccgtagttctgaagacagcaagagcagccataaaactggtgtgatcgctggggttgcagttggtgtttcagtttttgcattgatcgcactggccggaatcttcttgtggtgtcagaaaaggagaaagctattgttagagctagaagaattgtataccatagttggaaggccaaatgtcttcagttacagtgagcttaggtcagctacagagaacttttgttctagtaacctacttggtgaaggaggatatggatcagtttacaagggtaagttgagtgatggaaaagtggtggcagtgaagcagctctctcagtcctctaaccagggaaagatgcagtttgcggcagaaatcgaaaccatttcccgagtgcagcaccgtaacctcgtgaggttgtatggctgctgccttgagagcaaaacaccattgttggtctacgagtacctggagaatggaagcctcgatcatgctttgtttggaaaggggagcttgaatctagactggccaacacgattcgagatatgtttgggcgtagcaagaggtatagcttatctccacgaggagtcaaccatccgcattgtgcacagggacataaaggccagtaacgtgttgatcgacgccgatcttaacccgaagatctccgatttcggccttgccaagctctacgacgacaagaagactcacgtcatcacaaatgttgctggcacgtttggttatctcgcgcctgagtacgctatgagagggcatatgactgagaaggttgatgtgttcgcgtttggcgtggtcgcgctggagattgtcgctggtgaatcaaactatcagaatgctctggacgaaggcacgacctatatctttgaaagggtgtgggaactgtacgagaacgggcggccgctggagttcgtggacccgaagctgacggagtacgacgcgtacgaggtgctgcgggtgatccgcgtggcgctccactgcacccagggctcgccccacaagcggccgtccatgtcgagggtggtcgccatgctcaacggggacgccgacgcggccgaggacgttgcgaagccgagctacatcacggagtggcaggtgatggcggccgacgtcagcggcagcttcgcgagcagccacgtcgggtcgtcgtcgacgcagacgcagccaacgtcttcgtccggcggccacggcggcgcccaggcgagccctgagcccggggacctgacgcccgcggtcccgtcgccgctctacacctccatcatcgaggagggcaggtgacagctagcttgcctcggaatcgcgaatgcctggcagtggcatgcatgcttgcctcggaatcgcgaatgcgttgctgtgctctccagttttgtggctaatacaatactgatgtcgggtcgccatggttgatgttgttgtgaggaatttacttgaatgtgaggccgcaagcagcagatttgatttgggaggcacactgaaatggcagccgacgcagattttgggatggcgtgcgcgtccctgtcaagaatgggatggcgtgtgcgccggcgccaggcctgcctcgccttgcttgccggcggcagcgtgacacgtctggagggtggagaccccgacgaacgttccaagggatgtttctcctgaattcggcatgcatcacctggctggtagatggtcacgtctccccctcctatgatttaagtgtgtgaaacgtggtatatatatgcattagttgtgcaatgtgttgcagacatccacatacaagtcttcccacatattttgattttgttattatatactccctccgttataaatatagtagaaagtaaaacaaatttaaatttgag

SEQ ID NO: 215235 - DNA, 2780 bp, Zea Mays
aagcaagctccgggcagggagagatgaggaagcccaggctgagtgtcggcggcggcggcggcctcctccatggctttccctcccccgtgctgctgttcttgctgctgctgctgctgagttcttggagggtggctgcccaggcgcagcaggcgcctcagactgatccggtggaagcggcggcggtgaacgcgatcctgagcaagctgaggctgagcgcgccgccgtcgtggaacatcagcgggaacccctgcagcggcgccgcgacggacgacacgtccatcgacgacaaccctgcgttcaacccggccatcaagtgcgactgttccgaccaaaacaacacgctctgccatgtcactagactgaagataaacacactggacgcagttggccccatacctgaggagctgcggaacctcactcacctcgttaaactggacttcagaaaaaattacttctacgggccattaccagcattcattggagaactaactgctctggaatcaatgaccgtgggcatcaatgcactatctggacctgtcccaaaggagcttggaaatcttaccaatctcttatcactggcattgggctcaaataattttaacggcacacttcctgatgagctggggaaactgacaaaacttcgacaaatatacattgatagtaacgacttcagtggttctctaccatcgacattgtcccagctgaagaacctgtcaatcttgtgggcatcagacaataatttcagtgggcagattcctgattatcttgggagtttgactaacttgacccaactgaggctccaagggaactcttttcaaggtcccattcccacaagtctttctaatcttgtcaacttaaaaaaattggacctgagtttcaacaatatcacaggacaaatacctcaatcaattttgaatcttacatctcttagttatttatttcgttcctacagtccgtagttctgaagacagcaagagcagccataaaactggtgtgatcgctggggttgcagttggtgtttcagtttttgcattgatcgcactggccggaatcttcttgtggtgtcagaaaaggagaaagctattgttagagctagaagaattgtataccatagttggaaggccaaatgtcttcagttacagtgagcttaggtcagctacagagaacttttgttctagtaacctacttggtgaaggaggatatggatcagtttacaagggtaagttgagtgatggaaaagtggtggcagtgaagcagctctctcagtcctctaaccagggaaagatgcagtttgcggcagaaatcgaaaccatttcccgagtgcagcaccgtaacctcgtgaggttgtatggctgctgccttgagagcaaaacaccattgttggtctacgagtacctggagaatggaagcctcgatcatgctttgtttggaaaggggagcttgaatctagactggccaacacgattcgagatatgtttgggcgtagcaagaggtatagcttatctccacgaggagtcaaccatccgcattgtgcacagggacataaaggccagtaacgtgttgatcgacgccgatcttaacccgaagatctccgatttcggccttgccaagctctacgacgacaagaagactcacgtcatcacaaatgttgctggcacgtttggttatctcgcgcctgagtacgctatgagagggcatatgactgagaaggttgatgtgttcgcgtttggcgtggtcgcgctggagattgtcgctggtgaatcaaactatcagaatgctctggacgaaggcacgacctatatctttgaaagggtgtgggaactgtacgagaacgggcggccgctggagttcgtggacccgaagctgacggagtacgacgcgtacgaggtgctgcgggtgatccgcgtggcgctccactgcacccagggctcgccccacaagcggccgtccatgtcgagggtggtcgccatgctcaacggggacgccgacgcggccgaggacgttgcgaagccgagctacatcacggagtggcaggtgatggcggccgacgtcagcggcagcttcgcgagcagccacgtcgggtcgtcgtcgacgcagacgcagccaacgtcttcgtccggcggccacggcggcgcccaggcgagccctgagcccggggacctgacgcccgcggtcccgtcgccgctctacacctccatcatcgaggagggcaggtgacagctagcttgcctcggaatcgcgaatgcctggcagtggcatgcatgcttgcctcggaatcgcgaatgcgttgctgtgctctccagttttgtggctaatacaatactgatgtcgggtcgccatggttgatgttgttgtgaggaatttacttgaatgtgaggccgcaagcagcagatttgatttgggaggcacactgaaatggcagccgacgcagattttgggatggcgtgcgcgtccctgtcaagaatgggatggcgtgtgcgccggcgccaggcctgcctcgccttgcttgccggcggcagcgtgacacgtctggagggtggagaccccgacgaacgttccaagggatgtttctcctgaattcggcatgcatcacctggctggtagatggtcacgtctccccctcctatgatttaagtgtgtgaaacgtggtatatatatgcattagttgtgcaatgtgttgcagacatccacatacaagtcttcccacatattttgattttgttattatatactccctccgttataaatatagtagaaagtaaaacaaatttaaatttgag

SEQ ID NO: 215236 - DNA, 3366 bp, Zea Mays
cagacggccgtgtctcacttgcccgtcggagaaacgaggagtgctccgctcgtattccgatttcaaggacttcagaaaaaattacttctacgggccattaccagcattcattggagaactaactgctctggaatcaatgaccgtgggcatcaatgcactatctggacctgtcccaaaggagcttggaaatcttaccaatctcttatcactggcattgggctcaaataattttaacggcacacttcctgatgagctggggaaactgacaaaacttcgacaaatatacattgatagtaacgacttcagtggttctctaccatcgacattgtcccagctgaagaacctgtcaatcttgtgggcatcagacaataatttcagtgggcagattcctgattatcttgggagtttgactaacttgacccaactgaggctccaagggaactcttttcaaggtcccattcccacaagtctttctaatcttgtcaacttaaaaaaattaaggataggcgatatagtgaatggaagctcttcgctgtcattcattggcaatttgacatctttgggtgaactagtgttgaggaacagcattatatctgatacactagcatcggtagacttctccaactttgtaaatttatacttattggacctgagtttcaacaatatcacaggacaaatacctcaatcaattttgaatcttacatctcttagttatttatttctagggaataatagcctttcgggaagtctgcctgccacaaaaagtcccttagtgaccaatatagatttttcatacaaccatatctcaggaaactttccttcttgggctactgacaaaaatttacaattgaaaacatactgcttagttattgcacacaaaacctgccgattcaatataacaattccaattaaacagtactctgaaaatttggatgcagctgcgtcctttgcggtggactgtggtggtagtagagcaatatcaggttcagataattctgtctatcaagctgataatgccaaccttagtgctgcatcgtactatgttgcgggtgcacctacatgggccgttagcagcgttgggttattcttggacgcagatgcacccaatgcaagttacatcatctacagttcacgccagttcgagaacaccctagactctgcactgttccaaacagcaaggatgtcgccatcatccctgagatactatggcattggacttgagaatggaaattacacggtcacacttcaatttgcagaggttgactttccagacatgcagtcttggagaagctgagggaggagggttttcgatatctatgtccagggagagcgcaaggagcagaactttgacattagaaaggcagctggagggaaatctttcactgctgttaagaagcagtatgttgttccagtaaccaaaaacttccttgagattcatctcttctgggctggcaagggcacttgttgcattccttataagggatactatggtcctgcaatatcagccctgagtgcaactccaaatttcgttcctacagtccgtagttctgaagacagcaagagcagccataaaactggtgtgatcgctggggttgcagttggtgtttcagtttttgcattgatcgcactggccggaatcttcttgtggtgtcagaaaaggagaaagctattgttagagctagaagaattgtataccatagttggaaggccaaatgtcttcagttacagtgagcttaggtcagctacagagaacttttgttctagtaacctacttggtgaaggaggatatggatcagtttacaagggtaagttgagtgatggaaaagtggtggcagtgaagcagctctctcagtcctctaaccagggaaagatgcagtttgcggcagaaatcgaaaccatttcccgagtgcagcaccgtaacctcgtgaggttgtatggctgctgccttgagagcaaaacaccattgttggtctacgagtacctggagaatggaagcctcgatcatgctttgtttggaaaggggagcttgaatctagactggccaacacgattcgagatatgtttgggcgtagcaagaggtatagcttatctccacgaggagtcaaccatccgcattgtgcacagggacataaaggccagtaacgtgttgatcgacgccgatcttaacccgaagatctccgatttcggccttgccaagctctacgacgacaagaagactcacgtcatcacaaatgttgctggcacgtttggttatctcgcgcctgagtacgctatgagagggcatatgactgagaaggttgatgtgttcgcgtttggcgtggtcgcgctggagattgtcgctggtgaatcaaactatcagaatgctctggacgaaggcacgacctatatctttgaaagggtgtgggaactgtacgagaacgggcggccgctggagttcgtggacccgaagctgacggagtacgacgcgtacgaggtgctgcgggtgatccgcgtggcgctccactgcacccagggctcgccccacaagcggccgtccatgtcgagggtggtcgccatgctcaacggggacgccgacgcggccgaggacgttgcgaagccgagctacatcacggagtggcaggtgatggcggccgacgtcagcggcagcttcgcgagcagccacgtcgggtcgtcgtcgacgcagacgcagccaacgtcttcgtccggcggccacggcggcgcccaggcgagccctgagcccggggacctgacgcccgcggtcccgtcgccgctctacacctccatcatcgaggagggcaggtgacagctagcttgcctcggaatcgcgaatgcctggcagtggcatgcatgcttgcctcggaatcgcgaatgcgttgctgtgctctccagttttgtggctaatacaatactgatgtcgggtcgccatggttgatgttgttgtgaggaatttacttgaatgtgaggccgcaagcagcagatttgatttgggaggcacactgaaatggcagccgacgcagattttgggatggcgtgcgcgtccctgtcaagaatgggatggcgtgtgcgccggcgccaggcctgcctcgccttgcttgccggcggcagcgtgacacgtctggagggtggagaccccgacgaacgttccaagggatgtttctcctgaattcggcatgcatcacctggctggtagatggtcacgtctccccctcctatgatttaagtgtgtgaaacgtggtatatatatgcattagttgtgcaatgtgttgcagacatccacatacaagtcttcccacatattttgattttgttattatatactccctccgttataaatatagtagaaagtaaaacaaatttaaatttgag

SEQ ID NO: 215237 - DNA, 3033 bp, Zea Mays
cttcagaaaaaattacttctacgggccattaccagcattcattggagaactaactgctctggaatcaatgaccgtgggcatcaatgcactatctggacctgtcccaaaggagcttggaaatcttaccaatctcttatcactggcattgggctcaaataattttaacggcacacttcctgatgagctggggaaactgacaaaacttcgacaaatgtgggcatcagacaataatttcagtgggcagattcctgattatcttgggagtttgactaacttgacccaactgaggctccaagggaactcttttcaaggtcccattcccacaagtctttctaatcttgtcaacttaaaaaaattggacctgagtttcaacaatatcacaggacaaatacctcaatcaattttgaatcttacatctcttagttatttagatttttcatacaaccatatctcaggaaactttccttcttgggctactgacaaaaatttacaattgaatttggtagcaaacgactttgtgatggatagctccaataacagtgttttgccatggggattggagtgtcttcagcatagtactccctgtttcctcggttctccaaagtctgcgtcctttgcggtggactgtggtggtagtagagcaatatcaggttcagataattctgtctatcaagctgataatgccaaccttagtgctgcatcgtactatgttgcgggtgcacctacatgggccgttagcagcgttgggttattcttggacgcagatgcacccaatgcaagttacatcatctacagttcacgccagttcgagaacaccctagactctgcactgttccaaacagcaaggatgtcgccatcatccctgagatactatggcattggacttgagaatggaaattacacggtcacacttcaatttgcagaggttgactttccagacatgcagtcttggagaagctgagggaggagggttttcgatatctatgtccagggagagcgcaaggagcagaactttgacattagaaaggcagctggagggaaatctttcactgctgttaagaagcagtatgttgttccagtaaccaaaaacttccttgagattcatctcttctgggctggcaagggcacttgttgcattccttataagggatactatggtcctgcaatatcagccctgagtgcaactccaaatttcgttcctacagtccgtagttctgaagacagcaagagcagccataaaactggtgtgatcgctggggttgcagttggtgtttcagtttttgcattgatcgcactggccggaatcttcttgtggtgtcagaaaaggagaaagctattgttagagctagaagaattgtataccatagttggaaggccaaatgtcttcagttacagtgagcttaggtcagctacagagaacttttgttctagtaacctacttggtgaaggaggatatggatcagtttacaagggtaagttgagtgatggaaaagtggtggcagtgaagcagctctctcagtcctctaaccagggaaagatgcagtttgcggcagaaatcgaaaccatttcccgagtgcagcaccgtaacctcgtgaggttgtatggctgctgccttgagagcaaaacaccattgttggtctacgagtacctggagaatggaagcctcgatcatgctttgtttggaaaggggagcttgaatctagactggccaacacgattcgagatatgtttgggcgtagcaagaggtatagcttatctccacgaggagtcaaccatccgcattgtgcacagggacataaaggccagtaacgtgttgatcgacgccgatcttaacccgaagatctccgatttcggccttgccaagctctacgacgacaagaagactcacgtcatcacaaatgttgctggcacgtttggttatctcgcgcctgagtacgctatgagagggcatatgactgagaaggttgatgtgttcgcgtttggcgtggtcgcgctggagattgtcgctggtgaatcaaactatcagaatgctctggacgaaggcacgacctatatctttgaaagggtgtgggaactgtacgagaacgggcggccgctggagttcgtggacccgaagctgacggagtacgacgcgtacgaggtgctgcgggtgatccgcgtggcgctccactgcacccagggctcgccccacaagcggccgtccatgtcgagggtggtcgccatgctcaacggggacgccgacgcggccgaggacgttgcgaagccgagctacatcacggagtggcaggtgatggcggccgacgtcagcggcagcttcgcgagcagccacgtcgggtcgtcgtcgacgcagacgcagccaacgtcttcgtccggcggccacggcggcgcccaggcgagccctgagcccggggacctgacgcccgcggtcccgtcgccgctctacacctccatcatcgaggagggcaggtgacagctagcttgcctcggaatcgcgaatgcctggcagtggcatgcatgcttgcctcggaatcgcgaatgcgttgctgtgctctccagttttgtggctaatacaatactgatgtcgggtcgccatggttgatgttgttgtgaggaatttacttgaatgtgaggccgcaagcagcagatttgatttgggaggcacactgaaatggcagccgacgcagattttgggatggcgtgcgcgtccctgtcaagaatgggatggcgtgtgcgccggcgccaggcctgcctcgccttgcttgccggcggcagcgtgacacgtctggagggtggagaccccgacgaacgttccaagggatgtttctcctgaattcggcatgcatcacctggctggtagatggtcacgtctccccctcctatgatttaagtgtgtgaaacgtggtatatatatgcattagttgtgcaatgtgttgcagacatccacatacaagtcttcccacatattttgattttgttattatatactccctccgttataaatatagtagaaagtaaaacaaatttaaatttgag

SEQ ID NO: 215238 - DNA, 4414 bp, Zea Mays
atggcacagggaggtgggcaagatcaccgccgcggacagtggcggatgcacaggaaactaaaatggaaaaagaaagaaaaatatatctggactggacgagatgacgagtggacgctaaggcccatcacccatgacacagcagagagcacgccgctccttggtctggcccgtcgcgcgcagatccgtagcccaccgcgcgcgtcggaaactgagagtctgagagccgccctagtgccctgccgccgccacccttcaggacgctactcttattttaataagatcgtgtctcaaaaatggatattaagaatcataaaagctgttcggagcagctgccgtagttctatcttcactctcaaatcactgtaccgactagcgacaacgtcttgtagccaaaatcacgtcagcctgggctcgcactcgcacgcgcaaatcccactacatgtatacatacatatgatggaagcccaatctcgtgcagagattcgtcccattttcctgtcggaaacaaccctggccttaggaggccaggcgattctccgccgcctcgtctcgtctttgctatgcgccacgagcgcctccgccgctccaacgctccaacgccctgagcgcctccaacaccactccaacgccacgagcgcctccgccgctccaccgaacaactccaacgccactccagctcttgcagcagtagaactctactgcagccagctacgacaccctgcgcttgccgcactagggcatcgacgccgtgctcttcgtgccggatgacgccaaggccacgcagaccgccgacccgaacaggaagcctcccgccattgtcacccacaagaagaagatcaagctccggtgaggttagtacctacctaccttcagatctggacctgctcctttgtgtcctccgccaacccgaacaggaagtatcccaccactgcattgtccttttttcaataatagcaccgaaatttacagctcgtaatatctagattagggaggtcattacgtcaaaaaaaagaagattggggaggtgtgtagattagtttcacaactgatcgctagcatcaatcaatgccagttcatctattggtcagaatgttgccggtgagtgatgagtcctgggtagtagaataaagacgaacgcattggcataaaatagaaacaacaattcgagttccttattactttcctattgacatggccgtattggatttggaggaaggcatatgggcctgtcggtgcccgtctggacattttctaccatcactgaactacaactactgtagtttccgtaggtttttttataccatgtgtgacagatgctcaaccttagtattggccaacgtgaaaacatggaggtgaagtgaagcaagtggtagttgagcatatgctggtggctggttgtcttcatgaacatctctttgatggctgacaccgttcctgggactgcaagccaacactgtcctttaacccatgacccatgagcaacaatttcttctttttcatagtttaggtggaagtatcatgccgaagccttagtcacgtccttgctttgttgtccttgttttcatagtttaggtcgagtggtagctaattaaattggttatgggtacaggtagggcaaggccgaattgtgtgccttgtagggaaaataacaatcgttggtagtattacaaactgcagaaattccatgttttgcattatctccatgttttgcatgattaagatccttataagagctatctccacttctctagatatgggttcttgggagaagcaagttagacaatttttgttagatgaggaagaagacgatgatgagttgttctttgttattctccctgctataattccatacctctcagaagagaaagagcccatccacacctcctcactcactggcgctaaaaaggttagagaaattcttaaaggacatgagagttggtgcaaatccgagtttagaatggagccaacaatattcaaaaccatatcaaattttcttagaagagacaatttactgcgagacacacaagcaacttgggatgttcatgtacatgatctcccacaatgctagtaaccaaatgctgcagaaggcttttcaacatagtggagagactatccatagaaaaatatctgaagtatttgatcttgttcccacactaactcagtgttttgtgaagcttcctagctctgtccacactcatacaaaaatcgcaacagattctaggttcatgccattttttcagaactgcattggtgcaatcgacggtacacatatacccatcaccatagcagaacatagggcccctccatatagaaacaggaaaggaactctttcacacaatgttatggtagcctgggacttcgacctcaatttcacatttgtttcatgtggatgggaggggtcagcctcagatgcaggggtgcctcgatctgctattagcaaaggatttagtgtgccagaaggaaagttttatctagtagatggtggttatgcaaatacgtcatccttcattgcaccgtatagaggggttcgataccatctcaacgagtttaggaggcgtcgttcatcacaaagtggttatgcgaactacagagagttgttcaaccaccgccatgcaattctccgtaaccatatagagagggccatcggtgttctaaagaaaaggttcccgattctaaaagtaggcacatttcatcccatagagaaccaaatcaagatcacagctgcaactgttgcatttcacaacataattagagggcaaaatggagacgaaagatggcttgacaaccaaccaaattacatctctccaagtcaatatgttgatgttccagagggagataccaactatctcaatgacacagaatcaagtgatggaagcgctctaagagatcagatcgctcttcagatgtgggcttcctacaatatatagatttttgaataaaggatgatttggaacaatgtgtacgagaaaggcttagtcgatgtgatgcatgatcacaaagataatccaaaattcaaaggtcaaaatggttggaatcgtgatggatggaatagtatcactaccaagttcaatgaaaagttccctctagctcatttctctaaacaacaactgcaagagaaggagagagagcttaaaggatactacaaggcaataagggattcaagaaaagaaagcggggttggttggaatgacaccctatgcatggtactagctgaaccagaagtttggccaaggctgattcgcgtatcaaagtttcgcaataggccattccctcttttttacagtttagaagggctatatgaaggtagtgtggctaccggagagttgaatttcacatcaaccgctgttgatcttcctccaccttcagctccatccaggagtgtgtctggacaaagtctcagtcctttgagtactaattcacttgatttggatggacaagaaaccacaagtgtgttcaatctatcttgtgatgctcaatctgtccgagtcaatactaatgaacccactgaagctcaatttgtcccatctaatcaagaatcaagccagagagaaggtggcagtgggagaaagcgtaagcaaagccatgttggattagctcttgaaagttatgtggagtttaaaaagatccaaaatacagaaacacttgaaactcttaaagaacataagaggcaagaggatcaattttctattagcaagtgtcaggctgaattgaaaggaatggatggattaacagcagtagacaaatcatatgctttggagcttttcgtatctgtgacaaaccgagaaattttcttaacaacaacagagcatgatgttagagaaatttggctcaagcgcaaaattaggttgcttcgtggtagtgatgcatggcctgaacaaatgatatgagcaaatttgacaactgcagttctgttatggtgaatggtgattgtagttcagtttcagctctaacctatggaaaattgaatggcagttgcactaatctgttggtggaatgattttcccagtaatttcctggacaagcagatcactgagaaccatttaccttatgagaaatgatgccctgtatggttcagtatagttcttgtattgctagtttaaattaattcttgtatggcagttgcactaaactgaatggcagctgaactttgagatatgcttctattgttggtttaaaaccatggtgatgactgttcttgtatgcattctgtatgcattcttgtttataacctggttgcttatgtatgcattcttgtatgccgtgtatgcatggtgactgttcttatatgtgttcgtgtatgcaatctgccccaaactgaatgtcatacggaaaaatgtcaccggtatgagttcgtgtatgtatttagttttgtactaaactggatcactagtacaaaaaggctcaaagcctgcgg

SEQ ID NO: 215239 - DNA, 4574 bp, Zea Mays
atggcacagggaggtgggcaagatcaccgccgcggacagtggcggatgcacaggaaactaaaatggaaaaagaaagaaaaatatatctggactggacgagatgacgagtggacgctaaggcccatcacccatgacacagcagagagcacgccgctccttggtctggcccgtcgcgcgcagatccgtagcccaccgcgcgcgtcggaaactgagagtctgagagccgccctagtgccctgccgccgccacccttcaggacgctactcttattttaataagatcgtgtctcaaaaatggatattaagaatcataaaagctgttcggagcagctgccgtagttctatcttcactctcaaatcactgtaccgactagcgacaacgtcttgtagccaaaatcacgtcagcctgggctcgcactcgcacgcgcaaatcccactacatgtatacatacatatgatggaagcccaatctcgtgcagagattcgtcccattttcctgtcggaaacaaccctggccttaggaggccaggcgattctccgccgcctcgtctcgtctttgctatgcgccacgagcgcctccgccgctccaacgctccaacgccctgagcgcctccaacaccactccaacgccacgagcgcctccgccgctccaccgaacaactccaacgccactccagctcttgcagcagtagaactctactgcagccaggtacgtttgattctggtttctgccgcacaagatccgttacctcttggacccggacatctacaccgacgacaggatctccgtgcagggcatcgacgccgtgctcttcgtgccggatgacgccaaggccacgcagaccgccgacccgaacaggaagcctcccgccattgtcacccacaagaagaagatcaagctccggtgaggttagtacctacctaccttcagatctggacctgctcctttgtgtcctccgccaacccgaacaggaagtatcccaccactgcattgtccttttttcaataatagcaccgaaatttacagctcgtaatatctagattagggaggtcattacgtcaaaaaaaagaagattggggaggtgtgtagattagtttcacaactgatcgctagcatcaatcaatgccagttcatctattggtcagaatgttgccggtgagtgatgagtcctgggtagtagaataaagacgaacgcattggcataaaatagaaacaacaattcgagttccttattactttcctattgacatggccgtattggatttggaggaaggcatatgggcctgtcggtgcccgtctggacattttctaccatcactgaactacaactactgtagtttccgtaggtttttttataccatgtgtgacagatgctcaaccttagtattggccaacgtgaaaacatggaggtgaagtgaagcaagtggtagttgagcatatgctggtggctggttgtcttcatgaacatctctttgatggctgacaccgttcctgggactgcaagccaacactgtcctttaacccatgacccatgagcaacaatttcttctttttcatagtttaggtggaagtatcatgccgaagccttagtcacgtccttgctttgttgtccttgttttcatagtttaggtcgagtggtagctaattaaattggttatgggtacaggtagggcaaggccgaattgtgtgccttgtagggaaaataacaatcgttggtagtattacaaactgcagaaattccatgttttgcattatctccatgttttgcatgattaagatccttataagagctatctccacttctctagatatgggttcttgggagaagcaagttagacaatttttgttagatgaggaagaagacgatgatgagttgttctttgttattctccctgctataattccatacctctcagaagagaaagagcccatccacacctcctcactcactggcgctaaaaaggttagagaaattcttaaaggacatgagagttggtgcaaatccgagtttagaatggagccaacaatattcaaaaccatatcaaattttcttagaagagacaatttactgcgagacacacaagcaacttgggatgttcatgtacatgatctcccacaatgctagtaaccaaatgctgcagaaggcttttcaacatagtggagagactatccatagaaaaatatctgaagtatttgatcttgttcccacactaactcagtgttttgtgaagcttcctagctctgtccacactcatacaaaaatcgcaacagattctaggttcatgccattttttcagaactgcattggtgcaatcgacggtacacatatacccatcaccatagcagaacatagggcccctccatatagaaacaggaaaggaactctttcacacaatgttatggtagcctgggacttcgacctcaatttcacatttgtttcatgtggatgggaggggtcagcctcagatgcaggggtgcctcgatctgctattagcaaaggatttagtgtgccagaaggaaagttttatctagtagatggtggttatgcaaatacgtcatccttcattgcaccgtatagaggggttcgataccatctcaacgagtttaggaggcgtcgttcatcacaaagtggttatgcgaactacagagagttgttcaaccaccgccatgcaattctccgtaaccatatagagagggccatcggtgttctaaagaaaaggttcccgattctaaaagtaggcacatttcatcccatagagaaccaaatcaagatcacagctgcaactgttgcatttcacaacataattagagggcaaaatggagacgaaagatggcttgacaaccaaccaaattacatctctccaagtcaatatgttgatgttccagagggagataccaactatctcaatgacacagaatcaagtgatggaagcgctctaagagatcagatcgctcttcagatgtgggcttcctacaatatatagatttttgaataaaggatgatttggaacaatgtgtacgagaaaggcttagtcgatgtgatgcatgatcacaaagataatccaaaattcaaaggtcaaaatggttggaatcgtgatggatggaatagtatcactaccaagttcaatgaaaagttccctctagctcatttctctaaacaacaactgcaagagaaggagagagagcttaaaggatactacaaggcaataagggattcaagaaaagaaagcggggttggttggaatgacaccctatgcatggtactagctgaaccagaagtttggccaaggctgattcgcgtaagcaaactttctttgtataattctatctttgtgcattcaatatgttcgcttttgctactaataatatatttcatgttgcatttaattggctcacccaaaggtatcaaagtttcgcaataggccattccctcttttttacagtttagaagggctatatgaaggtagtgtggctaccggagagttgaatttcacatcaaccgctgttgatcttcctccaccttcagctccatccaggagtgtgtctggacaaagtctcagtcctttgagtactaattcacttgatttggatggacaagaaaccacaagtgtgttcaatctatcttgtgatgctcaatctgtccgagtcaatactaatgaacccactgaagctcaatttgtcccatctaatcaagaatcaagccagagagaaggtggcagtgggagaaagcgtaagcaaagccatgttggattagctcttgaaagttatgtggagtttaaaaagatccaaaatacagaaacacttgaaactcttaaagaacataagaggcaagaggatcaattttctattagcaagtgtcaggctgaattgaaaggaatggatggattaacagcagtagacaaatcatatgctttggagcttttcgtatctgtgacaaaccgagaaattttcttaacaacaacagagcatgatgttagagaaatttggctcaagcgcaaaattaggttgcttcgtggtagtgatgcatggcctgaacaaatgatatgagcaaatttgacaactgcagttctgttatggtgaatggtgattgtagttcagtttcagctctaacctatggaaaattgaatggcagttgcactaatctgttggtggaatgattttcccagtaatttcctggacaagcagatcactgagaaccatttaccttatgagaaatgatgccctgtatggttcagtatagttcttgtattgctagtttaaattaattcttgtatggcagttgcactaaactgaatggcagctgaactttgagatatgcttctattgttggtttaaaaccatggtgatgactgttcttgtatgcattctgtatgcattcttgtttataacctggttgcttatgtatgcattcttgtatgccgtgtatgcatggtgactgttcttatatgtgttcgtgtatgcaatctgccccaaactgaatgtcatacggaaaaatgtcaccggtatgagttcgtgtatgtatttagttttgtactaaactggatcactagtacaaaaaggctcaaagcctgcgg

SEQ ID NO: 215240 - DNA, 571 bp, Zea Mays
cccgcagatgcttgtccgtgctgttaagcttctcaagaacctccacttcatggcgaagcccgctgcgattgacttgataagaagcattattcaggctgaaggtgcttccacagagcaggcattatcatcagctctaacaagtattatggatgcgctgaacagtactgactggaatacaaggaaggctgtctcactagctctttcaagtattgcgatcagttctgggtatttggttacctctttcagaaattcctgccttcgctcccttgagtgtagtaaatttgacaaggtaaaaccggtacgtgacaccattatatacatgcaattcagctgtgaaaagctattccagggtctcatactcctgaaccatgaagctggatcatcaacaaaagataatgaagtcaagatttgttgcgagaaccaaaaaattacgctaatggttatgaggcgaatgtagttgtcggaggctatggtggatacaacacaagatgggctcttttcttagtacatcacgtcgttccgcaggtaggttgtggctaagaaaaatgaagatggtgacagctaagaaact

SEQ ID NO: 215241 - DNA, 1001 bp, Zea Mays
cccgcagatgcttgtccgtgctgttaagcttctcaagaacctccacttcatggcgaagcccgctgcgattgacttgataagaagcattattcaggctgaaggtgcttccacagagcaggcattatcatcagctctaacaagtattatggatgcgctgaacagtactgactggaatacaaggaaggctgtctcactagctctttcaagtattgcgatcagttctgggtatttggttacctctttcagaaattcctgccttcgctcccttgagtgtagtaaatttgacaaggtaaaaccggtacgtgacaccattatatacatgcaattcagctgtgaaaagctattccagggtctcatactcctgaaccatgaagctggatcatcaacaaaagataatgaagtcaagatttgttgcgagaaccaaaaaattacgctaatggttatgaggcgaatgtagttgtcggaggctatggtggatacaacacaagatgggctcttttcttagtacatcacgtcgttccgcagatcaggtaggttgtggctaagaaaaatgaagatggtgacagctaagaaactctaaagccacttctgattcacatatgaagcgaccacataaattgaagatgccgtgacctgggaacagatttggtacatttctcgtcgacggtgggggctgctgctcggcaagagaagatgggaagaggaggaggaagaacggctggagtttgaaggagaagatggagtgtagggcacacacgcacatcagcgagtggactactagtggagagagagaagtagcagaggtacgagaacacaatggcggtcttccttcagtcacttgtgcgtcagtccagtattgtcgaactagtagaaaatggcacgattggaactgaagtgccaagtttccaaacaggcttgtatagcaatgttgcactgtactccctccctcctattagttttcgtttcagacaacgatacagtctccaaaatataaatttgac

SEQ ID NO: 215242 - DNA, 1182 bp, Zea Mays
cccgcagatgcttgtccgtgctgttaagcttctcaagaacctccacttcatggcgaagcccgctgcgattgacttgataagaagcattattcaggctgaaggtgcttccacagagcaggcattatcatcagctctaacaagtattatggatgcgctgaacagtactgactggaatacaaggaaggctgtctcactagctctttcaagtattgcgatcagttctgggtatttggttacctctttcagaaattcctgccttcgctcccttgagtgtagtaaatttgacaaggtaaaaccggtacgtgacaccattatatacatgcaattcagctgtgaaaagctattccagggtctcatactcctgaaccatgaagctggatcatcaacaaaagataatgaagtcaagatttgttgcgagaaccaaaaaattacgctaatggttatgagaacaaatccctaaaaggttccatacgatgcgattaacatatgatgcgaccacaaaaattgaagttgatggtgatgaagatggtggcggctaagaaactgcttgttagtcaaacccttgaggaggattatttggatattgaaaccttataaaaatttcagatgttagattatatgcaatgcagctaggcgaatgtagttgtcggaggctatggtggatacaacacaagatgggctcttttcttagtacatcacgtcgttccgcaggtaggttgtggctaagaaaaatgaagatggtgacagctaagaaactctaaagccacttctgattcacatatgaagcgaccacataaattgaagatgccgtgacctgggaacagatttggtacatttctcgtcgacggtgggggctgctgctcggcaagagaagatgggaagaggaggaggaagaacggctggagtttgaaggagaagatggagtgtagggcacacacgcacatcagcgagtggactactagtggagagagagaagtagcagaggtacgagaacacaatggcggtcttccttcagtcacttgtgcgtcagtccagtattgtcgaactagtagaaaatggcacgattggaactgaagtgccaagtttccaaacaggcttgtatagcaatgttgcactgtactccctccctcctattagttttcgtttcagacaacgatacagtctccaaaatataaatttgac

SEQ ID NO: 215243 - DNA, 2629 bp, Zea Mays
cttgcccacttccaggcttccagctccagctgcggaattactgccttccctttccctttgcccgcactcaagggagcgaggtaccatcaacgccgggccggcgcatgcccgtctctccgcgccgccacctccgccgtattgcccgtcgtgtccgagccatgcttcccttcgccgcggagccggaggtgtccgacggagacgctgccgcgggcgccgaccgccgcgcgtgggagccgcccttcgacgcgtcctcgcccgcgccgcccatgtcctacccgatcacgggcctcgccgcgctcgcctctcgcgcttacctgtccgccgaagccaacttccacctccccttcaacagggcttccgttcccgcgccagcctcgccgctcccgcagcgccgccgcgtcctcgtctgccacgacatggaaggcggataccgcaacgacgcggcaccgcagggcggggacaagccggacgcctacgcgctctggcactggcacctcgtcgacgtcttcgtctacttctcgcactacctcgtcacgctcccgccaccctgctggatcaacgccgcccaccttcacggcgtcaaggttttagggacgttcatcgcggagtgggatgagggcgtgaagatttgcaaggagatgctcgcgaccgaggcttctgcacagatgtatgcggaaaggctcacagagctggctcataccttgggatttgatggttggctgattaacattgaggtcaatcttgacgttcacttcatcgataacctgaaagagttcgtcaagcatctaaccatgacaatgcacgatgcagttcctggctctttagtcatatggtatgacgcaatcactgtgaatggtgaccttgattggcaggataagctcaacaagtacaataagccattctttgatgtatgtgatgggctattttctaactatacatggaaggaaaatgacccacaagattcagctacagttgctggcgacagaaaatatgatgtatacatgggtattgatgtttttggacgaaatacatttggtggtggtcaatggactacaaatgttgcccttgatctacttaagaaagttgatatctcagctgccatatttgctcctggatgggtatatgaaactaagcaaccacctgactttcagagagcgcagaatcattggtggggccttgttgaaaaatcatggggtattcttcggagctatccagaacagttaccattctactcggattttaatcagggtcatggttatcaggtatccgttgaagggctgcaaatctccaatgattcatggaacaatatttcttgccaaagttttcagcctatgcttaaatacaccagagatcaagttcatctgcaagcctatacggatttcaaggctgaaccttacagtggagggaattgtttgacagtcaaaggatctcttcagcagaacattattttctcagaacagctttttaatggaggacttgccatggaagatggacctgttcatctattttattcgataagagccaatgcaagttctgctttagggttgtccctggatctgtcttctagaaacaagcagggtacttcaaaaattctggttgcagaggacatagcaacattcaccagaaagaaacaaaatcacaagtatggatcatatgttaaagccgataaggtggagctacacgctccagataaccacggttgggtcctttacaaagcaactgtttcttccagtgctgggcacacattaactggtatcaacattgtctgcacattgaaatttactggcgaaatcagtccagaatcagaagatggtagcatcttggtagaagatgtcgatggaacttcactgtatcaggcatcactaggccacctcagtattcgaaatactgacaaaaacacagagttccctccagcagaatcttggataactgaaggagattacatctcgtggtcaaaatgctctaacggatctgaactcgtgaatctgaaaatcagctggaagctgaagaaccctgatcaaccacaaccaccattcagcaagtacaatatctatgtggagaagttaacggcagattcagacttgaaagttcccagtcccaaaagctatcttggagttgctagtgtcgatgccttctatgtgtcgggcttagaggtctccaacgaagtcaccggtctgaaattctttatccaagcgtttgcacacgatggaagctggcaagaacttgaggaatgtccaaagttctttttattccctgttcactctgaatgagtgacattcatttactctggtgcgcttcattctgttacctttgacatatgttaaaggctcccacagaataatctaatgttatcattacagaaataagaagggaaaaacaaataatattgcattttttctctgctcatgttgtttatgtacacccattatttttttttctttcatctgagtacaaaagatctgtaaatttggtggtactagttggagaggtttcttctttcttgtcaacacatgcaaccgcagattctccggaaacaatgaatttgttggtggttgaaagcatccttgtgggctttatgaggacaccataggtgttcagcactgtgtttccgcctgtgatcgatcccctc

SEQ ID NO: 215244 - DNA, 2831 bp, Zea Mays
gttctagctcacgggtttgaccctcaatcacaactgaaacaactaaatgtgaaacttccggagtacctacctcaacaaacctggaggagttgaaactggtaccagggagcacctataaattcagaactactgtatcaggccacctagttcatgcggcgtgagtacctgattgctttctcatgtggtgtgattacctgattgctttcctgcttactgggagcatggagggtggagcttccacttcaccgaatcaaggtgccctcacgacttccccttccgaccgcgcatcgctagctcccgcaacgacccgacctctgcgggtggatcatatcggccgccgttagccctccctcccccgatccgctacgattctttgaccagaccttggtccagaaacgaaaaggcggcggggtaaacagccgcagagtcgagcagtggccgcagaggcaagcagagaggccagtgggcagtggcgcctatggaggcgtggagcaggagagcgtcgggtggcggagaagcgagacgacgtggacctgacggagagtggccttggggaatgtctacgaagtgcaagggggaggggaaggatggaagggccaatggtccaaccgtgccgcctgtcgctcgcgcccgagcttgcctgcgcatcccgcggctcgctatcttagcccgccgccacgcaaaaccctctggccggcgcaacagaagcctcaaacgccagcgcactgccctcgctggcgctccatgccaaggccaaagatgtcgtgcacgcgtggttgccactcgcgacggcgattggacggacgcccaccgtggtgccgtaggttcacaacgcaacgaactaaacgctaccacctctctcgatcgtctcctctaccttcgacaatgcccatgcacgcctatcagagtgacgggtgagcgttgcccttggaaagtcgtttggttggggcttttttacccgtaataggttcacggcgcaaactggtccgactactttactttgtgtttggttgggccatctccagcacgcgtgtatatgagcgagcgtgtgttttgcactgtagattgcacagtttacagagtgaagtttgagatagtgagtaagatagaagtaagatagaggggcgactggagattgtcttatgtcttccttttatggatcacacgttgttaaaggatatgggcaagtaagcgctcgacatctaaggctatctacccccctcacataactacaagataagtccccgctcgaggaacaggcgtatggactgattaaatatccaatagatgatctgctagtaaggcccattgcagatgatccggctttatctaagagacctactctgctacagattttagagtaccaagatgttctgtgggagatctccttatggtatgggatttctgctcgtcttttgggagggttctgaatctgtccccatttccgctaacagatttggagaacacaatttgccacaaagaaagcaatgttcttcttgtggaaatacatgcagctatgaaggatgaaggtgactatttcactgttctgcagaacaagaaacggaagttaaagtaataaggggttattatggtcttattgacactgatataaagcttaagatcctccgggaactagtggaagaagctattcaaacctctgccataaaggagatactaagtgaccgtgtggaccagaaacaagtcctcaatgcaacaaaaagagagaacaccagaaaggacaaacaagagaaaaatcttaacactgaaattgccatgaaaagtcaggagaatcagacagatgatgtgcaagttggtcatgggggtgtagatgagctggttaggagaaaagaagaaaatgacaagagcaatatttctcggagtagaacagaagggaaacgacacttggtacagcaccttgagacggagattgagaaattatccatccgatccagcccacttggtaaagacaggcagtacaataggtactggtttttcaagcgtgaaggaaggctttttgttgaaactgcagattccagagaatggggttactacaacactaaggaagagctttgaaacggcaactagagaagttttacagtaagataagtaatgccctagagaaacgatcaaaagatatcgcaaacaggatgttacttgaagagggtgtactgcggcgttccacacgtgtccgggctcagccaaaggacatggcattcctcaagtacgtcaacaagtggaaggataactgaggtggcggtctgccagcggtggtggtggtctgccagcggtgggaggataacttgagccactgggtgacagggtttgcagtagatgtgtttggtttgaggttaaagtgggatgggacgggggcgacaccgtcctctcaattttttaattttttgggatcacgccgctacaaaaaaactactctggtgtttacctcgtccctacgtgactcccatttaaccactggagtaactgtgaccgtcccatttcatcctttcgtatacttggttaggtcgtcacagtggttcgccatactcgtcgcattagctaatgaaaactgtactagaacctagttttcttccctttgctactgaaatgaacactggttcacaaatgaaaagcttttgctactgaagtgaactgtgccactctttttccacctttgcgttccatgtgtttaacactggttcacaaatgaaaagcctttgctactgaactgagctgtgccaggcttctttacctttttagaacagtcaccactctttacatgtaacgatgtaaacgtgatgaggcaagacacttcgattttcaagggtgggcgtggg

SEQ ID NO: 215245 - DNA, 2910 bp, Zea Mays
gttctagctcacgggtttgaccctcaatcacaactgaaacaactaaatgtgaaacttccggagtacctacctcaacaaacctggaggagttgaaactggtaccagggagcacctataaattcagaactactgtatcaggccacctagttcatgcggcgtgagtacctgattgctttctcatgtggtgtgattacctgattgctttcctgcttactgggagcatggagggtggagcttccacttcaccgaatcaaggtgccctcacgacttccccttccgaccgcgcatcgctagctcccgcaacgacccgacctctgcgggtggatcatatcggccgccgttagccctccctcccccgatccgctacgattctttgaccagaccttggtccagaaacgaaaaggcggcggggtaaacagccgcagagtcgagcagtggccgcagaggcaagcagagaggccagtgggcagtggcgcctatggaggcgtggagcaggagagcgtcgggtggcggagaagcgagacgacgtggacctgacggagagtggccttggggaatgtctacgaagtgcaagggggaggggaaggatggaagggccaatggtccaaccgtgccgcctgtcgctcgcgcccgagcttgcctgcgcatcccgcggctcgctatcttagcccgccgccacgcaaaaccctctggccggcgcaacagaagcctcaaacgccagcgcactgccctcgctggcgctccatgccaaggccaaagatgtcgtgcacgcgtggttgccactcgcgacggcgattggacggacgcccaccgtggtgccgtaggttcacaacgcaacgaactaaacgctaccacctctctcgatcgtctcctctaccttcgacaatgcccatgcacgcctatcagagtgacgggtgagcgttgcccttggaaagtcgtttggttggggcttttttacccgtaataggttcacggcgcaaactggtccgactactttactttgtgtttggttgggccatctccagcacgcgtgtatatgagcgagcgtgtgttttgcactgtagattgcacagtttacagagtgaagtttgagatagtgagtaagatagaagtaagatagaggggcgactggagattgtcttatgtcttccttttatggatcacacgttgttaaaggatatgggcaagtaagcgctcgacatctaaggctatctacccccctcacataactacaagataagtccccgctcgaggaacaggcgtatggactgattaaatatccaatagatgatctgctagtaaggcccattgcagatgatccggctttatctaagagacctactctgctacagattttagagtaccaagatgttctgtgggagatctccttatggtatgggatttctgctcgtcttttgggagggttctgaatctgtccccatttccgctaacagatttggagaacacaatttgccacaaagaaagcaatgttcttcttgtggaaatacatgcagctatgaaggatgaaggtgactatttcactgttctgcagaacaagaaacggaagttaaaggtaagttcagtaacatgggctgagtatctatgtgatttcttggaaatgacaaaaaatgaagaacgttccacaaacattgcaacagtaataaggggttattatggtcttattgacactgatataaagcttaagatcctccgggaactagtggaagaagctattcaaacctctgccataaaggagatactaagtgaccgtgtggaccagaaacaagtcctcaatgcaacaaaaagagagaacaccagaaaggacaaacaagagaaaaatcttaacactgaaattgccatgaaaagtcaggagaatcagacagatgatgtgcaagttggtcatgggggtgtagatgagctggttaggagaaaagaagaaaatgacaagagcaatatttctcggagtagaacagaagggaaacgacacttgcaccttgagacggagattgagaaattatccatccgatccagcccacttggtaaagacaggcagtacaataggtactggtttttcaagcgtgaaggaaggctttttgttgaaactgcagattccagagaatggggttactacaacactaaggaagagctttgaaacggcaactagagaagttttacagtaagataagtaatgccctagagaaacgatcaaaagatatcgcaaacaggatgttacttgaagagggtgtactgcggcgttccacacgtgtccgggctcagccaaaggacatggcattcctcaagtacgtcaacaagtggaaggataactgaggtggcggtctgccagcggtggtggtggtctgccagcggtgggaggataacttgagccactgggtgacagggtttgcagtagatgtgtttggtttgaggttaaagtgggatgggacgggggcgacaccgtcctctcaattttttaattttttgggatcacgccgctacaaaaaaactactctggtgtttacctcgtccctacgtgactcccatttaaccactggagtaactgtgaccgtcccatttcatcctttcgtatacttggttaggtcgtcacagtggttcgccatactcgtcgcattagctaatgaaaactgtactagaacctagttttcttccctttgctactgaaatgaacactggttcacaaatgaaaagcttttgctactgaagtgaactgtgccactctttttccacctttgcgttccatgtgtttaacactggttcacaaatgaaaagcctttgctactgaactgagctgtgccaggcttctttacctttttagaacagtcaccactctttacatgtaacgatgtaaacgtgatgaggcaagacacttcgattttcaagggtgggcgtggg

SEQ ID NO: 215246 - DNA, 2156 bp, Zea Mays
cttgaattgaataggtggttaaaggctgagcttagagagagtctggaaaactcctcacttggggttcagctgatgacatgggccaaagttatgtgactgctgggaagcacgaggagactccagaagcttttccacttcctagcagtgtcgtgatagtgcgcgctgatgctggatgggctcactgtgttgcaataactgatgaatatgatgtttatacatggggttggaaagaatgtgttccaactggaagggttattggagaccagtcttcagttggaaccatggaaaaggatgaaaggcaaatggcaatggccactgaccaagtgagccctaggtcacaggtgtctaggacaagcagcggagcggcagctggttcctctgaaagcagaggcactgatgacagcacaaagcgacgaaagttgtctttagcaaaacatggacctgagagttcgacatccagtgatgaaagtctttcagcacccccttgtgttgtgacatttagtacaggagtgaaaatagtggctgtagccgctggtggtcgtcatacattagcactatcagatttaggtcaggtgtggggttggggatatggaggagaagggcaactaggtttgggttctagaatccgaactgtttcttctccccatcctgtaccgtgcattgaatcagcactatacaccaaggataggccatcagctatgaaaggtaacaaggctgctgaaggacatgtcagtaaagtcttgggaaattgcgtgagggcaattgcttgtggaggtcgtcacagtgctgtagtaacagattcaggagcacttcttacatttggatgggggctgtatggacagtgtggacaagggaatacagatgatgttttaagtccaacgtgtgtatcgtctatcctgggaatcaagatgcaagatgttgccgcaggtttgtggcacactgtatgtacatctgtagatggtgatgtgtattcgtttggaggaaaccagtttggacagcttggcactggttctgatcaggctgagactcttccaaaattggtagatgctacaagcctggagaataagaacgccagatccgtttcttgtggagctcgccatagtgctattataacagatgaaggtgaggtattctgctggggatggaacaagtatggccaggtgggtgccccttaacataccttttgcataaacatattggattgtaaaattagctgtggtctatcgaatctgtggtcgtttatgcagcttggccttggcgactcaatggacaggaacgtgccttgcagtgtacgtgtggacgcttaccacccgctaaacgtatcatgtggctggtggcacaccttggtgctcgcggagtcgcctgcttgaaacctgacaaagaaattaccttagattgacaattttgttaggaacttgtaggctcgtgcaggtacggtgatgctgcatttcatcgtgtacatacatggcagtgcatacagatatgtgtattcattctttgcggtgcgctcttcgacctgtgcgacgtagacgaaagcttgtatcgcactgcgtatacagttgaataggcttgcctcgacaaattgtgctcgaaactgggatctacaactcttgacaggttacgctgctgctccattgctagtagtggaaaattttccacaagcaacaatgcaagacagggtaaccggtttacgtgattgctaactccggacggacgtgatcctcgttacagaagatggatttgacatcgatatcattagggctcgtttgggagcctcataaccggtaaacccatgtcgtccagtacccgtgtgggaaaatacctgtgtgagctatgtggcgtttggaagcccacgggaggggaaagtatcacctgtgctgggaccggttttcacgggtggagaaaacacgcctccgaaggccggacacgcaacactcgccgaggctccagctccacttcccgtctcgtctccttctttcgattcagccgccacagccctcagccaccgccgtcgccacctgcctcgcccaccgcctctgaggaagaagacgtggattcgagggttgaccgctgagaaagaagacgctactccctgtctcgcctcctcttctagatccagccgccgccgtctcacccacggatctgaggaagaagac

SEQ ID NO: 215247 - DNA, 1958 bp, Zea Mays
cttgaattgaataggtggttaaaggctgagcttagagagagtctggaaaactcctcacttggggttcagctgatgacatgggccaaagttatgtgactgctgggaagcacgaggagactccagaagcttttccacttcctagcagtgtcgtgatagtgcgcgctgatgctggatgggctcactgtgttgcaataactgatgaatatgatgtttatacatggggttggaaagaatgtgttccaactggaagggttattggagaccagtcttcagttggaaccatggaaaaggatgaaaggcaaatggcaatggccactgaccaagatataataaaggcaactccattacagtgagccctaggtcacaggtgtctaggacaagcagcggagcggcagctggttcctctgaaagcagaggcactgatgacagcacaaagcgacgaaagttgtctttagcaaaacatggacctgagagttcgacatccagtgatgaaagtctttcagcacccccttgtgttgtgacatttagtacaggagtgaaaatagtggctgtagccgctggtggtcgtcatacattagcactatcagatttaggtcaggtgtggggttggggatatggaggagaagggcaactaggtttgggttctagaatccgaactgtttcttctccccatcctgtaccgtgcattgaatcagcactatacaccaaggataggccatcagctatgaaaggtaacaaggctgctgaaggacatgtcagtaaagtcttgggaaattgcgtgagggcaattgcttgtggaggtcgtcacagtgctgtagtaacagattcaggagcacttcttacatttggatgggggctgtatggacagtgtggacaagggaatacagatgatgttttaagtccaacgtgtgtatcgtctatcctgggaatcaagatgcaagatgttgccgcaggtttgtggcacactgtatgtacatctgtagatggtgatgtgtattcgtttggaggaaaccagtttggacagcttggcactggttctgatcaggctgagactcttccaaaattggtagatgctacaagcctggagaataagaacgccagatccgtttcttgtggagctcgccatagtgctattataacagatgaaggtgaggtattctgctggggatggaacaagtatggccagcttggccttggcgactcaatggacaggaacgtgccttgcagtgtacgtgtggacgcttaccacccgctaaacgtatcatgtggctggtggcacaccttggtgctcgcggagtcgcctgcttgaaacctgacaaagaaattaccttagattgacaattttgttaggaacttgtaggctcgtgcagacgaaagcttgtatcgcactgcgtatacagttgaataggcttgcctcgacaaattgtgctcctccattgctagtagtggaaaattttccacaagcaacaatgcaagacagggtaaccggtttacgtgattgctaactccggacggacgtgatcctcgttacagaagatggatttgacatcgatatcattagggctcgtttgggagcctcataaccggtaaacccatgtcgtccagtacccgtgtgggaaaatacctgtgtgagctatgtggcgtttggaagcccacgggaggggaaagtatcacctgtgctgggaccggttttcacgggtggagaaaacacgcctccgaaggccggacacgcaacactcgccgaggctccagctccacttcccgtctcgtctccttctttcgattcagccgccacagccctcagccaccgccgtcgccacctgcctcgcccaccgcctctgaggaagaagacgtggattcgagggttgaccgctgagaaagaagacgctactccctgtctcgcctcctcttctagatccagccgccgccgtctcacccacggatctgaggaagaagac

SEQ ID NO: 215248 - DNA, 1685 bp, Zea Mays
agcaggatgatcggactgccacgtggcttccctttctgccgtccgcgcctcccgcccggattgcatgttgcaaggcccaaggagattgccccacatgatcagttattttaggttagggcttgtgctttgcacttggcatcatccaagtatatttccgagctcaacacagtcgcagataagtacccagagcccgagcaccatcctgtatcgtatcacacgcacgcccatctgcgccaagcttgggtaaaagaaggatcggagaatggctgcgcagacgacggtgcaatgcaggttgccaaatgtccccgagttggttcattctttcttgcattcgtggatggtttcttggctttggctcccatcatcgtttttttcttcttcttttctttcttttggaaactggtgctaggagtagtagttcttgcattgagctagctgctgcttgtttgtggaatgctaggaccaattttctgagttggctctgcatttgtgtttcgttgcattgattgcagggtgatcggtggcggtggcatgcggacggtggagtgcctgaggggaaggcttctcgcggagcgggtggcatccaaggctgcaaaggaggatgccgaccaactgaccaaaaggctggacgagctagagaagaagctcgccggcgaggtcagggtgaggaacagggcggagaggaggctcaggagggccatcaagaagctggagtccctcaagatcctggacgtcgagctctcggaaggctccattgggtcgctgtcctccaacggccgttcggatcaccaggcgccggaggccgaggagaggaacggccctggctcgttgaccactcgtgggtctgtgctggcatccggtccttccggagaccccgacgccgacgccgacagggaatcgtcagagggatcatgcacccaggtgaattcgtcctcccgggacgggagctggtgctccgttgcgtcagagcaatcccggcctggttcttgcatggatcttgccggaaacaccaccaactgcggctcagaggggagttgcggtgaccatgattcagagagggaacaccttgatgcatccagtggctgtggctcagcaaaatcggaagaagcgttctacgaaagcgacgacaggctagcgctatcgcggggtctcgttgaaccaccaccagcagctgcaggcgaaggtccaagaacgcaggataacgacacgcatgcaggagaggtccgtgccatggatcacgaggaagaagaggagaccaacaagcttgcgatcgttctagccgacccccagccacagtcgcaaggcgacgtgtagtccgttctcctggcgctgcggcgggtgaaggagcagctgcgctacaccatgaaccaggaactcgccgcgccaaccaggagctctacgcccaccgagcgagcgtgccacactaggaaaccgtgtggctcacttctactacggtgtccaacattcggttccgtgaattattcgtagtgctgtttaggggagtggagtatctgtacagaatggaataaggtcgctcatgtggatgtggagtcactattttattaaaaagattgaatctctaggtgctttgcttgcttctgtttactgactagtttatcgcgcgcaatgtgatacggttatctgttatgcaatgctccgtgattatgggtttaaacaccctgtcg

SEQ ID NO: 215249 - DNA, 1392 bp, Zea Mays
ctcactcagtgttttggctactcgtcactgctgacgctcgagctgaactaattttccttcggcttccctgtcatctctgactggccttgcttgctgctgccatcttgcatgctcttgtttattaacagcgccataattttacttgcgaaaggcataatttttcctgttcgtatcaccgctggaggcagttgtagtatcaccggctgacaggtttgatatggaagcccttcctcctaccttgacatctgcttctgagcagccacctctctatgatggcacaaccagagctgcagattgtatatgtcctacgtttgcccgtatgcgcaacgggcatggatcacgaggaattacaagggtttgcaggagaagatcaagctagtccctatgaacatggcagataagcctggatggtataaggaggtttaccccaacaatcaggtgccttcgttggagcacaacaagagggtcataggagagagcttggatctgataaagtacatcgatagcaacttcgacggacccaaacttaccatcaccgacgatcctgaaaggcaaaggttcgcagaagagctgctggggtattcagacgctttcaaccgggcgtttctcgacgcgcttagatctgagggggccatgaccactgaagctgttgctgctctggacaaaatcgacagcgccctgttaaaattcgatgatggccctttcttccttggccaacttaatctggtggacattgcatacgcaccattcatcgaaggttttcagatattttttgctggcatgaagaattgtgacatcacccaagggagagttcacatacagaaattcatcgaggaaatgaacaagattgacgcgtgcacgcagaccaagcaggaccctcaagtgctgcttgctctcacaaagaagaagtttgggatttaaggatgcatgaagcacctgatctgagctccacaaatggatcttcgtacgaataaaatgaaggagagtccgttttgaattgggaataatcaggacgagttgaacagcttgacagttgaatgctgtcagtgttctcgagcatgataaactgtaaagacttcgctattttatttaggtttaataatgactattaaacctggcgagtaaagcttcagctccaattgtccatgtcagtgcttgttgacgctttttcggagcgtcaaatactcaagaagaaccggcggcggtgctctctggtcaggcgcggacggtccgcggcacagggccggacggtccgcgacctggcgcgaggcggcggtgctctctggtcaggcgcggacggtccgcggcctggggccagacggtccgcgacctgatgcaggagcttgggtcctctgcctgacggccggacggtccgcgcgtgcacaggggcgg

SEQ ID NO: 215250 - DNA, 2442 bp, Zea Mays
ctggaagtcaggaactcactggagggcagcagccgaagcccgaaggtatctttgttgtgcccctctgttccctgaactttcagcaaagagtgtcaatagctcatgcttcatttccttttatctacaagcttgtatatatcccaggttataaagatttgttcttgttcagtgaacactggtgcttgctgaagcagacttgttagtattttgcagccttttcttgcttttgttcttcttgcttaagaatctcgccatgaaattctaacaagaacaagaaatagagtggttcagtgtctccagaatgagatgttaccgttgttttcttctggctcctgtcgtaattgcctgtttcttctcccggataacaaccactaccctggccgaccctcgggcgacggtggttcgtgagttgtgcaacaaaaccaaagatgacggtcctggggcggtttgggccaacaacttcgtcgtcgccttcgacaacctgaactcggatctcgagcaaaagggatggggggtaacctccgttgggcaagatcctatcaccttctacgcgctcgtgcaatgcctagaagatctcagcacggttgactgcacactgtgctactcagagataaggtctcttctcccgaaatgctatccggagatcggaggccggatatatctcgatggctgctttatgaggtacgcgaactactctttcttcggcgaggccgtggactcgttggatacaagcgtgtgctcttccagtaaccgcagctcagagaagcggggcttcggttcagctgtggatgccgtgttgagcaacgtgacttccttggctgtcaagagcggcaaagggttcgcagtcacttcagctttcggatcaacagaatttgcagcttatgcacttgctcagtgctgggagaacctgaacacttctagctgtgcagcctgtctcagtgcagctgcaggttcggtggccaaatgtgcaccggcagaggaaggccgtgcactctttgccggctgcttcgtcagatattcgacagcacctttctggaactcggaggattctggctccagctcaaagaagcacgttgttccttggacagtcctgggtttctcggttggtctcgttcttgtactcatcggttcagtactggcatggaggaagaagaagaaagcttgcagggcaggagaaggatcattgaggggcttgtatgggtctgaacttcctgcaaggatttctcaatcaagtctgaattacagctataaggatctgaagaaagcaacgtgttccttcagcgtagagaacaagataggacaaggcagcaatggtactgtgtacaaggctgttcttcctggtgggaatgaagtcgctgcaaagagattgttcctgaacacgaaacaatgtctcgatcagttcttcaatgaagttgacgtgataagccaggtacgtcacaaaaatctggtgaaactgctcggatgcagcgttgatggcccggaaagcttcttgatatatgagtaccacttgaacaggagcttagatctgtccatattcgctgatggccagcagaagaggcgtctggattggcagcaaaggttcgatgttatttttggcgtagcagagggcctctgctacctccacgaagagtcagaaactcggatcatccaccgggacatcaaagccagcaacgtcctgttggaccagaagctgaagcccaagataactgactttgggcttgctcgagtcctatgcggtgacaggactcatcttaccacagggattgccgggacagttggttatatggctcctgagtatgttgtccatggccacctcaccaagaaggccgacgtgtacagcttcggcgtgctggctgtcgagatcgtcaccggaaagcggtgttgtgggtcgacagggtctcactctggtcactcacttctagcacaggtttggcatagttacaagaccaacacgacggagaaagtcgttgacacgaggctgcagcaagagagtgctccgttggacttggaggagatcacgcgcgtcgtgcaggtcgggctgctgtgcacacaggcaaaccccgacgagcggccggccatgtcgagagtggtggagctgctgagggacagagacggagaacgtggcgatgcggacttcatcctaggcgaccccccgtttttcgaggtcgaaatcgacgccgccgggggaggcgtcgacggcgaagcatgcacgctgctgccctgaaactcgacgaccactcatgaggtatccgggtggacgtattctgggttcagagtcccatgatttatcggatccggtggctttcggaatctgatattggacactttccaacctgatgtggtgcgaccaggttgaagttgagggttgtgcggtgcctcactcatgtaatgtgccttgaactaaaagtgcccactccactttggaacgtatggaattttttt

SEQ ID NO: 215251 - DNA, 520 bp, Zea Mays
atggccatggtcatcaaatttcaggttatgacagacccagatgttccaggaccaagtgatccatacctaagggagcaccttcattggatcgtgactgatatacctgggacaacagatgcctccttcgggcgacagatcataagctacgagagcccaagacctagcattgagatcatttcaacacccggcagttcgctgaggaaaatgaccttggcctccctgtagctgccgtctacttcaatgcacagagagaaactgctgctaggagacgctgaaaatcccagctcttattgcctacctgacgataataagggccttctgatcttctttctaggaagtcgatgaacttattctacattaaattctcctgagcactaccttataaataaaccagatgtattttgcggattgtgttagtactagaatgttttgtaagtaggaagaatgagaactatgaatgatccatgcttgtggtacaatttcatgtgtaagacctctatcactgaaagccagaaatcag

SEQ ID NO: 215252 - DNA, 3552 bp, Zea Mays
aaaaatcaacacttgcttgctccctctcttctccccttcgtccaggcgccggatctgacacctctcccaccaccaagcttggctgcgctgccgcgcctcgcagatcccgatctccccatgcctcctcgcccccgctgaccccactgcggctgccgacagccacgatggcgtcgcgcccgcccctccgcactacctccgtcgcctccgtcttttcctccaccgactcctccacttccaccggcccccccggtggcgtcccgcagtccatcaccgcgctcctcaacaacccgctcccctcctccgccgcctcctcgtactcctggttgtcgtggccgcccaccaccataacgctacccgatgcggctccaccgccgccgtcgcacccctgcgagatcacccgcgccgacttcgcaccctaccttgccgccgtctccgaccccttcgcgcgcttcgccgacatccgcctccatgcccacgccgagcttgccgcctcttctgacgccgagggcgcccccgcggcctcctccggcctcgccgcctgtctccgtgaggtgcccgcgctcttctttaaggaggacttcgcgctcgaagacgggcccaccttccaggccgcctgcccgctcgacgacgatgcgctgcaggagcgcctcggacagcacctcgacgtcgttgaggcccaccttgtgcgggagatagcactccggtctgagtccttctatgaggcgcagggccggctgcgcgggcttgatggggagatcgtcacggcggtagggaggatccgcgagctcagagaggtggtccaggttctcacgggggacctcgtcggggcagcgaggcaggtgcaagagctcaatgctacccgaggcaaccttgtggcgctgcagcagaagctcactgtcatcctctatgttagccaggcgcttaccgcgctgaagctgcttgttgcagctgcagattgtgctggtgcactcgatgtcatcgataacttgcaaaatctgctagatactgatgaacttgctgggctttattgctttcggcatattcgagatcagctgggaacatcactagattccgtgaacagcagaatttgtgcatgctgctgttcctgatggaaaagctgtagatgctatgattttatcaactgtgaaaagaaaggcttcgagcccattgaatgggacagaccatgagggtaacatagacgaggaggaaagttttattctcagggaccggctcctccccctcattatttgcctactgagaacggacaaatttcctgcagttctcagaatttaccgggatacacttataactgttatgaaagcttcaatcaaagcaacagtagcggaattactccctgttttaactgccagaccaatagattctgattcagtaactggaggcagagctaccgatgctgacgctggaggccagtccttggcaaataagttgcggagtctttcatctgaaggatttgttcaacttttatctgccattttcaggatagtacaggtacatttacagcaagcagctgaagtgaaaagaatagttgagtggatcatgggaaaccttgatgaaacattaagtattgatgctagtaatcctacattacaacatggtggttcagttatttatgatacccaagagaatgactcttcacggggctctaatactcttgcacggagtacttccaagatcccatttgtccaaggaaaaataaatgatttttccattataagttcaataaagaatgttcgggctgatgtcttgagagaaaacactgaagcagttttcgcggcttgtgatgctgcccatggacgatgggctaagctactaggtgttcgtgctggattacatcccaggttaaggcttgaagaattcttgatcatctacagcataacagaagaatttatagctgctacagaaaagattggaggcaggttgggttacaacattcgtggaatcctacaacaacaatcaaagcaatttgttgattatcagcataatgttcggatgacaaaaatcaaggcagttcttgaccaagagacgtgggttgctgtggatgttcctgaagagtttcaagcaatcgttctttcactttcatccacttactcttctgttaatggcatggagatgcctagcactgatgataactcaaagttcagtgatcatcagcctacaagtcaagaactgacatattctgctgaaaataatgctgataatggcaaagtaacatccgggactggtgaaaaccaggttgaatccacttctcagagtgcaaataatgttgccgggaatctgaaatccaccttgcaaacaattgtacatggaggtgttggctatcatatggtaaactgcggtttgatactgttgaagatgttatctgaatatgttgacatcagtaaatgtttaccatcactatctttggaggtggtccaacgtgttgtggaaatattgaagcttttcaacactaggacttgccaacttgttctcggtgcaggggccatgcagatatcagacgagtgcttttcctgaaaatacctgaagcacgcaaacagttgctaatgtctgagctggatagagtggctcaggactacaagatccatcgcgatgagattcacagtaaacttgtccagatcatgagagagaggctgcttgcaaatcttagaaaattaccccaaattgtggaaggctggaatgccccacaggataatgatgtgcagccgagtcaatttgctaaagctgttacaaaggaagttacctatttgcaccgtatcctttctcaaacactgcttgaggttgaggtgcaaacaatattcaggcaagtggttcaaatatttcattcacatattacagaagcatttacaaaattggaagtcagtactcctcaggcaaaggatagattatgccgagatgttcagcatattcttgcatgcatccggaagttgccagctgacaacttcagttcagaaactattccaaattatggtcttcttgacgaattcttggctgagaactttgggacgaaagttggtgaatgattgactgtacattaggaactgactcatgtctataaatgttcaatggtggaaactggaaactatgttgattgggacgtggtccaagatgttgccgtttttggcgtgaattctgtgcaggtattgctgtgcgggtttgtgaaaaaaaaatcagctgctctgatgttcaacaaactaacatgctgatcctcacacttcccgagatgaatttttgggtccacagctttgccatttcaggcaattttttgtttttattttgattcaatagtaatttgattcccgtttggcaagctgatatcggttagatgctggtatagaggaaacctgagttttggcagcacgacctaatctttgcatggtgcttcatgctgttaggtccactgtatcgaacatgccgttgagatggcaacccatgtattttatccctgtaatgtttgtaattattcttcctggtgcgaaagtaatcaattgttaaatgctaatgtaggcagaacttcaagctccgtcagtgtctatt

SEQ ID NO: 215253 - DNA, 1073 bp, Zea Mays
atgactgggcgcccgccgctctacgccaggtctccggctcgtcgccaggccttcgcgagcaacgagcacccaccaccaggtaagcgcaccctccctccctcccttccggcgatgaccgggcggccgccgccctacgccaggtcttcggcccgtcgccaggccttcgcgggcgacgagcatccaccaccagctctgctgggtcctccgccgctggtcgacccgagcgcaggccgaggagtgtgcttgatgagcacctcatggagggacaagcagcgcccggaactcgtcaatttcgtcgccacgttcctcgctaccaacatgtaccgcctcaatttcatgtcgctttctccggacttcatattcaacaatgggggcttatcggttgctttcgccttcgagaccgactggcttcctgaaagggaagctgcggtcttcagcagggtgactacactgaagaggcagttcaagtacctctatgtcgttgtcgtcgtccgctcggcagagcagaatgaatcatttaatcagtcatatttcaagtatggcatggagcttggctgtccaacattcgtccctgtttgtgatccagcgatgggattcgagaagattgtaaggatagctcatgctcgtggagtctgcaagcagaaagacaatatcgcaactatgagaattgagcgtgagcaagctgttcagtgcatggatgcgtttttacgagtgctcacctctattcctggtattgacagtcatgatgcaaatgcccttgcccaagccattggctctatcgaagcaattgcaaaagcatccaaggaattcattttggaaaacaccgacctttccactgaaaaggcagagagaattgttaggttcttcagggatccacagtacttcttaagccctaaacttaattaattcttgcaggcaaaatcagattgtttcgagtggactgtcgaagcccgttgcaatagcctcgtttgctttagctttttttagtttctagtcaccagaagctactgcggacggccaaacacccagcttttcaacctacttatgtgagaatcactttggttaaaaccgtt

SEQ ID NO: 215254 - DNA, 2182 bp, Zea Mays
atggctggcatcgggcatctccactcccactccaccggccccacctccgcgaggggcgacccgagaacaccaccacgcccgccatgtggcgccgcctccaaaccctagccccctcgctccgccgcgccgccgcatcgtcgtccccggcctccgcccgcgccgtgcccttgtccacggtgccggtggccgcgttccggcgcacttcgaccctcctctcctctcccggcgacaagccggcgcccagcaaggtcgaggatgtcatgccgatcgccacggggctggagcgcgaggagctcgaggcggagctccaggggaagaagcggtttgacatggatcctgccgtcggccccttcggtactaaggttggtttctcgagaagcaatgattgcattttttgtgggacggagagagtagtttcttcctcaagctgagtcctgttaggactgtgaagttagattccgttttcttcgtcgtatttgtatttgctgcttcattgaatgtgcatgctgcttggttcccaataaaaactgaagcagtgcgtttgtttattctctctgcatggctgcatgctcctctcccaaacgttcaccttggcacaagagacgatgcataccggatagaaataactcattccttggtcactgtgctcgactactataagatggagattttagaaaggagggagtatgtctatattcaatggataatgaatttagacacatataaaacacatacatcaagtattgtatgaatctattaattttctaaaacgagttttaatttgggactgatggagtacctttttaagtgatgggcccaagatatctaacaaattatgagtcacttgtagtatctgttcctactgcttgatttattgacaggaactcttttgtgtatgttacgtggaaacttgaaagttttactgttgtatgacccatttatcaattgttgtgtgcagattaaacttgtgctaagcacaagtaatgacacaatatttcactccagtatggacatggctttaagtaaaaaagacccaccagatacatctcttgttactgatattaatatcgtaaactacaaagtatttgatatgtgcatgcttaagctgcattacctgaagcttgtttcaaatacaccagcagtcagccagccgtacatgaaattcgtagggtatgtttataactgccttgtcacttgggagcattgcgttaaatatcagtgtttgatgtatctggtgcttctattcttcaaccgtaggcatgccctcacatccatgctgagtactgacattgcctgtatttggtctagatatgtgttgaagttcttgaccactcacttcccttctgttttttttctttccagacttcctatgctgcaagatctcaattgttctggacaatataaagtactaccttaagaaaacaagtataataccaaaaaaacactaaacaacaggggcacacttttcacttgtttgtggttatgctattcctaaattttctaattttcaatcaattgatgcacccagcttctatgcataccctgtgctgactactgacattgtgtgcgcttttagtgaagagatgtaggatttcttgatcactctctccccttggttttgcataccactctttgtgctgcaagattgtccatttgttaattttgaatgtattgtctgcacgaggaatcagccgtgattgaatcctactataacaagagaatagttggctgccctggtgccgaaggagaggatgaacacgatgtcgtctggttttggttggaaaaggataaaccgcatgagtgcctagtctgctcacgctcaaggtcattggtgatgggggtgatccagatggccacgatgacgaggatgatcatcactgaggccttgtgtcgataatgataataagaactttgtgaaacatggttttgtcctatctttgcagcatcagactgccctatagagtattgtaattgataagtgtttgaccatgaaccaggtcgggtggtgttttacacctacgaattttgttcagatcttttcgaccatacggttgcttctgtttggaatatagatttttttttctggagtgcaacatcaaataaaggatgagtgcatcggtttcactctattgaccatctatttttgggttatattttgttcctgattggatggatacttacg

SEQ ID NO: 215255 - DNA, 2099 bp, Zea Mays
atggctggcatcgggcatctccactcccactccaccggccccacctccgcgaggggcgacccgagaacaccaccacgcccgccatgtggcgccgcctccaaaccctagccccctcgctccgccgcgccgccgcatcgtcgtccccggcctccgcccgcgccgtgcccttgtccacggtgccggtggccgcgttccggcgcacttcgaccctcctctcctctcccggcgacaagccggcgcccagcaaggtcgaggatgtcatgccgatcgccacggggctggagcgcgaggagctcgaggcggagctccaggggaagaagcggtttgacatggatcctgccgtcggccccttcggtactaagattccgttttcttcgtcgtatttgtatttgctgcttcattgaatgtgcatgctgcttggttcccaataaaaactgaagcagtgcgtttgtttattctctctgcatggctgcatgctcctctcccaaacgttcaccttggcacaagagacgatgcataccggatagaaataactcattccttggtcactgtgctcgactactataagatggagattttagaaaggagggagtatgtctatattcaatggataatgaatttagacacatataaaacacatacatcaagtattgtatgaatctattaattttctaaaacgagttttaatttgggactgatggagtacctttttaagtgatgggcccaagatatctaacaaattatgagtcacttgtagtatctgttcctactgcttgatttattgacaggaactcttttgtgtatgttacgtggaaacttgaaagttttactgttgtatgacccatttatcaattgttgtgtgcagattaaacttgtgctaagcacaagtaatgacacaatatttcactccagtatggacatggctttaagtaaaaaagacccaccagatacatctcttgttactgatattaatatcgtaaactacaaagtatttgatatgtgcatgcttaagctgcattacctgaagcttgtttcaaatacaccagcagtcagccagccgtacatgaaattcgtagggtatgtttataactgccttgtcacttgggagcattgcgttaaatatcagtgtttgatgtatctggtgcttctattcttcaaccgtaggcatgccctcacatccatgctgagtactgacattgcctgtatttggtctagatatgtgttgaagttcttgaccactcacttcccttctgttttttttctttccagacttcctatgctgcaagatctcaattgttctggacaatataaagtactaccttaagaaaacaagtataataccaaaaaaacactaaacaacaggggcacacttttcacttgtttgtggttatgctattcctaaattttctaattttcaatcaattgatgcacccagcttctatgcataccctgtgctgactactgacattgtgtgcgcttttagtgaagagatgtaggatttcttgatcactctctccccttggttttgcataccactctttgtgctgcaagattgtccatttgttaattttgaatgtattgtctgcacgaggaatcagccgtgattgaatcctactataacaagagaatagttggctgccctggtgccgaaggagaggatgaacacgatgtcgtctggttttggttggaaaaggataaaccgcatgagtgcctagtctgctcacggtactttgtgctcaaggtcattggtgatgggggtgatccagatggccacgatgacgaggatgatcatcactgaggccttgtgtcgataatgataataagaactttgtgaaacatggttttgtcctatctttgcagcatcagactgccctatagagtattgtaattgataagtgtttgaccatgaaccaggtcgggtggtgttttacacctacgaattttgttcagatcttttcgaccatacggttgcttctgtttggaatatagatttttttttctggagtgcaacatcaaataaaggatgagtgcatcggtttcactctattgaccatctatttttgggttatattttgttcctgattggatggatacttacg

SEQ ID NO: 215256 - DNA, 2192 bp, Zea Mays
atggctggcatcgggcatctccactcccactccaccggccccacctccgcgaggggcgacccgagaacaccaccacgcccgccatgtggcgccgcctccaaaccctagccccctcgctccgccgcgccgccgcatcgtcgtccccggcctccgcccgcgccgtgcccttgtccacggtgccggtggccgcgttccggcgcacttcgaccctcctctcctctcccggcgacaagccggcgcccagcaaggtcgaggatgtcatgccgatcgccacggggctggagcgcgaggagctcgaggcggagctccaggggaagaagcggtttgacatggatcctgccgtcggccccttcggtactaaggttggtttctcgagaagcaatgattgcattttttgtgggacggagagagtagtttcttcctcaagctgagtcctgttaggactgtgaagttagattccgttttcttcgtcgtatttgtatttgctgcttcattgaatgtgcatgctgcttggttcccaataaaaactgaagcagtgcgtttgtttattctctctgcatggctgcatgctcctctcccaaacgttcaccttggcacaagagacgatgcataccggatagaaataactcattccttggtcactgtgctcgactactataagatggagattttagaaaggagggagtatgtctatattcaatggataatgaatttagacacatataaaacacatacatcaagtattgtatgaatctattaattttctaaaacgagttttaatttgggactgatggagtacctttttaagtgatgggcccaagatatctaacaaattatgagtcacttgtagtatctgttcctactgcttgatttattgacaggaactcttttgtgtatgttacgtggaaacttgaaagttttactgttgtatgacccatttatcaattgttgtgtgcagattaaacttgtgctaagcacaagtaatgacacaatatttcactccagtatggacatggctttaagtaaaaaagacccaccagatacatctcttgttactgatattaatatcgtaaactacaaagtatttgatatgtgcatgcttaagctgcattacctgaagcttgtttcaaatacaccagcagtcagccagccgtacatgaaattcgtagggtatgtttataactgccttgtcacttgggagcattgcgttaaatatcagtgtttgatgtatctggtgcttctattcttcaaccgtaggcatgccctcacatccatgctgagtactgacattgcctgtatttggtctagatatgtgttgaagttcttgaccactcacttcccttctgttttttttctttccagacttcctatgctgcaagatctcaattgttctggacaatataaagtactaccttaagaaaacaagtataataccaaaaaaacactaaacaacaggggcacacttttcacttgtttgtggttatgctattcctaaattttctaattttcaatcaattgatgcacccagcttctatgcataccctgtgctgactactgacattgtgtgcgcttttagtgaagagatgtaggatttcttgatcactctctccccttggttttgcataccactctttgtgctgcaagattgtccatttgttaattttgaatgtattgtctgcacgaggaatcagccgtgattgaatcctactataacaagagaatagttggctgccctggtgccgaaggagaggatgaacacgatgtcgtctggttttggttggaaaaggataaaccgcatgagtgcctagtctgctcacggtactttgtgctcaaggtcattggtgatgggggtgatccagatggccacgatgacgaggatgatcatcactgaggccttgtgtcgataatgataataagaactttgtgaaacatggttttgtcctatctttgcagcatcagactgccctatagagtattgtaattgataagtgtttgaccatgaaccaggtcgggtggtgttttacacctacgaattttgttcagatcttttcgaccatacggttgcttctgtttggaatatagatttttttttctggagtgcaacatcaaataaaggatgagtgcatcggtttcactctattgaccatctatttttgggttatattttgttcctgattggatggatacttacg

SEQ ID NO: 215257 - DNA, 2089 bp, Zea Mays
atggctggcatcgggcatctccactcccactccaccggccccacctccgcgaggggcgacccgagaacaccaccacgcccgccatgtggcgccgcctccaaaccctagccccctcgctccgccgcgccgccgcatcgtcgtccccggcctccgcccgcgccgtgcccttgtccacggtgccggtggccgcgttccggcgcacttcgaccctcctctcctctcccggcgacaagccggcgcccagcaaggtcgaggatgtcatgccgatcgccacggggctggagcgcgaggagctcgaggcggagctccaggggaagaagcggtttgacatggatcctgccgtcggccccttcggtactaagattccgttttcttcgtcgtatttgtatttgctgcttcattgaatgtgcatgctgcttggttcccaataaaaactgaagcagtgcgtttgtttattctctctgcatggctgcatgctcctctcccaaacgttcaccttggcacaagagacgatgcataccggatagaaataactcattccttggtcactgtgctcgactactataagatggagattttagaaaggagggagtatgtctatattcaatggataatgaatttagacacatataaaacacatacatcaagtattgtatgaatctattaattttctaaaacgagttttaatttgggactgatggagtacctttttaagtgatgggcccaagatatctaacaaattatgagtcacttgtagtatctgttcctactgcttgatttattgacaggaactcttttgtgtatgttacgtggaaacttgaaagttttactgttgtatgacccatttatcaattgttgtgtgcagattaaacttgtgctaagcacaagtaatgacacaatatttcactccagtatggacatggctttaagtaaaaaagacccaccagatacatctcttgttactgatattaatatcgtaaactacaaagtatttgatatgtgcatgcttaagctgcattacctgaagcttgtttcaaatacaccagcagtcagccagccgtacatgaaattcgtagggtatgtttataactgccttgtcacttgggagcattgcgttaaatatcagtgtttgatgtatctggtgcttctattcttcaaccgtaggcatgccctcacatccatgctgagtactgacattgcctgtatttggtctagatatgtgttgaagttcttgaccactcacttcccttctgttttttttctttccagacttcctatgctgcaagatctcaattgttctggacaatataaagtactaccttaagaaaacaagtataataccaaaaaaacactaaacaacaggggcacacttttcacttgtttgtggttatgctattcctaaattttctaattttcaatcaattgatgcacccagcttctatgcataccctgtgctgactactgacattgtgtgcgcttttagtgaagagatgtaggatttcttgatcactctctccccttggttttgcataccactctttgtgctgcaagattgtccatttgttaattttgaatgtattgtctgcacgaggaatcagccgtgattgaatcctactataacaagagaatagttggctgccctggtgccgaaggagaggatgaacacgatgtcgtctggttttggttggaaaaggataaaccgcatgagtgcctagtctgctcacgctcaaggtcattggtgatgggggtgatccagatggccacgatgacgaggatgatcatcactgaggccttgtgtcgataatgataataagaactttgtgaaacatggttttgtcctatctttgcagcatcagactgccctatagagtattgtaattgataagtgtttgaccatgaaccaggtcgggtggtgttttacacctacgaattttgttcagatcttttcgaccatacggttgcttctgtttggaatatagatttttttttctggagtgcaacatcaaataaaggatgagtgcatcggtttcactctattgaccatctatttttgggttatattttgttcctgattggatggatacttacg

SEQ ID NO: 215258 - DNA, 956 bp, Zea Mays
atggctggcatcgggcatctccactcccactccaccggccccacctccgcgaggggcgacccgagaacaccaccacgcccgccatgtggcgccgcctccaaaccctagccccctcgctccgccgcgccgccgcatcgtcgtccccggcctccgcccgcgccgtgcccttgtccacggtgccggtggccgcgttccggcgcacttcgaccctcctctcctctcccggcgacaagccggcgcccagcaaggtcgaggatgtcatgccgatcgccacggggctggagcgcgaggagctcgaggcggagctccaggggaagaagcggtttgacatggatcctgccgtcggccccttcggtactaaggttggtttctcgagaagcaatgattgcattttttgtgggacggagagagtagtttcttcctcaagctgagtcctgttaggactgtgaagttagccgtgattgaatcctactataacaagagaatagttggctgccctggtgccgaaggagaggatgaacacgatgtcgtctggttttggttggaaaaggataaaccgcatgagtgcctagtctgctcacggtactttgtgctcaaggtcattggtgatgggggtgatccagatggccacgatgacgaggatgatcatcactgaggccttgtgtcgataatgataataagaactttgtgaaacatggttttgtcctatctttgcagcatcagactgccctatagagtattgtaattgataagtgtttgaccatgaaccaggtcgggtggtgttttacacctacgaattttgttcagatcttttcgaccatacggttgcttctgtttggaatatagatttttttttctggagtgcaacatcaaataaaggatgagtgcatcggtttcactctattgaccatctatttttgggttatattttgttcctgattggatggatacttacg

SEQ ID NO: 215259 - DNA, 2814 bp, Zea Mays
atggctggcatcgggcatctccactcccactccaccggccccacctccgcgaggggcgacccgagaacaccaccacgcccgccatgtggcgccgcctccaaaccctagccccctcgctccgccgcgccgccgcatcgtcgtccccggcctccgcccgcgccgtgcccttgtccacggtgccggtggccgcgttccggcgcacttcgaccctcctctcctctcccggcgacaagccggcgcccagcaaggtcgaggatgtcatgccgatcgccacggggctggagcgcgaggagctcgaggcggagctccaggggaagaagcggtttgacatggatcctgccgtcggccccttcggtactaaggtgaggtgcccctgcttttgcgacttagctcagagcctcggactctaggggatcacgtcaggtgtttggtgtcgtgcagagaaatttgcacaagtacttgctccgtcctagaaagaatgcaattatgggaaccgtcccagtgaaactagctcaagtttgaccaaattatagtaaataatattaacatgtatatctccaaataagtttatcatgaaaatatattttgtaattagttcagttatacttaatttgtaccataaatattattgtttttatataattttagtcaaatttcaaataggttggtttctcgagaagcaatgattgcattttttgtgggacggagagagtagtttcttcctcaagctgagtcctgttaggactgtgaagttaggtaattattggtactttttagaattaattatgtcaaaaaaaacttttgctgtgtccatggctattgttcacctgatctgctctgtggtctttggctagttgaacgtgttgtagtctagtttgttattaagacagccatttcgtggtacaaaatgtcatcatgttagaggccccagtgttcaatgtttaccagtctgctcattagttgtcatttacattgaagtctgtggcttcttttactccctctgtcctaaaatagtattcgttttagctctcggtttttactccctccgttccataatctgcctcgtctaagcaatttttttttgcagattccgttttcttcgtcgtatttgtatttgctgcttcattgaatgtgcatgctgcttggttcccaataaaaactgaagcagtgcgtttgtttattctctctgcatggctgcatgctcctctcccaaacgttcaccttggcacaagagacgatgcataccggatagaaataactcattccttggtcactgtgctcgactactataagatggagattttagaaaggagggagtatgtctatattcaatggataatgaatttagacacatataaaacacatacatcaagtattgtatgaatctattaattttctaaaacgagttttaatttgggactgatggagtacctttttaagtgatgggcccaagatatctaacaaattatgagtcacttgtagtatctgttcctactgcttgatttattgacaggaactcttttgtgtatgttacgtggaaacttgaaagttttactgttgtatgacccatttatcaattgttgtgtgcagattaaacttgtgctaagcacaagtaatgacacaatatttcactccagtatggacatggctttaagtaaaaaagacccaccagatacatctcttgttactgatattaatatcgtaaactacaaagtatttgatatgtgcatgcttaagctgcattacctgaagcttgtttcaaatacaccagcagtcagccagccgtacatgaaattcgtagggtatgtttataactgccttgtcacttgggagcattgcgttaaatatcagtgtttgatgtatctggtgcttctattcttcaaccgtaggcatgccctcacatccatgctgagtactgacattgcctgtatttggtctagatatgtgttgaagttcttgaccactcacttcccttctgttttttttctttccagacttcctatgctgcaagatctcaattgttctggacaatataaagtactaccttaagaaaacaagtataataccaaaaaaacactaaacaacaggggcacacttttcacttgtttgtggttatgctattcctaaattttctaattttcaatcaattgatgcacccagcttctatgcataccctgtgctgactactgacattgtgtgcgcttttagtgaagagatgtaggatttcttgatcactctctccccttggttttgcataccactctttgtgctgcaagattgtccatttgttaattttgaatgtattgtctgcacgaggaatcagccgtgattgaatcctactataacaagagaatagttggctgccctggtgccgaaggagaggatgaacacgatgtcgtctggttttggttggaaaaggataaaccgcatgagtgcctagtctgctcacgctcaaggtcattggtgatgggggtgatccagatggccacgatgacgaggatgatcatcactgaggccttgtgtcgataatgataataagaactttgtgaaacatggttttgtcctatctttgcagcatcagactgccctatagagtattgtaattgataagtgtttgaccatgaaccaggtcgggtggtgttttacacctacgaattttgttcagatcttttcgaccatacggttgcttctgtttggaatatagatttttttttctggagtgcaacatcaaataaaggatgagtgcatcggtttcactctattgaccatctatttttgggttatattttgttcctgattggatggatacttacg

SEQ ID NO: 215260 - DNA, 2824 bp, Zea Mays
atggctggcatcgggcatctccactcccactccaccggccccacctccgcgaggggcgacccgagaacaccaccacgcccgccatgtggcgccgcctccaaaccctagccccctcgctccgccgcgccgccgcatcgtcgtccccggcctccgcccgcgccgtgcccttgtccacggtgccggtggccgcgttccggcgcacttcgaccctcctctcctctcccggcgacaagccggcgcccagcaaggtcgaggatgtcatgccgatcgccacggggctggagcgcgaggagctcgaggcggagctccaggggaagaagcggtttgacatggatcctgccgtcggccccttcggtactaaggtgaggtgcccctgcttttgcgacttagctcagagcctcggactctaggggatcacgtcaggtgtttggtgtcgtgcagagaaatttgcacaagtacttgctccgtcctagaaagaatgcaattatgggaaccgtcccagtgaaactagctcaagtttgaccaaattatagtaaataatattaacatgtatatctccaaataagtttatcatgaaaatatattttgtaattagttcagttatacttaatttgtaccataaatattattgtttttatataattttagtcaaatttcaaataggttggtttctcgagaagcaatgattgcattttttgtgggacggagagagtagtttcttcctcaagctgagtcctgttaggactgtgaagttaggtaattattggtactttttagaattaattatgtcaaaaaaaacttttgctgtgtccatggctattgttcacctgatctgctctgtggtctttggctagttgaacgtgttgtagtctagtttgttattaagacagccatttcgtggtacaaaatgtcatcatgttagaggccccagtgttcaatgtttaccagtctgctcattagttgtcatttacattgaagtctgtggcttcttttactccctctgtcctaaaatagtattcgttttagctctcggtttttactccctccgttccataatctgcctcgtctaagcaatttttttttgcagattccgttttcttcgtcgtatttgtatttgctgcttcattgaatgtgcatgctgcttggttcccaataaaaactgaagcagtgcgtttgtttattctctctgcatggctgcatgctcctctcccaaacgttcaccttggcacaagagacgatgcataccggatagaaataactcattccttggtcactgtgctcgactactataagatggagattttagaaaggagggagtatgtctatattcaatggataatgaatttagacacatataaaacacatacatcaagtattgtatgaatctattaattttctaaaacgagttttaatttgggactgatggagtacctttttaagtgatgggcccaagatatctaacaaattatgagtcacttgtagtatctgttcctactgcttgatttattgacaggaactcttttgtgtatgttacgtggaaacttgaaagttttactgttgtatgacccatttatcaattgttgtgtgcagattaaacttgtgctaagcacaagtaatgacacaatatttcactccagtatggacatggctttaagtaaaaaagacccaccagatacatctcttgttactgatattaatatcgtaaactacaaagtatttgatatgtgcatgcttaagctgcattacctgaagcttgtttcaaatacaccagcagtcagccagccgtacatgaaattcgtagggtatgtttataactgccttgtcacttgggagcattgcgttaaatatcagtgtttgatgtatctggtgcttctattcttcaaccgtaggcatgccctcacatccatgctgagtactgacattgcctgtatttggtctagatatgtgttgaagttcttgaccactcacttcccttctgttttttttctttccagacttcctatgctgcaagatctcaattgttctggacaatataaagtactaccttaagaaaacaagtataataccaaaaaaacactaaacaacaggggcacacttttcacttgtttgtggttatgctattcctaaattttctaattttcaatcaattgatgcacccagcttctatgcataccctgtgctgactactgacattgtgtgcgcttttagtgaagagatgtaggatttcttgatcactctctccccttggttttgcataccactctttgtgctgcaagattgtccatttgttaattttgaatgtattgtctgcacgaggaatcagccgtgattgaatcctactataacaagagaatagttggctgccctggtgccgaaggagaggatgaacacgatgtcgtctggttttggttggaaaaggataaaccgcatgagtgcctagtctgctcacggtactttgtgctcaaggtcattggtgatgggggtgatccagatggccacgatgacgaggatgatcatcactgaggccttgtgtcgataatgataataagaactttgtgaaacatggttttgtcctatctttgcagcatcagactgccctatagagtattgtaattgataagtgtttgaccatgaaccaggtcgggtggtgttttacacctacgaattttgttcagatcttttcgaccatacggttgcttctgtttggaatatagatttttttttctggagtgcaacatcaaataaaggatgagtgcatcggtttcactctattgaccatctatttttgggttatattttgttcctgattggatggatacttacg

SEQ ID NO: 215261 - DNA, 946 bp, Zea Mays
atggctggcatcgggcatctccactcccactccaccggccccacctccgcgaggggcgacccgagaacaccaccacgcccgccatgtggcgccgcctccaaaccctagccccctcgctccgccgcgccgccgcatcgtcgtccccggcctccgcccgcgccgtgcccttgtccacggtgccggtggccgcgttccggcgcacttcgaccctcctctcctctcccggcgacaagccggcgcccagcaaggtcgaggatgtcatgccgatcgccacggggctggagcgcgaggagctcgaggcggagctccaggggaagaagcggtttgacatggatcctgccgtcggccccttcggtactaaggttggtttctcgagaagcaatgattgcattttttgtgggacggagagagtagtttcttcctcaagctgagtcctgttaggactgtgaagttagccgtgattgaatcctactataacaagagaatagttggctgccctggtgccgaaggagaggatgaacacgatgtcgtctggttttggttggaaaaggataaaccgcatgagtgcctagtctgctcacgctcaaggtcattggtgatgggggtgatccagatggccacgatgacgaggatgatcatcactgaggccttgtgtcgataatgataataagaactttgtgaaacatggttttgtcctatctttgcagcatcagactgccctatagagtattgtaattgataagtgtttgaccatgaaccaggtcgggtggtgttttacacctacgaattttgttcagatcttttcgaccatacggttgcttctgtttggaatatagatttttttttctggagtgcaacatcaaataaaggatgagtgcatcggtttcactctattgaccatctatttttgggttatattttgttcctgattggatggatacttacg

SEQ ID NO: 215262 - DNA, 863 bp, Zea Mays
atggctggcatcgggcatctccactcccactccaccggccccacctccgcgaggggcgacccgagaacaccaccacgcccgccatgtggcgccgcctccaaaccctagccccctcgctccgccgcgccgccgcatcgtcgtccccggcctccgcccgcgccgtgcccttgtccacggtgccggtggccgcgttccggcgcacttcgaccctcctctcctctcccggcgacaagccggcgcccagcaaggtcgaggatgtcatgccgatcgccacggggctggagcgcgaggagctcgaggcggagctccaggggaagaagcggtttgacatggatcctgccgtcggccccttcggtactaagccgtgattgaatcctactataacaagagaatagttggctgccctggtgccgaaggagaggatgaacacgatgtcgtctggttttggttggaaaaggataaaccgcatgagtgcctagtctgctcacggtactttgtgctcaaggtcattggtgatgggggtgatccagatggccacgatgacgaggatgatcatcactgaggccttgtgtcgataatgataataagaactttgtgaaacatggttttgtcctatctttgcagcatcagactgccctatagagtattgtaattgataagtgtttgaccatgaaccaggtcgggtggtgttttacacctacgaattttgttcagatcttttcgaccatacggttgcttctgtttggaatatagatttttttttctggagtgcaacatcaaataaaggatgagtgcatcggtttcactctattgaccatctatttttgggttatattttgttcctgattggatggatacttacg

SEQ ID NO: 215263 - DNA, 712 bp, Zea Mays
acttcaccagttcacccactaggactaggagcaggagaggggagagaaaacctcgccgtcaatgtcagcgttcgttcccaagggcgctagggtttaaccccccaactgttcggtctctctctctccccgaatccaattcagcgtcatctagtccgggagcctgcgacatggggtacctccaggaggcccgggagaatcacgtcaagaagaaggtcgaggaagctttgcggagcaaaatgaaacaaaaggctcttcaggaatgtgatttctattgttcaaaatatgctgagtgtgcacggggaagaacattttctgtggtatggcaatgccgcaaacaagcaaaagagttgaatgagtgccttcatcaatacacaaatgatgcaatcctggaagaaatgaagaaggcttatatgattgagcaaaagagcaaggagataaatcaataagcaaaaatccaatgcgcaatgtgcatcacaatcaccctgcttgcagcagctgttgttggaaagagggaaaagaaaaagatctgcaacttctcagtcgcaatgaaactgagtttgtagctgtcaagtgaatacattagtgttttgtagctgtagcagtgtttaggcatgtaataaaaggaagaaatcttggtgtacaaacaaagcgtggcaaatcaaatgtgtacataaaaatggtatatatgatgatacttgttgtacaaacgaag

SEQ ID NO: 215264 - DNA, 565 bp, Zea Mays
ctaatccacgtgcaaaagcacttcaccagttcacccactaggactaggagcaggagaggggagagaaaacctcgccgtcaatgtcagcgttcgttcccaagggcgctagggtttaaccccccaactgttcggtctctctctctccccgaatccaattcagcgtcatctagtccgggagcctgcgacatggggtacctccaggaggcccgggagaatcacgtcaagaagaaggtcgaggaagtgagccgttaattgatgttgaatctcacaaagaacaaatggttggattaatggattactgttcatcatggacagaagctttgcggagcaaaatgaaacaaaaggctcttcaggaatgtgatttctattgttcaaaatatgctgagtgtgcacggggaagaacattttctgtggtatggcaatgccgcaaacaagcaaaagagttgaatgagtgccttcatcaataaataataggagatgtgtgtatcattgcattaaggagataaatatgtaaattagaagacatccaccatgttcaccccctcatccccacccacccagtcca

SEQ ID NO: 215265 - DNA, 521 bp, Zea Mays
ccgacggacgactcaacagcccaacttcagcaactaatccacgtgcaaaagcacttcaccagttcacccactaggactaggagcaggagaggggagagaaaacctcgccgtcaatgtcagcgttcgttcccaagggcgctagggtttaaccccccaactgttcggtctctctctctccccgaatccaattcagcgtcatctagtccgggagcctgcgacatggggtacctccaggaggcccgggagaatcacgtcaagaagaaggtcgaggaagctttgcggagcaaaatgaaacaaaaggctcttcaggaatgtgatttctattgttcaaaatatgctgagtgtgcacggggaagaacattttctgtggtatggcaatgccgcaaacaagcaaaagagttgaatgagtgccttcatcaataaataataggagatgtgtgtatcattgcattaaggagataaatatgtaaattagaagacatccaccatgttcaccccctcatccccacccacccagtcca

SEQ ID NO: 215266 - DNA, 878 bp, Zea Mays
gccacgttcacatcccattcaaaaaaacagatactaatctaattctccttcccagcatacccgactcctccccgatcgaagacaacatcatcctattcctacaaaacaaggcggtggtcggatcatttctgcaggaagcagtctcagttgtcgtcgtcgtcgacactggccttggaggaggcagccttcttggggagcagatgctgatggatgttaggcataacacctccgctcgcgatggtggcaccacccaacagtttggtcagctcctcgtcgttgcgcacagcaagctggatgtggcgcggcacaatgcgggtcttcttgttgtccctcgcggcgttcccggcaagttcgagaacctgccgcgaggtactcgaggacggcggcgaggtacacgggggcgccggcgccgacgcgctcagcgtacttgcccgccttgaggaacctagcaatcctgccgacggggaactggagtccggccttggagctcctcgacgttgccttcttcgcggcgccagcgccgatagccttgccacggcccgccatcccttctcacgaccggacgacgaggaggaggcagcttgcgcttgaaggattgattaaacagggagatagaggttgttcggtgcgagggcgaggatatataggggcgcgggcacgggcccgggcccgcgcagcgagccaataggagtcgatcacgcggatcgtgggttggggcgttcgggcggacggcggatgtgtggagtgggcccgggtcgcgggtccgcgatccggaaccggcgggaagcgctggaggtttcgtacatttgggcggttccgcgtcggcagacgcgcgcgcaaagcggaaatcggggcattggtcacgtgccacttggtgg

SEQ ID NO: 215267 - DNA, 1596 bp, Zea Mays
atggccgttttgggtaaaagccactctgagcccggaccgagggagggcgtccacacacaccatgcccccgcctccgtgactgtcgcgctccctgcccctacgcaggtccgtgaccgtcgcgctcccacccccaatgcgcacgctacccccacccacctcccattccgctgccaggatcatgcagctctgcgccgccacgcccgagcgtactggggcgctggcgccgccgcgttcccgcagacgcccgagcggagcccgaggttcacgggcgacgcccgactggggcactgcgttcatgatgtcgccgagcgctacggctgcgccgaggacgccggagaggtggcccgcgctgcccgcactctggagtacgcgcctgcgccgaggcgagagcaggcgaggtggggcggcgaatctgaggcagaagcgcctgcgctttatgaatccggagccgaatcgctccgtccagcttgcctcctcaccgttgcttttgcgctctgcttttcacttgccttgcgtggatctgctcaacgcacgaaccaccgcctcgccgagaaggagatcgtcatcgtcctctcctctgcctccgcggtccccgtcgagagcagtgttgctgtcttcgactagcacaaggaagcaatgttgaggcggctaagcgatgctacaatggaacaatccaataacagtgattcgtctattgacgagaggtccatccagcctcgaaagaatatgaaccccctacctcaataaaggcaaagaccacaactccaaaaatcacattttcactgtcctaaatggactgatggcagcattcctttggatgtactttctgataaactcacaaaaataagcaaggaagcttttgaacgaagagatttcatagcaactgttgtagctagcgccctgcaagaggcgttgatctctgtatctgtgatcaggaacatatataaattgatgttgcgattactaatccgatattaacaagattttttctaaaggcatcacaaacttgctatgttttgttctgaatgagtgaatatcatgtgcagctttaaagttaccatctatcttcatctcattttctttccaattataggtctgggatgcaactattgcagatccaaaattgcattatccttttgagctcaacctgtcatctatgatatgtattgtaactgatcatgtttttactacttcatgattcagatcgctgctagcaagaccaagatttacatggtgcttcagcttgtcaatgggggcgaactgttcgacgggattactcttggatatgtaattggtggcactaacatgagaagcgacaccaaccatctcacagaagggatcaatatcttaattgtcacactggacaggcttttggaccatctgcaaaataccggtagtttcaaatacaaagagctaaagagtaccaaaaaggtcatgcccgacgacaagctcgctgagttcgcgctcctcgaccccaagccaccaagaggtgagcagagtgtgaaaatcactaggatctatgatgagaagtttgctgatttgggatggggaagaggcgaaaatgagattgaggatgtgtttatcattgttttgtag

SEQ ID NO: 215268 - DNA, 1497 bp, Zea Mays
gacatttccctgctcccttatctccctcccccacacggtgcttgcccctgctccctcctttctgactgtaaggttgcaagcctcggtgccagcaatttcctcgttggtcgagcccctccctatcaccatcctcgtcatggcgccctggtggttgtccttgtcagtcgtgcctctcctgtgtgctcgactcgcctgtgccatgtctaactcctgtctcctctctagccctgatgtcgtcgctggtcctccccacgctagagaagaccaccgtcggtcctcatccatacatcgagttccctcctctcagtgctcgaacttcgcctccctctgatccccccccccccccccccccactcaccccttgcgctcatcgctgcaggatcatcatcgtgggcttggctttgccaagccatcatcgctcaccatctcgttgatgccctttctctgtcttcatattcgtcagcaccctagtcttctctctctacacaacaaataggttactggactcgccatgttctctggtcgagtttgaccctccttgctgacagatttgtcgtcattctaggagcaactcctgggatggttgggtggagaagaagaaaagaagctccagcgcatcgcacacctggtgctcgacgtaatggttgaatcgaaatcgtcgtcgtttccgtagtctgatttagttatggctgcatggacagacgcaaaataagttatgttagctgcatccacacgtacgtctaaaacggacgtacgcggttggccaggctcgcgcgagattgtacgtgtgggtacagtcatccaatcaggcgaacaattaatgatcttgtacacagtaaaactagagtacaacttcagttctggtctccggctcggcacttcccatccactagaagagaatgggaagaggtacatgtgcaagtggaagaggcgacttatatgggcctgtttggttttcggacggagacatcctggcttgtgtcttcgtgacctggctgatctagagcaggtttatgtgagccaggctccagagaaacgcaaataaatcctgtatcttatgagccaagctcacttatcagttttgcatcatctaagccaggtccagctataaatgcagtcatccaaacaagcataacttgtatcgctagagccaggctggagaaccaaacacgagaacgtataaagatgttgtacctccggagccgagttcggtctcatcagggtaaccaatcaggccctatatgtacgttgtgggctgaaaatttctgaaacggttgttgcgcatgatttgagtgggatataggtagatcatccttggatggagggagtatatacctatccagaataatggtcatgctgaatagagcaactataataaagtgtatatgcgggctctaagaaatgtaaaggcttctactgttctcttggctttaatccaaaacagcttctactgtagaagttgtttctacagtgttttgtctctatggattatagatg

SEQ ID NO: 215269 - DNA, 625 bp, Zea Mays
gacatttccctgctcccttatctccctcccccacacggtgcttgcccctgctccctcctttctgactgtaaggttgcaagcctcggtgccagcaatttcctcgttggtcgagcccctccctatcaccatcctcgtcatggcgccctggtggttgtccttgtcagtcgtgcctctcctgtgtgctcgactcgcctgtgccatgtctaactcctgtctcctctctagccctgatgtcgtcgctggtcctccccacgctagagaagaccaccgatcatcatcgtgggcttggctttgccaagccatcatcgctcaccatctcgttgatgccctttctctgtcttcatattcgtcagcaccctagtcttctctctctacacaacaaataggttactggactcgccatgttctctggtcgagtttgaccctccttgctgacagatttgtcgtcattctaggagcaactcctgggatggttgggtggagaagaagaaaagaagctccagcgcatcgcacacctggtgctcgacgtaatggttgaatcgaaatcgtcgtcgtttccgtagtctgatttagttatggtacactagttgatcacgtgatgtggaggacaagaaccgaattgatc

SEQ ID NO: 215270 - DNA, 1050 bp, Zea Mays
gacatttccctgctcccttatctccctcccccacacggtgcttgcccctgctccctcctttctgactgtaaggttgcaagcctcggtgccagcaatttcctcgttggtcgagcccctccctatcaccatcctcgtcatggcgccctggtggttgtccttgtcagtcgtgcctctcctgtgtgctcgactcgcctgtgccatgtctaactcctgtctcctctctagccctgatgtcgtcgctggtcctccccacgctagagaagaccaccgtcggtcctcatccatacatcgagttccctcctctcagtgctcgaacttcgcctccctctgatccccccccccccccccccccactcaccccttgcgctcatcgctgcaggatcatcatcgtgggcttggctttgccaagccatcatcgctcaccatctcgttgatgccctttctctgtcttcatattcgtcagcaccctagtcttctctctctacacaacaaataggttactggactcgccatgttctctggtcgagtttgaccctccttgctgacagatttgtcgtcattctgtatgtcgtcgaggagcaactcctgggatggttgggtggagaagaagaaaagaagctccagcgcatcgcacacctggtgctcgacgtaatggttgaatcgaaatcgtcgtcgtttccgtagtctgatttagttatgattgtaagcagaaggtggcattatggatttgtggatctctaggccttctcataccattgcttgggtttttgtttggggagtgggttattcaagtagatgtgatcatgatacttgttacttggaattagctttacctatgttcttatgcgtatgtaagtaaacatttgatgaaatgccttgttgtttgagtacggtgtattgctttattgatacttgctctaggtcttgttggattaaatggttaattgcattgctttcatccttatcctaaattttttatatccaaagttagtaagtcaaagtattatacaagttagcctacagaaatattttagaaagttagtaaatgag

SEQ ID NO: 215271 - DNA, 1171 bp, Zea Mays
gacatttccctgctcccttatctccctcccccacacggtgcttgcccctgctccctcctttctgactgtaaggttgcaagcctcggtgccagcaatttcctcgttggtcgagcccctccctatcaccatcctcgtcatggcgccctgccctgatgtcgtcgctggtcctccccacgctagagaagaccaccgtcggtcctcatccatacatcgagttccctcctctcagtgctcgaacttcgcctccctctgatccccccccccccccccccccactcaccccttgcgctcatcgctgcaggatcatcatcgtgggcttggctttgccaagccatcatcgctcaccatctcgttgatgccctttctctgtcttcatattcgtcagcaccctagtcttctctctctacacaacaaataggttactggactcgccatgttctctggtcgagtttgaccctccttgctgacagatttgtcgtcattctgtatgtcgtcgaggagcaactcctgggatggttgggtggagaagaagaaaagaagctccagcgcatcgcacacctggtgctcgacgtaatggttgaatcgaaatcgtcgtcgtttccgtagtctgatttagttatggtgagctcctttgctatcctcgttagttagcatgaatggttgattggatagatgttctacctatgatgtttattttatttgtaaagcaggtgtgttgcggtattgatttctagactccttgctattgtctagatgatgtttcatagtgtcatgcaaggaacgacctttcctatcatttccttgtttttgtgatgatatgttgaatgtaatgagtttgggtagactaatagttatggttgagaagcctcatttcttgcattgatgtgatcgtgttaataaatatggagtagtcgcaacatgtaaaacttaggtttaaaatgactgttttttgaggagtatttaagtgaatatatcaatgaagcaagagtgaatagaccttatgtttgtataatataattcattagcaatatagtttaagctatttgtattgtcttcttagcccacttatgtttagcatgtaggcactttaggtcttttgcttctaaaagtgtagtcggtagagttatgcaatatttggtaatactctagttactaaatcaaagaatgtgac

SEQ ID NO: 215272 - DNA, 1085 bp, Zea Mays
gacatttccctgctcccttatctccctcccccacacggtgcttgcccctgctccctcctttctgactgtaaggttgcaagcctcggtgccagcaatttcctcgttggtcgagcccctccctatcaccatcctcgtcatggcgccctggtgccctgatgtcgtcgctggtcctccccacgctagagaagaccaccgtcggtcctcatccatacatcgagttccctcctctcagtgctcgaacttcgcctccctctgatccccccccccccccccccccactcaccccttgcgctcatcgctgcaggatcatcatcgtgggcttggctttgccaagccatcatcgctcaccatctcgttgatgccctttctctgtcttcatattcgtcagcaccctagtcttctctctctacacaacaaataggttactggactcgccatgttctctggtcgagtttgaccctccttgctgacagatttgtcgtcattctgtatgtcgtcgaggagcaactcctgggatggttgggtggagaagaagaaaagaagctccagcgcatcgcacacctggtgctcgacgtaatggttgaatcgaaatcgtcgtcgtttccgtagtctgatttagttatggtgtgttgcggtattgatttctagactccttgctattgtctagatgatgtttcatagtgtcatgcaaggaacgacctttcctatcatttccttgtttttgtgatgatatgttgaatgtaatgagtttgggtagactaatagttatggttgagaagcctcatttcttgcattgatgtgatcgtgttaataaatatggagtagtcgcaacatgtaaaacttaggtttaaaatgactgttttttgaggagtatttaagtgaatatatcaatgaagcaagagtgaatagaccttatgtttgtataatataattcattagcaatatagtttaagctatttgtattgtcttcttagcccacttatgtttagcatgtaggcactttaggtcttttgcttctaaaagtgtagtcggtagagttatgcaatatttggtaatactctagttactaaatcaaagaatgtgac

SEQ ID NO: 215273 - DNA, 3228 bp, Zea Mays
gtcgttttcaaggacatcgacgtggcgcacaagcaaccgcgagcattgaacgctgggggtggcgttcccctttcggccgcgtatcgtaccgagccacaacttccgcgcagggaggccatccgcggggttggatccatagcaagaaaagcagacgtggagtacagcaatggctagcgaggagcggatcctagtatcggtgcggctacggccggtgaatgcgcgagaggcggagcgcggcgacggctccgactgggagtgcgccggtccgaccacgctcatgttccacggcaacatcccagagcgtgcaatgttccccgcctcatacacctacgacagggtgttcaaccctgagtgtagcacacgccaggtgtacgaggaaggggccaagcaggtggccctatcggtgctcagcggcatcaactcaagcatatttgcgtacggccagacgagcagcgggaagacgtacacgatggtcggcatcacggagcgtagcatggcagacatctacgactacattgacaagcatcctgagagggagttcgtgctaaaattttcggcgatggagatatacaatgaagccgtgagggatctcttgagacctgacgcaacacaactaaggcttcttgatgatccagagaaaggaactgtagtagagaaactcaccgaggaaacccttagggacaaaggccatctcttggagctccttgcagtgtgtgaagctcaaagacagattggggaaactgccatgaacgaaacaagctccagatcgcatcagatactccgactgacgatcgagagttcagcaaagcaattcatgggacgaggcaaatcgagcacccttctagcttgtgtgaatttcgttgatttagcaggaagtgagcgcgcctctcaaacacaatcagctggtgtgaggctgaaggaaggtagccacattaacagaagccttcttacattgggaaaagtcattcgccaactcagcaagggaagaaatgggcatatcccttacagagattcaaagctcactcgcatattgcagtcatctttgggcggcaatgcgagaactgctattatctgcacgatgagcccagcacatagtcatatcgagcaatccaggaacacacttttgtttgcaaactgtgctaaaaatgtagttactgatgcaaaggtcaatgtagtgatgtcagacaaggtgttattgaaacatcttcaaagagaaattgcaaggctagagaatgagctaaagtttcctagaccaacctcttgcagcaactatgctgaggctttaagagaaaaagatgagctgatcaaacagctagaaggacagttgaaggaattaatggagcagaaagacaccgttcagtctcaacttgacaattttcgtagagttacaagtgatggaaatttcaatgatcatgcaacaaggcaatgggatcaatcgaacaggtcttcagagtcccttccatgtagtgcgtctgaagacacactttcttttgatacttacagtgatgtttatgaagaacaagatgatctaggctccaaaggatttgatgtgtcacatgtctataatgattatcatcatgatgtgtatcaccaaaaagtagacgaacacccaatgtctagtttgcatcaaccaagaaaccatatttctaatagaacacagatgtaccaaccaaatagggagacttcaccagaggtccctaaggagcattgcaaggaagtccagtgcatcaaaataaatgagtttaggaggagtcggtctgacgaagaaaaacatggtgaaaacataacatacacatcagagggtgccatcaaactgtacacatgtgattctgagccatcttctgatactgaaaaaacaaataatgacgaatctttagtcctgaagaggtgtgtgataagctccagagacagtgtactaactagaagcagaagttgcagagctagcttcatggtcattccgaatagttggtttgatgattcagcggatatgagaatgacaccaccaggtgacattttaaaatatcctcacagaaggctagagaaggttaggaggagcatgtactctgaaaatggtcattgtcaaaatgatcttacattagactgccctgtggtctctggaaaagttgcatctgacatggttatagacaaaaacacttgcaatgaagaagatggatatgccaacaataaattcagctgcatcacaaaggttaaagagaagcaagaagactattgtacatcccaactagagggcaatcaggacaacgttactgcagaaatcttggacatgaaacatgcaaaaaatattgacaaagatatatttgtggccaatattgactccccttcacggtggcctattaattttgagaaaaaacagaaagaaatcattgagttatggcatgaatgcaatgtctctatagtacacagaacatatttcttcctcctcttcaaaggagtcaaagcagacaatatttatttggaagtggagcacagaagattgtccttcattcacagttctttcattgccggatgtgagcctaatgttactgttacatcaagcttgagaaatcttcggcatgaaagagacatgctctacaagcaaatgctgaggagactccatcttctagaaagagagagcctttatagcaaatggggaattgatctgaattctaaacaacgaaggctgcaactatctcgccgcatctggacacagactgacatggaacatgtgagggaaagtgccgctcttgtcataaaattggtagaacatctggagaaggggcaagccatcaaggaaatgtttgggttaagcttcacattgaaccaacgagctatccaaagacctttcagctgggttagtgctaactcctaaagcaagcatcgagacaaattatgattatgatggttgatagttgcatgggacaacaaacaatgccatgatgaaatacatagtagaggagacctcttgtcagtcacccatacgagcattgattttcactgatgcccctgtatatttcgtatcacttattatgtagatgtacatgtgatggattttgcattgtggaactgttaaaatgaaccgacatgagatgccaaatctttgcaccaaacagtatgatgtattgctgatctgatttttttgcatcaaatgtatatctaatataccatattttttgcttaagtaaatcagatgctatgaatgccaactaattgattttctgttgttgagag

SEQ ID NO: 215274 - DNA, 3320 bp, Zea Mays
gttttccatccaattcaagggaggcaggaaccaccaaccaccttctcctgtcccgctccgtccggttccattcctctcctcctcctctcttctcttccctcgaacgaaggggaggaggaggaagcgcctcgccggcattgccctctagctcctgtcataccacaaacctcgattgtcatcttgtcaaaccacgaaccaccaccgtcttcttgccggaggttggatccatagcaagaaaagcagacgtggagtacagcaatggctagcgaggagcggatcctagtatcggtgcggctacggccggtgaatgcgcgagaggcggagcgcggcgacggctccgactgggagtgcgccggtccgaccacgctcatgttccacggcaacatcccagagcgtgcaatgttccccgcctcatacacctacgacagggtgttcaaccctgagtgtagcacacgccaggtgtacgaggaaggggccaagcaggtggccctatcggtgctcagcggcatcaactcaagcatatttgcgtacggccagacgagcagcgggaagacgtacacgatggtcggcatcacggagcgtagcatggcagacatctacgactacattgacaagcatcctgagagggagttcgtgctaaaattttcggcgatggagatatacaatgaagccgtgagggatctcttgagacctgacgcaacacaactaaggcttcttgatgatccagagaaaggaactgtagtagagaaactcaccgaggaaacccttagggacaaaggccatctcttggagctccttgcagtgtgtgaagctcaaagacagattggggaaactgccatgaacgaaacaagctccagatcgcatcagatactccgactgacgatcgagagttcagcaaagcaattcatgggacgaggcaaatcgagcacccttctagcttgtgtgaatttcgttgatttagcaggaagtgagcgcgcctctcaaacacaatcagctggtgtgaggctgaaggaaggtagccacattaacagaagccttcttacattgggaaaagtcattcgccaactcagcaagggaagaaatgggcatatcccttacagagattcaaagctcactcgcatattgcagtcatctttgggcggcaatgcgagaactgctattatctgcacgatgagcccagcacatagtcatatcgagcaatccaggaacacacttttgtttgcaaactgtgctaaaaatgtagttactgatgcaaaggtcaatgtagtgatgtcagacaaggtgttattgaaacatcttcaaagagaaattgcaaggctagagaatgagctaaagtttcctagaccaacctcttgcagcaactatgctgaggctttaagagaaaaagatgagctgatcaaacagctagaaggacagttgaaggaattaatggagcagaaagacaccgttcagtctcaacttgacaattttcgtagagttacaagtgatggaaatttcaatgatcatgcaacaaggcaatgggatcaatcgaacaggtcttcagagtcccttccatgtagtgcgtctgaagacacactttcttttgatacttacagtgatgtttatgaagaacaagatgatctaggctccaaaggatttgatgtgtcacatgtctataatgattatcatcatgatgtgtatcaccaaaaagtagacgaacacccaatgtctagtttgcatcaaccaagaaaccatatttctaatagaacacagatgtaccaaccaaatagggagacttcaccagaggtccctaaggagcattgcaaggaagtccagtgcatcaaaataaatgagtttaggaggagtcggtctgacgaagaaaaacatggtgaaaacataacatacacatcagagggtgccatcaaactgtacacatgtgattctgagccatcttctgatactgaaaaaacaaataatgacgaatctttagtcctgaagaggtgtgtgataagctccagagacagtgtactaactagaagcagaagttgcagagctagcttcatggtcattccgaatagttggtttgatgattcagcggatatgagaatgacaccaccaggtgacattttaaaatatcctcacagaaggctagagaaggttaggaggagcatgtactctgaaaatggtcattgtcaaaatgatcttacattagactgccctgtggtctctggaaaagttgcatctgacatggttatagacaaaaacacttgcaatgaagaagatggatatgccaacaataaattcagctgcatcacaaaggttaaagagaagcaagaagactattgtacatcccaactagagggcaatcaggacaacgttactgcagaaatcttggacatgaaacatgcaaaaaatattgacaaagatatatttgtggccaatattgactccccttcacggtggcctattaattttgagaaaaaacagaaagaaatcattgagttatggcatgaatgcaatgtctctatagtacacagaacatatttcttcctcctcttcaaaggagtcaaagcagacaatatttatttggaagtggagcacagaagattgtccttcattcacagttctttcattgccggatgtgagcctaatgttactgttacatcaagcttgagaaatcttcggcatgaaagagacatgctctacaagcaaatgctgaggagactccatcttctagaaagagagagcctttatagcaaatggggaattgatctgaattctaaacaacgaaggctgcaactatctcgccgcatctggacacagactgacatggaacatgtgagggaaagtgccgctcttgtcataaaattggtagaacatctggagaaggggcaagccatcaaggaaatgtttgggttaagcttcacattgaaccaacgagctatccaaagacctttcagctgggttagtgctaactcctaaagcaagcatcgagacaaattatgattatgatggttgatagttgcatgggacaacaaacaatgccatgatgaaatacatagtagaggagacctcttgtcagtcacccatacgagcattgattttcactgatgcccctgtatatttcgtatcacttattatgtagatgtacatgtgatggattttgcattgtggaactgttaaaatgaaccgacatgagatgccaaatctttgcaccaaacagtatgatgtattgctgatctgatttttttgcatcaaatgtatatctaatataccatattttttgcttaagtaaatcagatgctatgaatgccaactaattgattttctgttgttgagag

SEQ ID NO: 215275 - DNA, 1885 bp, Zea Mays
acaatcctgtggagatttacgattcccctaccaagcatagcaagaactagaagacatcgtaatccaagaaccggggccactccaagcatagcaagaactaaaagacatctatatatattgtgtgcatatgcgcttcacgagcaaagtgtccgaagaataacaggaaattaaagcgatatcgtaatccaagaaccggggccatgcccggtcgtaatttcgcaacgacggcggtggccatagcggtcgtcgtcgtagccgcgctagcgtcggcgtcggcgggcgcggacgacgacgagcaagggcacctgcgccgggaagccgaccgcatcgtccggctgcccgggcagcccgacgacggcgtggacttcccgatgtactcagggtacgtgaccgtggacgagggcgcggggcgggcgctgttctactggctgcaggaggcggccgcggaggcgcagccggcgccgctggtgctgtggctgaacggcgggcccgggtgctcgtcggtggcgtacggcgcgtccgaggagctgggcgcgttccgcatccggcccgacggcgccacgctcttcctcaacgcgtaccgctggaacagagcggcgaacatcctgttcttggactcgcccgccggcgtcgggttctcctacaccaacaccacctccgacctctacgactccggcgacaggagaacagctcatgattcgtacaagtttctggcgaggtggttcgagaggttcccgcagtacaagtaccgcgacttctacatcgccggggagagctacgcagggcactacgttccccagctgtcccagatcgtgtaccgcaagaacaagggcgtggagaaaccgatcatgaacttgaaaggcttcatggtcgggaacgcggtgacggacgactaccacgaccaagtgggcacgttcgagtcgtggtggaaccacgggctcatctccgacgccacgtaccggctgctggacgccagctgcgtgcacgacagcggcgagcacccgtcgccgcggtgcaacgccgcctacgacaaggcgacggcggagcagggcgacatcgacccctacagcatctacacgcccacatgcaaccagacgtcgacgtcgtcgtcgtcgtctacgccgaggaggatgaggctcaagggccgctacccatggatgagggggtcttcttatgacccgtgcaccgaaaggcactccaccgtgtactacaaccgcccggaggtgcagcgggctctccacgccaacgtcaccgccggcgccggcggcgccatgaactacacgtgggcgacctgcagtgacaccatcaacaacaactggggagattcacccaagtccgtgctccacatctacaaggaactcattgcagccggactcagaatatgggtcttcagtggagatacggacgcggtagtccccttgacagcgacaaggtactccatcgacgccttgaaccttccaaccgtcgtcagctggtacccttggtacgacgccaaggagcagaagcagcagcaggaggttggtggatggagccaggtgtacgaggggctgaccctggtgacggtccgaggggcggggcacgaggttcctctccaccgcccgaggcaggcgctcatcctgtttcgccacttcttgcgtgggaaacctatgccgcctaagaacggaactgttgtgtagtagtatttgttttctcggcataattaatgatgcaaaaataatttatcgcgcgccttcagtctaaggccatgtttggattcggtactactaaagtttagttggactaaactttagtgactaaattttagtcactaaaatctaccgtttggttccggtgactaaaactttacacacaactattattactggacataaagactgaattgccc

SEQ ID NO: 215276 - DNA, 2513 bp, Zea Mays
atggggggaaactggtctgggaaggagagtggtggccgtgcctgccctccccccgcccggccagcggcaaacccaaaatttgaacccgccgcttcgactgactactaccccaccatccaaaaccccactccggcctccgccgtcatttcctctccccgccaatccgccaccatttccagttccgaccgacctcgaaaccctagcccccagaccatcccactcgcaaccgccatgccggacctcccctgcgacggcgatggcgtctgtatggtctgccgcgtcgcatccccgccggaggtcgacctcctcacctgctccacctgcaccacgccctggcactctccgtgcctctccaagccccccgccctcgccgacgccgccagctggagctgccccgactgctcccccgactccgctgccgtcgccgctccctcgggccccgccaacaccctggtcgccgccatccgcgccatcgaggctgaccacacactctccgaccaggagaaggcgcgccgccgccaggccctcctcaccggcgacgcccccgacggcgcggacgacgatgacgacgaagcgtccgacgatgcccttgagatcgtcggcaagaacttcagctgcgttttctgcatgaagctccctgaacgacccgtcacgacaccctgtggccataacttctgcttgaaatgcttccagaagtggattcaaaatcagaagaggacgtgtgggaaatgtcgggcgcagatcccggccaaaatggctgagcagccaagaatcaactccgcactagtcgaagttatcaggatggctaagatttcaaagaatcctaactctgctggctcagcagttccatatcactatctacgaaatgatgataggcctgataaggcctttacaactgacagggctaagagggctggaaaagcaaacgcatcaagtggccagatctttgtgactattgcacctgatcattttggccccattcttgcagaaaatgacccccgcaggaatatgggtgttcgagtcggggaaacatgggaagaccgacttgagtgcaggcaatggggtgctcactttcctcatgtggctggcattgctggccagtctacgcatggtgctcaatcagtagccctctcaggagggtatgaagatgatgaagaccatggagagtggtttctttacaccggaagcggtgggagggatctaagtggtaacaagcggacaaacaaggaacagtcatctgatcagaaatttgagaagctgaatgctgctttacgcattagttgcttaaagggctaccctgttagggttgtacggtcgcacaaagagaagcggtcctcatatgctcctgaatctggtgtgaggtacgacggggtttacaggattgagaagtgctggaggaagattggtattcagggtaagttcaaggtctgcaggtatctctttgtacgctgtgacaatgaaccagctccttggaccagtgacgatcacggtgaccgtccaagaccattgccaaagataaaggagctgcaaggtgcaactgatataacagagaggaaagggcgcccttcatgggattatgattcagcaggaagcctgttctatctggggatcctgagaccgacaagcaaatccgtagagcaacaaagcgtgttcatttgtctgttgctgaaaggctgcttaaagaatttgcttgttcgatatgccgggcggtgattaaagaaccacttacgactccatgtgcccacaacttttgcaagacttgtttgcttggggcatatgatagccagtcttctataagggaaagaagccgtggtggtcggactctaagggcacagaagattgtgaagacgtgcccttcttgcccaactgacatctgtgattttttagagaatccccagatcaaccgagaaatgatggagctgattgagactttgcaacgcaaggctgttgaagaagccaagatgacttcagatgatgctgaggaatgtggtgatggtgattcggaggaaaatgatggtgatttggtgaagggagaggatgttagtggtttgaatgagggagagcaagacagtgcagacgctgatgctaatgttgaaggttctgtgaagattgtggttgaaatcaaggaggaaggaaaagatgataaaaggtcaaagatgggcgcgactgaagtggtggatgtgttagttgatgaagatgctgtgaagcagacgaaaaagcgcaaggttgatgctgaggctggcaccaacggtggcaagaggatgaagagcagtagtaccgtggaagaggttgctgtgtgcgtcactcctgtgaaacggagcaggaagagtggtgatatggatgatgagcgcaacggcagtcctgctgtgagcagcggccgctggtgactcgcacagtgtggatgacactggatctgctgatattccggcgaggaggactagaagcccgtgtcagagctgatgctggtcgctgaaggggtagaaggaaacggggaagcggaaaaccagccgagc

SEQ ID NO: 215277 - DNA, 1365 bp, Zea Mays
cgacgcggagcggaagccccagtggccagtgcccaccaccttcacgcctcctcgcgtcgtcgcaaccgcagatctggccaacggcccccgaccgatcgacccccctccccctcggcgcggcgaggcgcagcaattcaagtgtatcaccgttgttacttccataacgtgctaacagtcaaatttgtcaagctactgttgatgctccagatatagtagaaaaccatgggagaagttagtgatgataattccaacatgtcctttctaaaaagaatcgctacaagtgacgtgccactgttgaaagagtatggtgtgaatggagttgttgtcgccctgcttctggctgtagttactcctgtcctgctttccatgatgtttggcaagaagacaaagcaaagggcggtgcgagctgatgtgggtggagaggagggatttgcaatgcggaacaacaggttttcctccttagttgaagtcccatgggagggcgccacgacaatgtcagctctgttcgagatggccagcaaaaagtactctcgacagaggtgtcttggcacgaggaagctaattaagagggaatttatggaatcttctgatggtaggaagtttgagaaactgcaccttggtgaatatgaatgggatacctacactgaggcatttaatcgtgcatgtaatttttcttctggacttatcaagatgggccacgacctagatagtcatgctgctatcttctctgatacaagagctgagtggatcattgctgctcagggatgcttccgacaaaatttaacggttgtaacaatatatgcatctcttggtgaggatgcattggtgcattcactaaatgagacaggtttcaactctgatatgtgattcgaagcaacttaagaagatacctgcaatcagctataaattgcagagtcttaggcgtattatctatattgaggatgaacctgtcgaggctgagacactgaaccaagtgaagcatttgacaacattgtctttcactgaagtagaggagcttggcaagacatctcatgttgatgcaaggttaccttcaggctctgatactgcagttatcatgtatacaagcggaagtactggtcttcccaagggtgtaatgatcacacatggcaacatggtggccacaactgcagcagtcatgacaatagtcccaaaccttggcatgaatgatgtttatctggcttatcttccattggctcatgtctttgaactagcaggggagactgtcatgttagcttctggcagtgccattggatatggttcagcattaactatgactgatacatcgaacaagattaaaaagggaacaaaaggagatgtttctgtactgaatcctactcttatgat

SEQ ID NO: 215278 - DNA, 2818 bp, Zea Mays
cgacgcggagcggaagccccagtggccagtgcccaccaccttcacgcctcctcgcgtcgtcgcaaccgcagatctggccaacggcccccgaccgatcgacccccctccccctcggcgcggcgaggcgcagcaattcaagtgtatcaccgttgttacttccataacgtgctaacagtcaaatttgtcaagctactgttgatgctccagatatagtagaaaaccatgggagaagttagtgatgataattccaacatgtcctttctaaaaagaatcgctacaagtgacgtgccactgttgaaagagtatggtgtgaatggagttgttgtcgccctgcttctggctgtagttactcctgtcctgctttccatgatgtttggcaagaagacaaagcaaagggcggtgcgagctgatgtgggtggagaggagggatttgcaatgcggaacaacaggttttcctccttagttgaagtcccatgggagggcgccacgacaatgtcagctctgttcgagatggccagcaaaaagtactctcgacagaggtgtcttggcacgaggaagctaattaagagggaatttatggaatcttctgatggtaggaagtttgagaaactgcaccttggtgaatatgaatgggatacctacactgaggcatttaatcgtgcatgtaatttttcttctggacttatcaagatgggccacgacctagatagtcatgctgctatcttctctgatacaagagctgagtggatcattgctgctcagggatgcttccgacaaaatttaacggttgtaacaatatatgcatctcttggtgaggatgcattggtgcattcactaaatgagacacaggtttcaactctgatatgtgattcgaagcaacttaagaagatacctgcaatcagctataaattgcagagtcttaggcgtattatctatattgaggatgaacctgtcgaggctgagacactgaaccaagtgaagcatttgacaacattgtctttcactgaagtagaggagcttggcaagacatctcatgttgatgcaaggttaccttcaggctctgatactgcagttatcatgtatacaagcggaagtactggtcttcccaagggtgtaatgatcacacatggcaacatggtggccacaactgcagcagtcatgacaatagtcccaaaccttggcatgaatgatgtttatctggcttatcttccattggctcatgtctttgaactagcaggggagactgtcatgttagcttctggcagtgccattggatatggttcagcattaactatgactgatacatcgaacaagattaaaaagggaacaaaaggagatgtttctgtactgaatcctactcttatgatttcagttcctgcaattttggatcgtatcaaagatgcagtatttaagaaagttggtgagaagggtggcctgacaaaaaagctgtcttgattttttcatataagcgaaatattgcagcaattgaagggagttggtttggatcttgggcaccagagaggatgttatgggatcacattatttataaaccaatacgggcaatgcttggaggacgtctaagatttgttctttgtggtggtgcacctctgtcaagtgacacacaaagatttatgaatatatgtctaggtgtcccagtgggtcaaggctatggattgactgaaacttgtgctggagcagctttcactgaatgggatgatacaagtgtgggtcgtgttggtccaccacttccttgttgctatgtgaagcttgtctcatgggaagaaggtggttacaagatttctgattctccaatgccgagaggagaggtcgcggttggtggacacagtataacaaaaggttatttcaacaatgaagcaaagacgaacgaagtatacaaggttgatgagaggggcatacgctggttctacactggtgatattggtcagttccatcctgatgggtgccttgagattattgacaggaaaaaagatatagtaaagcttcagcatggagaatatgtgtctcttggcaaggttgaatcggctctagcaacaagcaactatgtggagaacatcatggtttatgccgatccatttcataactactgtgttgccctggttgttccagcgcaccaggccttggagaagtgggctcagaattccgggatgaactatgaaggctttggagagctttgccaaaacgaccgagcaattaaggaggttcagcaatcgctatcaaaggccgcaaaagcagcgaggctcgagaaattcgaggtgccagcgaagatcgtgctgttgcctgaaccgtggacgccggagtccgggctggtgaccgcagcgcttaaactgaagagggagcaaataaaggccaaattcaaaggcgatctggacaagctctaccactgaagaagcgacagaggacggtttaatttgcacctactgcttccagacgcttgcggtgccaaaagctgcctggatggaacttttactgacctgcacgagtggtgtgtgtgtgtgtatcccagctgctgatacacaggagcttcgttcttctgtgactgtgactgagggaaaataaacccagtgttggaatgatcttgatttgtaatagcttcacgtcatgggattttaattttgtcatagcacagaggatgctcaatttcacgtccgttacgggtcagttatgacactaagcatattgtaaatgatgtttttttatatagacacaataaataggccctgggcacatcacctaatggtactctatatcgccatctattgatttgtaatgggaagacggacgaggttggttagttttg

SEQ ID NO: 215279 - DNA, 2582 bp, Zea Mays
ggctcgtcctgttgcgcggcttcttctgctttgtcaaatttgtcaagctactgttgatgctccagatatagtagaaaaccatgggagaagttagtgatgataattccaacatgtcctttctaaaaagaatcgctacaagtgacgtgccactgttgaaagagtatggtgtgaatggagttgttgtcgccctgcttctggctgtagttactcctgtcctgctttccatgatgtttggcaagaagacaaagcaaagggcggtgcgagctgatgtgggtggagaggagggatttgcaatgcggaacaacaggttttcctccttagttgaagtcccatgggagggcgccacgacaatgtcagctctgttcgagatggccagcaaaaagtactctcgacagaggtgtcttggcacgaggaagctaattaagagggaatttatggaatcttctgatggtaggaagtttgagaaactgcaccttggtgaatatgaatgggatacctacactgaggcatttaatcgtgcatgtaatttttcttctggacttatcaagatgggccacgacctagatagtcatgctgctatcttctctgatacaagagctgagtggatcattgctgctcagggatgcttccgacaaaatttaacggttgtaacaatatatgcatctcttggtgaggatgcattggtgcattcactaaatgagacacaggtttcaactctgatatgtgattcgaagcaacttaagaagatacctgcaatcagctataaattgcagagtcttaggcgtattatctatattgaggatgaacctgtcgaggctgagacactgaaccaagtgaagcatttgacaacattgtctttcactgaagtagaggagcttggcaagacatctcatgttgatgcaaggttaccttcaggctctgatactgcagttatcatgtatacaagcggaagtactggtcttcccaagggtgtaatgatcacacatggcaacatggtggccacaactgcagcagtcatgacaatagtcccaaaccttggcatgaatgatgtttatctggcttatcttccattggctcatgtctttgaactagcaggggagactgtcatgttagcttctggcagtgccattggatatggttcagcattaactatgactgatacatcgaacaagattaaaaagggaacaaaaggagatgtttctgtactgaatcctactcttatgatttcagttcctgcaattttggatcgtatcaaagatgcagtatttaagaaagttggtgagaagggtggcctgacaaaaaagctgtcttgattttttcatataagcgaaatattgcagcaattgaagggagttggtttggatcttgggcaccagagaggatgttatgggatcacattatttataaaccaatacgggcaatgcttggaggacgtctaagatttgttctttgtggtggtgcacctctgtcaagtgacacacaaagatttatgaatatatgtctaggtgtcccagtgggtcaaggctatggattgactgaaacttgtgctggagcagctttcactgaatgggatgatacaagtgtgggtcgtgttggtccaccacttccttgttgctatgtgaagcttgtctcatgggaagaaggtggttacaagatttctgattctccaatgccgagaggagaggtcgcggttggtggacacagtataacaaaaggttatttcaacaatgaagcaaagacgaacgaagtatacaaggttgatgagaggggcatacgctggttctacactggtgatattggtcagttccatcctgatgggtgccttgagattattgacaggaaaaaagatatagtaaagcttcagcatggagaatatgtgtctcttggcaagcgcaccaggccttggagaagtgggctcagaattccgggatgaactatgaaggctttggagagctttgccaaaacgaccgagcaattaaggaggttcagcaatcgctatcaaaggccgcaaaagcagcgaggctcgagaaattcgaggtgccagcgaagatcgtgctgttgcctgaaccgtggacgccggagtccgggctggtgaccgcagcgcttaaactgaagagggagcaaataaaggccaaattcaaaggcgatctggacaagctctaccactgaagaagcgacagaggacggtttaatttgcacctactgcttccagacgcttgcggtgccaaaagctgcctggatggaacttttactgacctgcacgagtggtgtgtgtgtgtgtatcccagctgctgatacacaggagcttcgttcttctgtgactgtgactgagggaaaataaacccagtgttggaatgatcttgatttgtaatagcttcacgtcatgggattttaattttgtcatagcacagaggatgctcaatttcacgtccgttacgggtcagttatgacactaagcatattgtaaatgatgtttttttatatagacacaataaataggccctgggcacatcacctaatggtactctatatcgccatctattgatttgtaatgggaagacggacgaggttggttagttttg

SEQ ID NO: 215280 - DNA, 2604 bp, Zea Mays
ctcgtcctgttgcgcggcttcttctgctttgcaattcaagtgtatcaccgttgttacttccataacgtgctaacagtcaaatttgtcaagctactgttgatgctccagatatagtagaaaaccatgggagaattactcctgtcctgctttccatgatgtttggcaagaagacaaagcaaagggcggtgcgagctgatgtgggtggagaggagggatttgcaatgcggaacaacaggttttcctccttagttgaagtcccatgggagggcgccacgacaatgtcagctctgttcgagatggccagcaaaaagtactctcgacagaggtgtcttggcacgaggaagctaattaagagggaatttatggaatcttctgatggtaggaagtttgagaaactgcaccttggtgaatatgaatgggatacctacactgaggcatttaatcgtgcatgtaatttttcttctggacttatcaagatgggccacgacctagatagtcatgctgctatcttctctgatacaagagctgagtggatcattgctgctcagggatgcttccgacaaaatttaacggttgtaacaatatatgcatctcttggtgaggatgcattggtgcattcactaaatgagacacaggtttcaactctgatatgtgattcgaagcaacttaagaagatacctgcaatcagctataaattgcagagtcttaggcgtattatctatattgaggatgaacctgtcgaggctgagacactgaaccaagtgaagcatttgacaacattgtctttcactgaagtagaggagcttggcaagacatctcatgttgatgcaaggttaccttcaggctctgatactgcagttatcatgtatacaagcggaagtactggtcttcccaagggtgtaatgatcacacatggcaacatggtggccacaactgcagcagtcatgacaatagtcccaaaccttggcatgaatgatgtttatctggcttatcttccattggctcatgtctttgaactagcaggggagactgtcatgttagcttctggcagtgccattggatatggttcagcattaactatgactgatacatcgaacaagattaaaaagggaacaaaaggagatgtttctgtactgaatcctactcttatgatttcagttcctgcaattttggatcgtatcaaagatgcagtatttaagaaagttggtgagaagggtggcctgacaaaaaagctgtcttgattttttcatataagcgaaatattgcagcaattgaagggagttggtttggatcttgggcaccagagaggatgttatgggatcacattatttataaaccaatacgggcaatgcttggaggacgtctaagatttgttctttgtggtggtgcacctctgtcaagtgacacacaaagatttatgaatatatgtctaggtgtcccagtgggtcaaggctatggattgactgaaacttgtgctggagcagctttcactgaatgggatgatacaagtgtgggtcgtgttggtccaccacttccttgttgctatgtgaagcttgtctcatgggaagaaggtggttacaagatttctgattctccaatgccgagaggagaggtcgcggttggtggacacagtataacaaaaggttatttcaacaatgaagcaaagacgaacgaagtatacaaggttgatgagaggggcatacgctggttctacactggtgatattggtcagttccatcctgatgggtgccttgagattattgacaggaaaaaagatatagtaaagcttcagcatggagaatatgtgtctcttggcaaggttgaatcggctctagcaacaagcaactatgtggagaacatcatggtttatgccgatccatttcataactactgtgttgccctggttgttccagcgcaccaggccttggagaagtgggctcagaattccgggatgaactatgaaggctttggagagctttgccaaaacgaccgagcaattaaggaggttcagcaatcgctatcaaaggccgcaaaagcagcgaggctcgagaaattcgaggtgccagcgaagatcgtgctgttgcctgaaccgtggacgccggagtccgggctggtgaccgcagcgcttaaactgaagagggagcaaataaaggccaaattcaaaggcgatctggacaagctctaccactgaagaagcgacagaggacggtttaatttgcacctactgcttccagacgcttgcggtgccaaaagctgcctggatggaacttttactgacctgcacgagtggtgtgtgtgtgtgtatcccagctgctgatacacaggagcttcgttcttctgtgactgtgactgagggaaaataaacccagtgttggaatgatcttgatttgtaatagcttcacgtcatgggattttaattttgtcatagcacagaggatgctcaatttcacgtccgttacgggtcagttatgacactaagcatattgtaaatgatgtttttttatatagacacaataaataggccctgggcacatcacctaatggtactctatatcgccatctattgatttgtaatgggaagacggacgaggttggttagttttg

SEQ ID NO: 215281 - DNA, 748 bp, Zea Mays
gcttagtatatttcattgaccaaatgacctgtctggtagtttaataatcgagttgaaatgaagaactcaaattttaacatctatctggtaaatacatccattttccattcattgcacgctttaaataagcttccatattctaagctagactctaaaacctttgggatcacagatggagttgtttttgtaacttatagcagcttgatagcatcctctgagaaccgttcccgtttgcaacagttggtacagtggtgcgggtctgagtttgatggtcttctggtgttcgacgagtgccacaaggccaaaaatctgattcctgaggcagggagccagcccacccgcactggtaaagctgttcttgagattcaggatatgttacctcaagcacgggttgtttattgttcagcgactggtgcatctgagcctcgaaatttaggttatatggttcggcttggtctctggggagatggaacatcgtttgagaatttcaaccaatttttaggtgctcttgagaaaggaggtgtgggtgctcttgaacttgttgctatggacatgaaagccaggggaatgtatgtttgccgtactctaagttacaagggtgctaactttgatatcctagaatcacttctggaggaaagaatgatggatatttttgttagtatgattgctcattgacatgaagtagtattcttttaaatttaattaacttggcgagaacaaagtggtagaaactgaaaggagacaatgt

SEQ ID NO: 215282 - DNA, 2645 bp, Zea Mays
ttacgggttttttgcccagccctactagttcttccctcgcgttcactccccagcgtgggaaaatcccggaattttcttgtttgtccactggttttcttgcgccaaaaccaggtttctccccgttgccgtggcagaactctgttcttgcccagtctagaagatctgcaccgttccaaccaccgactccggccgccaagcatatagccagcgcggcgaagaattcccaacgcgaaagccaaaacctcttcacttcacttcacgtcgacacgtgcggggagaatatgcgcgcgacaatcccagccctgtcgctcctggtgacgccgcggctcccctcgctcgccgtgccgctggctggaggccgcctccgcgtgggcggtcgttctcggacccgcctccgcgtggcggcgccgacgtccgtcccaggggaagcggcggagcaggcggagccgagcacgtcggcgcccgagtccggcgagaagttctcgtggagggatcactggtacccggtctccctcgtcgaggacctcgaccccagccgccccaccccgttccagctcctcaaccgcgacctcgtcatctggaaggaacccaagtccggcgagtgggtcgcgctcgacgaccgctgcccccaccgccttgccccgctctcggagggcaggatcgatgagacggggtgcttgcagtgctcgtatcacggatggtcattcgatggctccggcgcctgcaccaagatcccccaggccatgcccgagggtcctgaggcccgtgcggtgcggtcaccgaaggcgtgcgcgatcaagttccccaccctcgtctcccaggggctgctcttcgtgtggcccgatgagaatgggtgggagaaagcggccgccaccaagcctccaatgttgccgaaagaatttgaggacccggccttctccacggtgacaatccagagggacttgttctatggttatgatacgttgatggagaacgtctctgatccgtcccatatagaatttgctcaccacaaggttactggacgaagagatagagccaggcctttgacattcaggatggaatcaagtggtgcctggggttactcaggagcaaattctggtaatcctcgcattactgcaacttttgaggccccttgttatgcattaaacaaaatagagatagacacaaagttacccatttttggcgaccagaaatgggtcatatggatttgctctttcaacattccaatggccccagggaagactcgttctattgtctgtagcgctcgaaactttttccagttcacaatgccaggaaaagcatggtggcagcttgttcctcgatggtatgaacattggacttcaaatttggtctatgatggcgatatgatcgttcttcaaggccaggagaagattttcctagctgcaaccaaggagtcttctacggatattaatcagcagtacacaaagatcacattcacgcccacacaagctgatcgatttgttttagcattccgcacgtggctaaggaaatttggcaatagccagccggagtggtttggaaatcctacacaagaagcattgccttccaccgtcctttcaaagcgcgaggtaaaagccatctgggtcaccaaaaaagtttcagtataatatttgcttcagacataaaatatctgaatatgacaacctttttggtggtcaaagatctgttttgcttacattcttaatactcgatgcattggtaagttattacagttatcctttttactcgatttttccctttctgagcagaacgtattatcacgtcttcattgtttgtacacttggtttctatgacacacaaatttttgttttacattatcagttgtcatatgaactaatgtatttacagcaacctgcttaagtgcttagtatcacaaagggacaaattcaatgaaatatttggaaagatagtagcgtcgaaccactctcactgctaggcatttgagaatagttacttaactgacagcgaagttcaccttctaccgactggatctggaaacagtatcttgaagtagtcacacgtaaaccttcatcagctgtgtttctgcgttccagtaactcatgtattcttatgattgactttgtgttatgcagatgctagacagatacgagcagcacacgttgaaatgctcgtcttgcaaaggagcatataatgctttccagaatctgcagaaggtattcatgggagcgacagtagtttgctgtgctgccgctggtattcctccagatgttcagctcaggctattgatcggtgcggctgctttggtcagtgccgctatagcatacgcattccatgagctccagaagaattttgtattcgtggattacgtgcatgctgacattgattgaaagattcgtgaggatctgttgtgtcgacatcactcgctcgcgagtcgtgtctgtagtctagggctctaggcgtctaggtagggaaagtaactttttgccgggtataggtcatattgctcacatatgtattttgtatagtgtatgcactcaactgtagccgatgcagtgcgaaaatatagtttttatgttattatctattggattaaaattgtctccagatccttttagcatgtaaaatgccatttttcaaatggaagttctcaattgcgcctatag

SEQ ID NO: 215283 - DNA, 832 bp, Zea Mays
tggatgtcgaggctaaaccgcggcgcaggcgttccttgaaccgacttggggagcgagtggagttcaggttctccaaccttcgtgccggccaggtgcttgttgctcatcaagggaagtgggaagtagcagcacatccaccttcactctcataataacgctgcttaggcgtagtcatgatttaattagaaacttcttgtcaaaggatgttgtttctaactagttgtgcgcactggttgatttagttcatgccgttatggttgtctttccattgctagcagattattaatgtctattatgttttcttatcatgatatctatttatactttcttgcttccccgtttatgcaattttcaaaggggatgctgtcgaaattttatatatgaatgttagatgtgtagtttagtagcattctggggtgtttgtggatcccggggtgttacacaagttctttgatttaagggataaagataggagacaagttgctagacttagatccatgttcaatgatgtgatgtggaagatgatgatgagcaaacaaaaaatagcaagcaagcggatgactatgagaggtttgaagttctttggtggggagcttatggtggcctagcatatgaactataatgcttagcaaagatgattgtcagcgatgaactataatgcctatgttgttcaacatctagatgtgaacgaaattggagtgactttgcccaagtccatacaaaaagaaacatattagagcaccaaagattgaataagttggtgtatgtgagctacaaccagaaaatagaaaatcggtttgcaaaaataagagagctcagttccaaacgcaag

SEQ ID NO: 215284 - DNA, 2265 bp, Zea Mays
gcgacccttttcacgtcttcgtcgagcctcagcctggttcctcaatcctttacctctgcttgcatgtcgcaatgatccatgcaggtattacccctgcatgtatatcgcaatgatccatacaggtatagcgctacggcgcagaggaggccagaagccagattgattgcgcacgcacgtccaaaccggcgacgggggtgagggctggatgtcgaggctaaaccgcggcgcaggcgttccttgaaccgacttggggagcgagtggagttcaggttctccaaccttcgtgccggccagggatcaaccaaaggtgttatcctcggggaactttttctcaaccttactaactatctgagtttagaagacgcaactgcaatctcattgccattgaagaaatgcaattctggaacagttttacatgtttgtttcaacagaggtgttgttttccatctatagaatttccaaaagtttggtgtttcatatgattcattcacttgttttaccattcttttagtctatgcatttaaaaaaaataaaaggcaggagctatgccattcaattaagtttagaaaatagagtgttttatgtacacatggcacacattgggtcaaacacaccgatcccaacacttattaagcatggtttgtgttacttcaaatgtctaatttatttagtatgtgtagttatgcttcaaattatagtattaccaaataagtagacctaatcaaacgtcggttcaggtcgaatcaaggtcgggtagtgggtcgtttgacacggcccgtacccgactcgtgcctagtgtcgggtcgagttggcccatgcttccctgttagatgtataaggtcaggttttttttttgctttagatcaggtttttcgggttaggtcaggttttggaataaacttcatggcctgtgtcgagactgtggattgttgcgagccaaaaactatttctcgtacccacctgttgcattggtcgggtcgagtcgtgttttttcgagcaaatcgagtcgggcatcctatgatcaggtctatgaataagtcaaagtaatttgatgttctcttgacctgcatgaattgtgctactttagttttctctaaaatagtttcctattcatgtgacttggcatcaaaattagttggattggatgttatatactcattggcggcgatttggttaggcccaatgatttcaagtcgtccgactagtcgtgattagtcggactagtcggttttagtggagcgaccagggtatctgatccgattaggtcgactaatcgtccagtcgtcgaccaagtgtgattagtcgtcaagttaatgtgtggacgattagttaggtttagttggctagcggttggcctgtttttgctttaggctggacatctacaattaaggcccatttagtgtaacaagcatggtagaattcacaacctaatgagagagaagctaggtggtgatcttgttaggccaggtgtgactcgatttgctacctcatttctgacattggcgagcatgcttaggcataggaatggtctaaagagtatatttgttagtgatgagtggcacctaactaagtttcccaacactgaagaagggaggtaaatcacaagaattgtgctttctatgccattttgggaaaacgtggaaaactgtctaagggcttcacaaccactcctcgttgctctaaggattgttgatggagatgagacaccagcaacccaagaaatcatggcaacattggatgttgcaaaagccaccataaaggagtcattgaaagataagccaagattacaagcagatgtactatcatgctttgaaaaagatgggaaaatcaaatggagcaaaaactgtatggatcagccctatacttgaatccaaacaagttctttgatttaagggataaagataggagacaagttgctagacttagatccatgttcaatgatgtgatgtggaagatgatgatgagcaaacaaaaaatagcaagcaagcggatgactatgagaggtttgaagttctttggtggggagcttatggtggcctagcatatgaactataatgcttagcaaagatgattgtcagcgatgaactataatgcctatgttgttcaacatctagatgtgaacgaaattggagtgactttgcccaagtccatacaaaaagaaacatattagagcaccaaagattgaataagttggtgtatgtgagctacaaccagaaaatagaaaatcggtttgcaaaaataagagagctcagttccaaacgcaag

SEQ ID NO: 215285 - DNA, 1118 bp, Zea Mays
cgagcctcagcctggttcctcaatcctttacctctgcttgcatgtcgcaatgatccatgcaggtattacccctgcatgtatatcgcaatgatccatacaggtatagcgctacggcgcagaggaggccagaagccagattgattgcgcacgcacgtccaaaccggcgacgggggtgagggctggatgtcgaggctaaaccgcggcgcaggcgttccttgaaccgacttggggagcgagtggagttcaggttctccaaccttcgtgccggccaggtattgttgacgcagggaagtgttatacaaactattgtggttgttcaaggaaatgagatggtattggttatattgagactactgagttctatatctacaagtatttctgatcttaattgtgattcttttaaaatattgattaattcaatttgtggtttaaatatcttgtcaaaacaaaacaattcgcttgctgagatgtttcatctcactcttgcattactcaatgcaggtgcttgttgctcatcaagggaagtgggaagtagcagcacatccaccttcactctcataataacgctgcttaggcgtagtcatgatttaattagaaacttcttgtcaaaggatgttgtttctaactagttgtgcgcactggttgatttagttcatgccgttatggttgtctttccattgctagcagattattaatgtctattatgttttcttatcatgatatctatttatactttcttgcttccccgtttatgcaattttcaaaggggatgctgtcgaaattttatatatgaatgttagatgtgtagtttagtagcattctggggtgtttgtggatcccggggtgttacacaagttctttgatttaagggataaagataggagacaagttgctagacttagatccatgttcaatgatgtgatgtggaagatgatgatgagcaaacaaaaaatagcaagcaagcggatgactatgagaggtttgaagttctttggtggggagcttatggtggcctagcatatgaactataatgcttagcaaagatgattgtcagcgatgaactataatgcctatgttgttcaacatctagatgtgaacgaaattggagtgactttgcc

SEQ ID NO: 215286 - DNA, 2105 bp, Zea Mays
ctggccaggggagcctcctctcctctcgtctcgtctcgtcgcacgcgagcccatccccccgcccgccgcctgcgcttgacttgacccgcgctcctcctcggcgtcggggagaccgggctcggtccgcgttgtctcggcggacggaggaggaccgtagcgcgaccgcccgtccgccgccagagccctcgtcatcgtgccggctgctcctgccgctcgtcccgccgcgttgagcattggggatctcgcgggcccttcgtctgtacccgccgactcttcaaaccctagcctctgtggcccgccgacgccgacgggaggagctggagctggggctggggctggagggcgcggaagctggtgatattggaaaaggcaattagtaatcgggaaagatgcccgccgagttgataatctatgccaacgcatttatttgagttacaggctattagagggaactgtccattttaaagaattgcatgagattattgaagatgcaaaagcaaaattggaaagtgaggttgggccacttgatggaatgtcggcaaagaatgcacatggtatcgtaagcaggttctcagctggtatcgctgtgcagaaactatgctctacagcaattcaaagagctgacgagtggttgagttctcctgacctgcatcttcgagattcattacctgttgcctgtagatttaaatttgtagacataacatcttcttccctcattgtcatcttgaaagaaacctcgtcttctgacactatcaaaggttataagctatggtactggaagagcagagagcaaccaagtatggaaaagcctgttattgtgtccaaagatgaaagaaaaatacttctttatgaccttaccccatgcacagaatattctttcagagttatatcattcacagatgatggggtacttggccattcagaatctagatgccgtactgaaagtagggagatatttgtcatgcgtgcaccaaagaatgcagtgggaggaggggctacacatgcgcaaaaaaaagacaggaaccagtcttgtaagtcaactgggttcaagatccgagatatttggaagaactttcaggaagctttagatgcagaaggctgttttgaaggattttctgaagatgtacatgaaggttcctgcagcagaagtgttacagagacagagttatctggagcttgtcgcaaacttcatttcaactcatcttctgtccccgacctaaacgccgaggttcctgtacccgtggactacactgagaaccattattattctaagaagggacttgtgaggtcaaatgacagtggtgactctgagacctgcgccgttggccagactgcagagccgcctgcagttgaatctcggcaagtaagcaaggtgaatagcgtaccagttaataaatgcgagcagaatggtgcttctgctatttgccatgaaaagatgctctccggatcgacgaggcaactggatggggattatgagcactgcgtaaaggtagtaaggcagttggaatgcgatgggcacatcgaaaatggtttcaggatgaagttcttgacatggtatagtctaagatccacagaccaggagcgcaaggccgtgagcacatttgtcagaacgttaagcaacgaaccaagcagcctggccgagcagctcgtcgattctttcggagaaatattaaacagcaagaaggccaaaaccggtttctgcagcaagctatggcattaggacaaaaaggactagatctcaagatactgctaactcactgattatccatatttttcactgaccggtgcagtgaaattctagtttattccatcaaatttgacagcgatgaaaagggggcatctgtgagaataggagattattttgggcagcaagtagcctgctctgaaataattcttttccatcaggaagtagtggaaacttgattttcattggattacctgggtcaatccagaaattattgtagaaggttgtctttttttcccctttgttgttgtggttcgctgagaaattctttggagatagcagtccgttggttattctgggttattatataaatcatggtaaatggaatgtgatggtacaaagtctctggtttacttgtgct

SEQ ID NO: 215287 - DNA, 2638 bp, Zea Mays
ctggccaggggagcctcctctcctctcgtctcgtctcgtcgcacgcgagcccatccccccgcccgccgcctgcgcttgacttgacccgcgctcctcctcggcgtcggggagaccgggctcggtccgcgttgtctcggcggacggaggaggaccgtagcgcgaccgcccgtccgccgccagagccctcgtcatcgtgccggctgctcctgccgctcgtcccgccgcgttgagcattggggatctcgcgggcccttcgtctgtacccgccgactcttcaaaccctagcctctgtggcccgccgacgccgacgggaggagctggagctggggctggggctggagggcgcggaagctggtggctgttgtttcgctgattgaaagtactccatggcttaatgatgaactggtaataaagaggtcaatcattgtcagctagctgtctgaggagggtttttggagttcttactaagaagagagttactcatgctagccagtgaaggacggacacagatcttgcttgctttactgaactgaagacatgcccaaaacacctcctgtcaatgcaagcaagaacactgaaccgcagaaacaatctgcacccaacttaacaataacaaatgggcacacaagtacaaaggtagtggttaaaaaagagcaccctatcaatgatgtgaaacacattagcacttgggtttgcaaaaatttggcctgtaaagctgttagaccagcagaagattccttctgcaagaggtgctcgtgttgtatttgccacaagtttgatgacaataaggatcctagtcaatggttagtttgttcatctgacaatgatagcaagaattgttgtggttcttcttgtcatattgaatgtgcattccgagagaagagggcaggatgctttgatctagagcaaattatacatcttgatgggagttattcctgtgcctcgtgtgggaagatttctggaatactagggctattagagggaactgtccattttaaagaattgcatgagattattgaagatgcaaaagcaaaattggaaagtgaggttgggccacttgatggaatgtcggcaaagaatgcacatggtatcgtaagcaggttctcagctggtatcgctgtgcagaaactatgctctacagcaattcaaagagctgacgagtggttgagttctcctgacctgcatcttcgagattcattacctgttgcctgtagatttaaatttgtagacataacatcttcttccctcattgtcatcttgaaagaaacctcgtcttctgacactatcaaaggttataagctatggtactggaagagcagagagcaaccaagtatggaaaagcctgttattgtgtccaaagatgaaagaaaaatacttctttatgaccttaccccatgcacagaatattctttcagagttatatcattcacagatgatggggtacttggccattcagaatctagatgccgtactgaaagtagggagatatttgtcatgcgtgcaccaaagaatgcagtgggaggaggggctacacatgcgcaaaaaaaagacaggaaccagtcttgtaagtcaactgggttcaagatccgagatatttggaagaactttcaggaagctttagatgcagaaggctgttttgaaggattttctgaagatgtacatgaaggttcctgcagcagaagtgttacagagacagagttatctggagcttgtcgcaaacttcatttcaactcatcttctgtccccgacctaaacgccgaggttcctgtacccgtggactacactgagaaccattattattctaagaagggacttgtgaggtcaaatgacagtggtgactctgagacctgcgccgttggccagactgcagagccgcctgcagttgaatctcggcaagtaagcaaggtgaatagcgtaccagttaataaatgcgagcagaatggtgcttctgctatttgccatgaaaagatgctctccggatcgacgaggcaactggatggggattatgagcactgcgtaaaggtagtaaggcagttggaatgcgatgggcacatcgaaaatggtttcaggatgaagttcttgacatggtatagtctaagatccacagaccaggagcgcaaggccgtgagcacatttgtcagaacgttaagcaacgaaccaagcagcctggccgagcagctcgtcgattctttcggagaaatattaaacagcaagaaggccaaaaccggtttctgcagcaagctatggcattaggacaaaaaggactagatctcaagatactgctaactcactgattatccatatttttcactgaccggtgcagtgaaattctagtttattccatcaaatttgacagcgatgaaaagggggcatctgtgagaataggagattattttgggcagcaagtagcctgctctgaaataattcttttccatcaggaagtagtggaaacttgattttcattggattacctgggtcaatccagaaattattgtagaaggttgtctttttttcccctttgttgttgtggttcgctgagaaattctttggagatagcagtccgttggttattctgggttattatataaatcatggtaaatggaatgtgatggtacaaagtctctggtttacttgtgct

SEQ ID NO: 215288 - DNA, 1709 bp, Zea Mays
atggtcgaggagacggttgtgggggatggcgaggcgagcacgagcgccgcttcggcccacgccagcatcgcggcgcgggcgggtgacggcgggacgcggagggcttggggcagcgaagagcgaaggcctggagccggcgacggcgagcagagcaggtatgctcctcttgatagttgtcttttcacaactgccattaccacttcagatgaaagatataattggcctgttccatggcctgaaagacttgatgttagctatgcaagtgtacctgatgattctgcttctaacaaagagaagtttgaagctgatacaaagtattggaaacagctcatttcagaactctgccgagcatatgttgataaagcagggtgctgcctttcaatcatgttggcgtgggccgaagctatatctggagcaccaggagtccagcctctgctatgccctcaaggtggccctcttcttcgaaaggaagttattgggggagataggaagcaccaaagcagattggatgagaacaagggctctattattcttaatttcaccaatttgtgtgcaatgtggaattatgctaatgtgcaatggccccattctgtagggtgcttgtcatgcctacaaagatctgccttagttcagtgcacaatacaaagggggtccttcattcaagcattgcaacttcataacaaagtgcaaacttcacttggatcctgaccttcattccctccttcacaagcttcgtcgtgttcaccagccaatggcccaggacgtcgtgtggcccttttaccacctccgaaatgtcgacgaacatgaggagcttcctggactatagctggatcggaggtcaggatgtcatatgtgttaaacaaagtcattcttcaacagtttcaactactaatcttaagttgcacctggagaatcttagcgatttttactttctgatgggaagaaccactccccaatacttcggaaggcaaaggatggcaagagcacggtacaactctttttgtattcagtttgcattgtcatatattgggccaaaatttctctaagctaatccatttcattacaggtgcctgatgtttttgtcaggatagtgcagcattctaataacctgcatctttctagctactctgaaacatcaatcaaggatgtatatatttttttatatgacttagtatcaattcgctctctcttgatatggtgaaaaaaattatatgtccgttattccaaatagggcctgacagttacctgttcgaaaaggggaggagaagcatacttacccaaccactccaatattccaaacatgattggagactccatgatatgtgtcccataagtcttgataaacctgatattcacaaggtccaagtcaacaagagtgactatgacaatgtgaaggttgtcctctacctcaaaaaagtggaacaagaggagctggagaagctcgcacgcaaggcgcagttgctgccctgggtggcctgggttggtatcacgatgttgctggagaaaggcgctgacgttaacgcgcgcaactactgcggccaggtcttgagttctaagcagcctctccgcatttgtggggaaggcctatctcggtttatcccttctacagaccccacttatgttggagcctctgacactggactgcactgatgcatgcgtgtcggcatgggcactaggaggtggtgcagatgcttcttctcttcagatgc

SEQ ID NO: 215289 - DNA, 3821 bp, Zea Mays
aaaagaaaaactcagtctcaggttgcagacctcccgacgccggccgtgccgcttccgtcctcgctttcctgtcaccgccgccgccgactgccacaacctctttcccatccctctcgtccccatcctctgccgccgcccccatcctcgccgcggctcggctggtgcggagcggacggacggagatccgccgacctcgggctccgctgcgtcatcgctacgccggctgaaggagtgaagatgatagacatggtgtctgctgttgaagagcttagtgggttaagctctaaagaacttaatgagatgctgaaggagtcagacaactttgttttgcagtccaaggcagaaggcggaggtccaaagcagacacttgtggacatggaaaaactcgtgtcctcgcttcctcttcatctcattgctgtatgtttggagcttcggcaaggccccgatttgacatatgtgcttcgtggcatgcgctttttgcatagtttgtctgacctagcatcccgccatactagactggagcaggttcttcttgatgatgtcaaattatctgaacaagtcatggatctgatattcttcttactttctattcttgctgaacagaagaaggagaataatgttggcgcttctccgcttgtgcatgcgtcacttgtagcagctagtcttcatctgctaacaagttacttctcttcccagtggcatgaacttgtccatattctgcttgcacatccaaaggttgatatctttgtggatgtggcctttgatagtttgcatgaagatgtgaggctgttaaatatcagattatcatcaatggacttcggtatctttcctgttggttctttggaatctcgtcttgctcacttcatctgccaacagtgtgaagcatcattgcaatttctcttgttgttgtgccagcaaaagctgtttcgagatcggattttaagaaataaggaactctctagaaatggaggcatactgtcactttctcacactatactgaagttagctgtccctgaatgtttgaagcaatcaaccgatcttgttgcttctatttccaggctcaaggcaaagatactttctattctgctgcaactttgtgaggctgaaagtgtctcttacctcgatgaagttgccactaattcaaacagcatgcggctagggcaaaccttggctctagaggttcttaatttgctgaagattgcatttggaaagaaaaaatacattacttctgattctcatgataaggttaagatttaccccatgggatctatgcttatcagtgcattgcgtcttgttgacgtcttctctgatgattcaaacttcagatcatcctttttgactaacactgttccgtttttaacccagattctagcaactcctcacggtgaatttgtttctagttggtgctctgtcaacttaccagcaattgaggaagatgcaagtctagattatgatccttttgttgcatctgaggtggcactgttagcttctaataatgtgttgactgaagctaaagctgactattcatgcccttttcgccctagcctgccttcagtggcatatgcacagacaagaacatcatgcgtagtgaaaataatagcaaatttgcatgtttttattccaaacatatgtgaagagcaagaaagggatctttttcttcagaactttcaaaagtacttggtgtctgggagttctaaactgtcagcagaccagccagcttctagtgattttgatgccactaaagtctgtagaaacttaggatctttgtctgattatgctaaaacattggttcctaatttgttaaatggggaagacttgttgttattaagtgatttttctgataagctacaatcttggtgtaaatcacaagttgcagtaaaggtggtacaaaatgatattccaccagaaagcatggaggacatgcacccaatgcagcagcccttgccaacacgggcaagcactccggactccaaaatgaataactttccaaagaacatggaagtgtctgcaccaatacccccaataaatcgggaaggaaatgataaggatgagactccaaagaacacagtctctagaaatggtggtttcctacagaatgcagttggtcaagacctagtccatcttggcgttgcaagaacagccagtggtggctcttcggccgtcacttccgttgttagcactggacaccagcgcagcaaaatggatcttgatccagcttccggtagcgtggacaatttcaaaacaccagaactcacaaaagaaaatggtctccagggggatgacaaaggagaaagtagtgtgtatgatgagaggcaacctaagagaaggaagcggaacattatgaatagtgagcaaatagatgaattagagaaggctctagtagatgagcctgagatgcacaggaaccctgttctattgcagggttggtcagagaagctaagtctgcagggcccagagatcacatcatcacaacttaaaaactggctgaacaatcggaaagctaagcttgctcgcattgcaaaagaaagagggacatttgagggagataatgctgataagccatctacccctcatcccggcgagtcttccgaaagtgctggggaggacaactatataccccctgcaagggtgatgactgctccatccaaaggcagactggtgagcccggacggcaatgagaaaacatcgcaggcagagctatcccccaacacgatgctgatccgcccattcacgagatccttctcactggagcccggtcggctcgtttcactagttgacagcgacgggaaggaggttggcaggggcaagatattccaagcgccagggaagagcccagccccagtggagagccgcatctgcacggttgatgtcaccgagctcaggaccgagaagtggagggagctcccacacccttctgaggcatctgggaggaccttccaggaggcggaggcgaggaatggtggaatcatgagggtctcttgggactccggcaggctgttgcctgtagtgtagcaaggcagaaacttttcgtcaggttgctgtataccgctaggcacaaggtacggagtagttactaattttactgctggtgtttggtgtcacctgcaacgtgacgtggtaaaccaatgctgagcgatggagttgcatgtaaataattcagcactagaggaaaccaaaggggctgcataatgaactttagcttttattgtgggaaaaaaggtgatagcgttcttcatgttcgatcaattaaacagcaccagtaaattgatcatagggatgtggacttgctgaggcttgagtatatatggtgttcctcgagcttccttaaacaagcatgaagtttgtaggcacttcatcacttgttggtgagctacagtaatcttgagcccgaccctataaataacatggttcttaggctcgttaccaaaatgagcattacattacaaagcagcttttagacatatattggccaagaagatgttggagagaaatataagtctcaaatgttgagtgatatgttgcttcgtgaattattctcaaacatttaatgacgaggccacatacgaatttctccattgatttttttcactaaagacaccatacactgacaatgatgagatattggagagaaacaaaagtctcacataattttcattgtatatcatttgtgagattccgaactattgtttttatacaggtcaacatgctttagtttttgttaccatagtagttgtgagtaaattggttataacaagctaacgagcatcaaaggtcgcttcattcaagataattttatgttgctttaacaaacaaacaaacaa

SEQ ID NO: 215290 - DNA, 3920 bp, Zea Mays
gaaaaactcagtctcaggttgcagacctcccgacgccggccgtgccgcttccgtcctcgctttcctgtcaccgccgccgccgactgccacaacctctttcccatccctctcgtccccatcctctgccgccgcccccatcctcgccgcggctcggctggtgcggagcggacggacggagatccgccgacctcgggctccgctgcgtcatcgctacgccggctgaaggagtgaagatgatagacatggtgtctgctgttgaagagcttagtgggttaagctctaaagaacttaatgagatgctgaaggagtcagacaactttgttttgcagtccaaggcagaaggcggaggtccaaagcagacacttgtggacatggaaaaactcgtgtcctcgcttcctcttcatctcattgctgtatgtttggagcttcggcaaggccccgatttgacatatgtgcttcgtggcatgcgctttttgcatagtttgtctgacctagcatcccgccatactagactggagcaggttcttcttgatgatgtcaaattatctgaacaagtcatggatctgatattcttcttactttctattcttgctgaacagaagaaggagaataatgttggcgcttctccgcttgtgcatgcgtcacttgtagcagctagtcttcatctgctaacaagttacttctcttcccagtggcatgaacttgtccatattctgcttgcacatccaaaggttgatatctttgtggatgtggcctttgatagtttgcatgaagatgtgaggctgttaaatatcagattatcatcaatggacttcggtatctttcctgttggttctttggaatctcgtcttgctcacttcatctgccaacagtgtgaagcatcattgcaatttctcttgttgttgtgccagcaaaagctgtttcgagatcggattttaagaaataaggaactctctagaaatggaggcatactgtcactttctcacactatactgaagttagctgtccctgaatgtttgaagcaatcaaccgatcttgttgcttctatttccaggctcaaggcaaagatactttctattctgctgcaactttgtgaggctgaaagtgtctcttacctcgatgaagttgccactaattcaaacagcatgcggctagggcaaaccttggctctagaggttcttaatttgctgaagattgcatttggaaagaaaaaatacattacttctgattctcatgataaggttaagatttaccccatgggatctatgcttatcagtgcattgcgtcttgttgacgtcttctctgatgattcaaacttcagatcatcctttttgactaacactgttccgtttttaacccagattctagcaactcctcacggtgaatttgtttctagttggtgctctgtcaacttaccagcaattgaggaagatgcaagtctagattatgatccttttgttgcatctgaggtggcactgttagcttctaataatgtgttgactgaagctaaagctgactattcatgcccttttcgccctagcctgccttcagtggcatatgcacagacaagaacatcatgcgtagtgaaaataatagcaaatttgcatgtttttattccaaacatatgtgaagagcaagaaagggatctttttcttcagaactttcaaaagtacttggtgtctgggagttctaaactgtcagcagaccagccagcttctagtgattttgatgccactaaagtctgtagaaacttaggatctttgtctgattatgctaaaacattggttcctaatttgttaaatggggaagacttgttgttattaagtgatttttctgataagctacaatcttggtgtaaatcacaagttgcagtaaaggtggtacaaaatgatattccaccagaaagcatggaggacatgcacccaatgcagcagcccttgccaacacgggcaagcactccggactccaaaatgaataactttccaaaggatgtgcagaacatggaagtgtctgcaccaatacccccaataaatcgggaaggaaatgataaggatgagactccaaagaacacagtctctagaaatggtggtttcctacagaatgcagttggtcaagacctagtccatcttggcgttgcaagaacagccagtggtggctcttcggccgtcacttccgttgttagcactggacaccagcgcagcaaaatggatcttgatccagcttccggtagcgtggacaatttcaaaacaccagaactcacaaaagaaaatggtctccagggggatgacaaaggagaaagtagtgtgtatgatgagaggcaacctaagagaaggaagcggaacattatgaatagtgagcaaatagatgaattagagaaggctctagtagatgagcctgagatgcacaggaaccctgttctattgcagggttggtcagagaagctaagtctgcaggctgaacaatcggaaagctaagcttgctcgcattgcaaaagaaagagggacatttgagggagataatgctgataagccatctacccctcatcccggcgagtcttccgaaagtgctggggaggacaactatataccccctgcaagggtgatgactgctccatccaaaggcagactggtgagcccggacggcaatgagaaaacatcgcaggcagagctatcccccaacacgatgctgatccgcccattcacgagatccttctcactggagcccggtcggctcgtttcactagttgacagcgacgggaaggaggttggcaggggcaagatattccaagcgccagggaagagcccagccccagtggagagccgcatctgcacggttgatgtcaccgagctcaggaccgagaagtggagggagctcccacacccttctgaggcatctgggaggaccttccaggaggcggaggcgaggaatggtggaatcatgagggtctcttgggactccggcaggctgttgcctgtagtgtagcaaggcagaaacttttcgtcaggttgctgtataccgctaggcacaaggtgagcagagggagcctttggtttagggcgagagactggatcatgggattcttgggggcctaagtaacactgttaaaacctgtggttaactgtggtgtatccatcaactaattgtctcaagcaatgcaggtacggagtagttactaattttactgctggtgtttggtgtcacctgcaacgtgacgtggtaaaccaatgctgagcgatggagttgcatgtaaataattcagcactagaggaaaccaaaggggctgcataatgaactttagcttttattgtgggaaaaaaggtgatagcgttcttcatgttcgatcaattaaacagcaccagtaaattgatcatagggatgtggacttgctgaggcttgagtatatatggtgttcctcgagcttccttaaacaagcatgaagtttgtaggcacttcatcacttgttggtgagctacagtaatcttgagcccgaccctataaataacatggttcttaggctcgttaccaaaatgagcattacattacaaagcagcttttagacatatattggccaagaagatgttggagagaaatataagtctcaaatgttgagtgatatgttgcttcgtgaattattctcaaacatttaatgacgaggccacatacgaatttctccattgatttttttcactaaagacaccatacactgacaatgatgagatattggagagaaacaaaagtctcacataattttcattgtatatcatttgtgagattccgaactattgtttttatacaggtcaacatgctttagtttttgttaccatagtagttgtgagtaaattggttataacaagctaacgagcatcaaaggtcgcttcattcaagataattttatgttgctttaacaaacaaacaaacaa

SEQ ID NO: 215291 - DNA, 3626 bp, Zea Mays
atgggccccccactcgtcatattctttgggctgatgatagacatggtgtctgctgttgaagagcttagtgggttaagctctaaagaacttaatgagatgctgaaggagtcagacaactttgttttgcagtccaaggcagaaggcggaggtccaaagcagacacttgtggacatggaaaaactcgtgtcctcgcttcctcttcatctcattgctgtatgtttggagcttcggcaaggccccgatttgacatatgtgcttcgtggcatgcgctttttgcatagtttgtctgacctagcatcccgccatactagactggagcaggttcttcttgatgatgtcaaattatctgaacaagtcatggatctgatattcttcttactttctattcttgctgaacagaagaaggagaataatgttggcgcttctccgcttgtgcatgcgtcacttgtagcagctagtcttcatctgctaacaagttacttctcttcccagtggcatgaacttgtccatattctgcttgcacatccaaaggttgatatctttgtggatgtggcctttgatagtttgcatgaagatgtgaggctgttaaatatcagattatcatcaatggacttcggtatctttcctgttggttctttggaatctcgtcttgctcacttcatctgccaacagtgtgaagcatcattgcaatttctcttgttgttgtgccagcaaaagctgtttcgagatcggattttaagaaataaggaactctctagaaatggaggcatactgtcactttctcacactatactgaagttagctgtccctgaatgtttgaagcaatcaaccgatcttgttgcttctatttccaggctcaaggcaaagatactttctattctgctgcaactttgtgaggctgaaagtgtctcttacctcgatgaagttgccactaattcaaacagcatgcggctagggcaaaccttggctctagaggttcttaatttgctgaagattgcatttggaaagaaaaaatacattacttctgattctcatgataaggttaagatttaccccatgggatctatgcttatcagtgcattgcgtcttgttgacgtcttctctgatgattcaaacttcagatcatcctttttgactaacactgttccgtttttaacccagattctagcaactcctcacggtgaatttgtttctagttggtgctctgtcaacttaccagcaattgaggaagatgcaagtctagattatgatccttttgttgcatctgaggtggcactgttagcttctaataatgtgttgactgaagctaaagctgactattcatgcccttttcgccctagcctgccttcagtggcatatgcacagacaagaacatcatgcgtagtgaaaataatagcaaatttgcatgtttttattccaaacatatgtgaagagcaagaaagggatctttttcttcagaactttcaaaagtacttggtgtctgggagttctaaactgtcagcagaccagccagcttctagtgattttgatgccactaaagtctgtagaaacttaggatctttgtctgattatgctaaaacattggttcctaatttgttaaatggggaagacttgttgttattaagtgatttttctgataagctacaatcttggtgtaaatcacaagttgcagtaaaggtggtacaaaatgatattccaccagaaagcatggaggacatgcacccaatgcagcagcccttgccaacacgggcaagcactccggactccaaaatgaataactttccaaaggatgtgcagaacatggaagtgtctgcaccaatacccccaataaatcgggaaggaaatgataaggatgagactccaaagaacacagtctctagaaatggtggtttcctacagaatgcagttggtcaagacctagtccatcttggcgttgcaagaacagccagtggtggctcttcggccgtcacttccgttgttagcactggacaccagcgcagcaaaatggatcttgatccagcttccggtagcgtggacaatttcaaaacaccagaactcacaaaagaaaatggtctccagggggatgacaaaggagaaagtagtgtgtatgatgagaggcaacctaagagaaggaagcggaacattatgaatagtgagcaaatagatgaattagagaaggctctagtagatgagcctgagatgcacaggaaccctgttctattgcagggttggtcagagaagctaagtctgcagggcccagagatcacatcatcacaacttaaaaactggctgaacaatcggaaagctaagcttgctcgcattgcaaaagaaagagggacatttgagggagataatgctgataagccatctacccctcatcccggcgagtcttccgaaagtgctggggaggacaactatataccccctgcaagggtgatgactgctccatccaaaggcagactggtgagcccggacggcaatgagaaaacatcgcaggcagagctatcccccaacacgatgctgatccgcccattcacgagatccttctcactggagcccggtcggctcgtttcactagttgacagcgacgggaaggaggttggcaggggcaagatattccaagcgccagggaagagcccagccccagtggagagccgcatctgcacggttgatgtcaccgagctcaggaccgagaagtggagggagctcccacacccttctgaggcatctgggaggaccttccaggaggcggaggcgaggaatggtggaatcatgagggtctcttgggactccggcaggctgttgcctgtagtgtagcaaggcagaaacttttcgtcaggttgctgtataccgctaggcacaaggtacggagtagttactaattttactgctggtgtttggtgtcacctgcaacgtgacgtggtaaaccaatgctgagcgatggagttgcatgtaaataattcagcactagaggaaaccaaaggggctgcataatgaactttagcttttattgtgggaaaaaaggtgatagcgttcttcatgttcgatcaattaaacagcaccagtaaattgatcatagggatgtggacttgctgaggcttgagtatatatggtgttcctcgagcttccttaaacaagcatgaagtttgtaggcacttcatcacttgttggtgagctacagtaatcttgagcccgaccctataaataacatggttcttaggctcgttaccaaaatgagcattacattacaaagcagcttttagacatatattggccaagaagatgttggagagaaatataagtctcaaatgttgagtgatatgttgcttcgtgaattattctcaaacatttaatgacgaggccacatacgaatttctccattgatttttttcactaaagacaccatacactgacaatgatgagatattggagagaaacaaaagtctcacataattttcattgtatatcatttgtgagattccgaactattgtttttatacaggtcaacatgctttagtttttgttaccatagtagttgtgagtaaattggttataacaagctaacgagcatcaaaggtcgcttcattcaagataattttatgttgctttaacaaacaaacaaacaa

SEQ ID NO: 215292 - DNA, 3932 bp, Zea Mays
gtatggaagtgatttgagtatggacaaccggttcatgcaaatttcctcattcagctaagcagcactgctcacgcagagcttgttcatgcatatttccttggaaatatctgttccctaatataatattgtaactctgaattcaagctagtatttttttataggtagtttaaactccccattttatatagggtatggaggctgagtgataatgaaaagtttattggactgtgctactaaagatactatttctgtatgcctgctactggtctccatgaggagatgatagacatggtgtctgctgttgaagagcttagtgggttaagctctaaagaacttaatgagatgctgaaggagtcagacaactttgttttgcagtccaaggcagaaggcggaggtccaaagcagacacttgtggacatggaaaaactcgtgtcctcgcttcctcttcatctcattgctgtatgtttggagcttcggcaaggccccgatttgacatatgtgcttcgtggcatgcgctttttgcatagtttgtctgacctagcatcccgccatactagactggagcaggttcttcttgatgatgtcaaattatctgaacaagtcatggatctgatattcttcttactttctattcttgctgaacagaagaaggtttcaatgggttaaaccaaaatgtttttattgattcatgtgtgctctgctttgaattgtcatctgatactaattctggtaacagctgttgttttaaattaggagaataatgttggcgcttctccgcttgtgcatgcgtcacttgtagcagctagtcttcatctgctaacaagttacttctcttcccagtggcatgaacttgtccatattctgcttgcacatccaaaggttgatatctttgtggatgtggcctttgatagtttgcatgaagatgaactctctagaaatggaggcatactgtcactttctcacactatactgaagttagctgtccctgaatgtttgaagcaatcaaccgatcttgttgcttctatttccaggctcaaggcaaagatactttctattctgctgcaactttgtgaggctgaaagtgtctcttacctcgatgaagttgccactaattcaaacagcatgcggctagggcaaaccttggctctagaggttcttaatttgctgaagattgcatttggaaagaaaaaatacattacttctgattctcatgataaggttaagatttaccccatgggatctatgcttatcagtgcattgcgtcttgttgacgtcttctctgatgattcaaacttcagatcatcctttttgactaacactgttccgtttttaacccagattctagcaactcctcacggtgaatttgtttctagttggtgctctgtcaacttaccagcaattgaggaagatgcaagtctagattatgatccttttgttgcatctgaggtggcactgttagcttctaataatgtgttgactgaagctaaagctgactattcatgcccttttcgccctagcctgccttcagtggcatatgcacagacaagaacatcatgcgtagtgaaaataatagcaaatttgcatgtttttattccaaacatatgtgaagagcaagaaagggatctttttcttcagaactttcaaaagtacttggtgtctgggagttctaaactgtcagcagaccagccagcttctagtgattttgatgccactaaagtctgtagaaacttaggatctttgtctgattatgctaaaacattggttcctaatttgttaaatggggaagacttgttgttattaagtgatttttctgataagctacaatcttggtgtaaatcacaagttgcagtaaaggtggtacaaaatgatattccaccagaaagcatggaggacatgcacccaatgcagcagcccttgccaacacgggcaagcactccggactccaaaatgaataactttccaaaggatgtgcagaacatggaagtgtctgcaccaatacccccaataaatcgggaaggaaatgataaggatgagactccaaagaacacagtctctagaaatggtggtttcctacagaatgcagttggtcaagacctagtccatcttggcgttgcaagaacagccagtggtggctcttcggccgtcacttccgttgttagcactggacaccagcgcagcaaaatggatcttgatccagcttccggtagcgtggacaatttcaaaacaccagaactcacaaaagaaaatggtctccagggggatgacaaaggagaaagtagtgtgtatgatgagaggcaacctaagagaaggaagcggaacattatgaatagtgagcaaatagatgaattagagaaggctctagtagatgagcctgagatgcacaggaaccctgttctattgcagggttggtcagagaagctaagtctgcagggcccagagatcacatcatcacaacttaaaaactggctgaacaatcggaaagctaagcttgctcgcattgcaaaagaaagagggacatttgagggagataatgctgataagccatctacccctcatcccggcgagtcttccgaaagtgctggggaggacaactatataccccctgcaagggtgatgactgctccatccaaaggcagactggtgagcccggacggcaatgagaaaacatcgcaggcagagctatcccccaacacgatgctgatccgcccattcacgagatccttctcactggagcccggtcggctcgtttcactagttgacagcgacgggaaggaggttggcaggggcaagatattccaagcgccagggaagagcccagccccagtggagagccgcatctgcacggttgatgtcaccgagctcaggaccgagaagtggagggagctcccacacccttctgaggcatctgggaggaccttccaggaggcggaggcgaggaatggtggaatcatgagggtctcttgggactccggcaggctgttgcctgtagtgtagcaaggcagaaacttttcgtcaggttgctgtataccgctaggcacaaggtgagcagagggagcctttggtttagggcgagagactggatcatgggattcttgggggcctaagtaacactgttaaaacctgtggttaactgtggtgtatccatcaactaattgtctcaagcaatgcaggtacggagtagttactaattttactgctggtgtttggtgtcacctgcaacgtgacgtggtaaaccaatgctgagcgatggagttgcatgtaaataattcagcactagaggaaaccaaaggggctgcataatgaactttagcttttattgtgggaaaaaaggtgatagcgttcttcatgttcgatcaattaaacagcaccagtaaattgatcatagggatgtggacttgctgaggcttgagtatatatggtgttcctcgagcttccttaaacaagcatgaagtttgtaggcacttcatcacttgttggtgagctacagtaatcttgagcccgaccctataaataacatggttcttaggctcgttaccaaaatgagcattacattacaaagcagcttttagacatatattggccaagaagatgttggagagaaatataagtctcaaatgttgagtgatatgttgcttcgtgaattattctcaaacatttaatgacgaggccacatacgaatttctccattgatttttttcactaaagacaccatacactgacaatgatgagatattggagagaaacaaaagtctcacataattttcattgtatatcatttgtgagattccgaactattgtttttatacaggtcaacatgctttagtttttgttaccatagtagttgtgagtaaattggttataacaagctaacgagcatcaaaggtcgcttcattcaagataattttatgttgctttaacaaacaaacaaacaa

SEQ ID NO: 215293 - DNA, 3881 bp, Zea Mays
cccacccccaccaatctcgctctgtgacccctccccgcgcggcggtcgcggtcatcccgctgtcgacgctacttcggcaagatgagcttgcttgggacggggcttcagcctcggcctcgacccgcgtcaggtgaaggctgcggcacgcgtcccctcctccgcctccagtctccgcccaactcaaaaccctagcaaccgcgcctccatccctacccgaattccaatccaggtccgatcccccggtggcgaggacacccggcgccgattcgtccccgcagatcgaccgggcaggacatatttgggttcggggtccgctcgagtcgcctcgccggggtccaccgcggcggtcagggggtatggtgggcggcgggaggcggggcggagcggcggaggaggtcaagctttacaccggcaacgtgttcgcggcgctcgagtccctcaagaagaagaagaagaagggtgacaaaggcaaggcggtcgggaggaggacggcgagggggccgctgaaccctgggcaaacaggcgagcgagtacgccgactgcgaggagtaaacttgtgtcatctcgcgcggggccaacccgaggaccacgcacatcctcgccggcgagacggtggaggtgcgcaggggagacgtaggtggtggctgcacgaaggtggttttcagcattgagccgttggcattgagcgaccggcagcagcccgcgtcttcgtcttcgtcgccggcggcacccgccagagtcgtcgtgtccggtcgttgctgctgctgcatgaagaggctgctggaggaccgggacatcttcatctacctgggcaagaaggccttctgcagcgacgagtgcaggaacgggttcactatggaccgtttggctcgaattgtcttgagcccaaggaaatctgggcctttttaatcgtcgtcacctagctcgcggatggtccgcacacagtttccaccgtcagtatcgcattggagtgaaacaacacccatccttgccaccgattaggaacttaggaatggactcgccggtgcctgctacgctcgcccgcgcgccagcgagatcgcaagcgcgggcgggcgaggaggcttgcgcggatactcggcaggatgctccggcggaagcggagccacctccccgtcggccacccgcgttctacagctccgtgtttgcgtagatcgaagagatcgggtggaagcagctggtgagcgccacaggagacggagtgtcctgtctcaccttccgcgtcgtggatgaaccaggacagatgcatttactggagatcacactgcccatgggctatcccgaaagtcctccttcaatctctgcagttagtctctatcctgatatttttattatactttgccagggatgaactaggcatgtttttgattatagcccatatgtagccgccagggatgaactaggcctgtttttattatactttgcagttgcatgaaatttcagaaccataaccatatgggctataattgaacttgtctcattaacaggacgtaccatatctcccaaaaatacattggtcaaaaaactcaagactgaaagatgttatttgccatgtctcattaacaggacgtaccatatactcacatatttcctgcattgcattgtacacattttcttatatattaacgagtgcaggaacgagttcatcgaggaggcggcggaggaggagctcatgattctagatcctgctcgaaatctttgatcaagatttgttagttgtcgtggcaaaagtagagagtgtaatatttgcccgcaatattttgcttctaccttcaacttggggactacttggctgggagagtgagtgggggaaggacaaaggaaatgcctctcattcaagttttttgctgtaaggagaggtcgtcccggtttggccaaccagtgcaatggtcgagccagccaatttccgtggtttgttgagctccattttggctactgtcatattagctcttcggcatcaatttccgggaggaggatggcgagggggccgcgcagcggcaagagccaccgcagaaggagctattctcagccttctcagccttttccagtttattttattttttatttagtagcatttcgttaattccagttctatttgttacaatgattccagttcgttcttgtagcaatagctggctctggctgaattttatgatctatcaatttaatgtcatcatcatgattaatgtggacttatctagactgtttttggatagagtagtagttagtgatttctgatccgactattgtcgctgcaatctttcatgttctttttatgtagtctcactttgctcctttttcattaatggtttattcgtggacattttcaacttctaccatcaaaccttctgatgttggtactttgtgttctattcaattattttacccataaaagaacttgggattattttataccttttatctctactactacttaagtgtctattgtaggcgtccacaaaggcggatggtgcacggttctgccggttccgcatcccgccagattgggacgaattcggcatcggctccaccaaaggctccacggatttggcatcagctccacagattttcggtacccatgctttgtttagccagtgattttgggaaatcattatccagtaattgtcaatttcggcgaggttttcattatcataagagaactgcatcttcttttcattatcataagggtttagggttgcctggctacggtcgatagtcatctatagccttgttttccgttttgcattctgtctggttgtgtatatatcttatgaacacgatttttggatgaacacattctatctgttttgctaggtttagaaatcatagaagtgccggtcaatgattttggcaaaccattatccaacaattgttgtaggattacgatcgatagtcatatgttttttctgttttgctaggtttctgaaatactgccaatagaaatcatagcagtgcattggacttaattaaagtatagaaatgaacctcatagcagtagcactaatggcattgctctctgtagcaatagaaatccccctaaccctcccacccacacaagttgcaattgccctcttaaatctattttttggtggaacaactaaattgacattgaagaagttttttggagtgtgcccgttctgcatttagaagacttctgtaagatcattcttctctttgttttttttcatttagcaacgtatgttggttttatgattttcatggaccacaaaaatagttatgtattctatttcatacattcatgtctatataacaatttatttgaagggcatttacctgtgtactgagagttttataattattctggttgtggaaataacttcaattgtaatcatcctgtaatccctggatttatagaggattgcttgagatactgggtaacagaaatgcatgtttatggtgttcgttttgaccttgcattacatctacaatgaccagaggatgcaggtggttcgaagttctatgatcataagacgcattcaggtcgatctcactcttcatgttcgtgctcgctgcgcagaacgccactgcagcaccgatggaattgtacggtgtcatcaggctcgactaaatctagatgggatggactctacttgtgttgaaggaaaggaagtatgtgcttggcttgcgaggagggggcatatttctgttcaacttttcttacgggtcatgttacttgtcatctcagattacacaactttaggtatttctgtctttgtgagaaaagtaccaaaatagtttcacatgtgtttaatttgaatattttgtgtgccgttgcaacgcacgggcacatacctagttatatttataattttagatacataattagacaaataatttcatat

SEQ ID NO: 215294 - DNA, 3065 bp, Zea Mays
cccacccccaccaatctcgctctgtgacccctccccgcgcggcggtcgcggtcatcccgctgtcgacgctacttcggcaagatgagcttgcttgggacggggcttcagcctcggcctcgacccgcgtcaggtgaaggctgcggcacgcgtcccctcctccgcctccagtctccgcccaactcaaaaccctagcaaccgcgcctccatccctacccgaattccaatccaggtccgatcccccggtggcgaggacacccggcgccgattcgtccccgcagatcgaccgggcaggacatatttgggttcggggtccgctcgagtcgcctcgccggggtccaccgcggcggtcagggggtatggtgggcggcgggaggcggggcggagcggcggaggaggtcaagctttacaccggcaacgtgttcgcggcgctcgagtccctcaagaagaagaagaagaagggtgacaaaggcaaggcggtcgggaggaggacggcgagggggccgctgaaccctgggcaaacaggcgagcgagtacgccgactgcgaggagtaaacttgtgtcatctcgcgcggggccaacccgaggaccacgcacatcctcgccggcgagacggtggaggtgcgcaggggagacgtaggtggtggctgcacgaaggtggttttcagcattgagccgttggcattgagcgaccggcagcagcccgcgtcttcgtcttcgtcgccggcggcacccgccagagtcgtcgtgtccggtcgttgctgctgctgcatgaagaggctgctggaggaccgggacatcttcatctacctgggcaagaaggccttctgcagcgacgagtgcaggaacgggttcactatggaccgtttggctcgaattgtcttgagcccaaggaaatctgggcctttttaatcgtcgtcacctagctcgcggatggtccgcacacagtttccaccgtcagtatcgcattggagtgaaacaacacccatccttgccaccgattaggaacttaggaatggactcgccggtgcctgctacgctcgcccgcgcgccagcgagatcgcaagcgcgggcgggcgaggaggcttgcgcggatactcggcaggatgctccggcggaagcggagccacctccccgtcggccacccgcgttctacagctccgtgtttgcgtagatcgaagagatcgggtggaagcagctggtgagcgccacaggagacggagtgtcctgtctcaccttccgcgtcgtggatgaaccaggacagatgcatttactggagatcacactgcccatgggctatcccgaaagtcctccttcaatctctgcagttagtctctatcctgatatttttattatactttgccagggatgaactaggcatgtttttgattatagcccatatgtagccgccagggatgaactaggcctgtttttattatactttgcagttgcatgaaatttcagaaccataaccatatgggctataattgaacttgtctcattaacaggacgtaccatatctcccaaaaatacattggtcaaaaaactcaagactgaaagatgttatttgccatgtctcattaacaggacgtaccatatactcacatatttcctgcattgcattgtacacattttcttatatattaacgagtgcaggaacgagttcatcgaggaggcggcggaggaggagctcatgattctagatcctgctcgaaatctttgatcaagatttgttagttgtcgtggcaaaagtagagagtgtaatatttgcccgcaatattttgcttctaccttcaacttggggactacttggctgggagagtgagtgggggaaggacaaaggaaatgcctctcattcaagttttttgctgtaaggagaggtcgtcccggtttggccaaccagtgcaatggtcgagccagccaatttccgtggtttgttgagctccattttggctactgtcatattagctcttcggcatcaatttccgggaggaggatggcgagggggccgcgcagcggcaagagccaccgcagaaggagctattctcagccttctcagccttttccagtttattttattttttatttagtagcatttcgttaattccagttctatttgttacaatgattccagttcgttcttgtagcaatagctggctctggctgaattttatgatctatcaatttaatgtcatcatcatgattaatgtggacttatctagactgtttttggatagagtagtagttagtgatttctgatccgactattgtcgctgcaatctttcatgttctttttatgtagtctcactttgctcctttttcattaatggtttattcgtggacattttcaacttctaccatcaaaccttctgatgttggtactttgtgttctattcaattattttacccataaaagaacttgggattattttataccttttatctctactactacttaagtgtctattgtaggcgtccacaaaggcggatggtgcacggttctgccggttccgcatcccgccagattgggacgaattcggcatcggctccaccaaaggctccacggatttggcatcagctccacagattttcgatactgggtaacagaaatgcatgtttatggtgttcgttttgaccttgcattacatctacaatgaccagaggatgcaggtggttcgaagttctatgatcataagacgcattcaggtcgatctcactcttcatgttcgtgctcgctgcgcagaacgccactgcagcaccgatggaattgtacggtgtcatcaggctcgactaaatctagatgggatggactctacttgtgttgaaggaaaggaagtatgtgcttggcttgcgaggagggggcatatttctgttcaacttttcttacgggtcatgttacttgtcatctcagattacacaactttaggtatttctgtctttgtgagaaaagtaccaaaatagtttcacatgtgtttaatttgaatattttgtgtgccgttgcaacgcacgggcacatacctagttatatttataattttagatacataattagacaaataatttcatat

SEQ ID NO: 215295 - DNA, 2634 bp, Zea Mays
accaatctcgctctgtgacccctccccgcgcggcggtcgcggtcatcccgctgtcgacgctacttcggcaagatgagcttgcttgggacggggcttcagcctcggcctcgacccgcgtcaggtgaaggctgcggcacgcgtcccctcctccgcctccagtctccgcccaactcaaaaccctagcaaccgcgcctccatccctacccgaattccaatccaggtccgatcccccggtggcgaggacacccggcgccgattcgtccccgcagatcgaccgggcaggacatatttgggttcggggtccgctcgagtcgcctcgccggggtccaccgcggcggtcagggggtatggtgggcggcgggaggcggggcggagcggcggaggaggtcaagctttacaccggcaacgtgttcgcggcgctcgagtccctcaagaagaagaagaagaagggtgacaaaggcaaggcggtcgggaggaggacggcgagggggccgctgaaccctgggcaaacaggcgagcgagtacgccgactgcgaggagtaaacttgtgtcatctcgcgcggggccaacccgaggaccacgcacatcctcgccggcgagacggtggaggtgcgcaggggagacgtaggtggtggctgcacgaaggtggttttcagcattgagccgttggcattgagcgaccggcagcagcccgcgtcttcgtcttcgtcgccggcggcacccgccagagtcgtcgtgtccggtcgttgctgctgctgcatgaagaggctgctggaggaccgggacatcttcatctacctgggcaagaaggccttctgcagcgacgagtgcaggaacgggttcactatggaccgtttggctcgaattgtcttgagcccaaggaaatctgggcctttttaatcgtcgtcacctagctcgcggatggtccgcacacagtttccaccgtcagtatcgcattggagtgaaacaacacccatccttgccaccgattaggaacttaggaatggactcgccggtgcctgctacgctcgcccgcgcgccagcgagatcgcaagcgcgggcgggcgaggaggcttgcgcggatactcggcaggatgctccggcggaagcggagccacctccccgtcggccacccgcgttctacagctccgtgtttgcgtagatcgaagagatcgggtggaagcagctggtgagcgccacaggagacggagtgtcctgtctcaccttccgcgtcgtggatgaaccaggacagatgcatttactggagatcacactgcccatgggctatcccgaaagtcctccttcaatctctgcagttagtctctatcctgatatttttattatactttgccagggatgaactaggcatgtttttgattatagcccatatgtagccgccagggatgaactaggcctgtttttattatactttgcagttgcatgaaatttcagaaccataaccatatgggctataattgaacttgtctcattaacaggacgtaccatatctcccaaaaatacattggtcaaaaaactcaagactgaaagatgttatttgccatgtctcattaacaggacgtaccatatactcacatatttcctgcattgcattgtacacattttcttatatattaacgagtgcaggaacgagttcatcgaggaggcggcggaggaggagctcatgattctagatcctgctcgaaatctttgatcaagatttgttagttgtcgtggcaaaagtagagagtgtaatatttgcccgcaatattttgcttctaccttcaacttggggactacttggctgggagagtgagtgggggaaggacaaaggaaatgcctctcattcaagttttttgctgtaaggagaggtcgtcccggtttggccaaccagtgcaatggtcgagccagccaatttccgtggtttgttgagctccattttggctactgtcatattagctcttcggcatcaatttccgggaggaggatggcgagggggccgcgcagcggcaagagccaccgcagaaggagctattctcagccttctcagccttttccagtttattttattttttatttagtagcatttcgttaattccagttctatttgttacaatgattccagttcgttcttgtagcaatagctggctctggctgaattttatgatctatcaatttaatgtcatcatcatgattaatgtggacttatctagactgtttttggatagagtagtagttagtgatttctgatccgactattgtcgctgcaatctttcatgttctttttatgtagtctcactttgctcctttttcattaatggtttattcgtggacattttcaacttctaccatcaaaccttctgatgttggtactttgtgttctattcaattattttacccataaaagaacttgggattattttataccttttatctctactactacttaagtgtctattgtaggcgtccacaaaggcggatggtgcacggttctgccggttccgcatcccgccagattgggacgaattcggcatcggctccaccaaaggctccacggatttggcatcagctccacagattttcgggcatttacctgtgtactgagagttttataattattctggttgtggaaataac

SEQ ID NO: 215296 - DNA, 2279 bp, Zea Mays
ctcatcagggaggcttgtctctgtgggctggttctaagcgtaagcgggccggccagcacttatgccgccgccaatcccttcccgtgctccgcaaccgctgagtgagaagaagagatggccggcaagggcgatggcccggctatcggcatcgatctcggcacgacgtactcttgcgtcggcgtgtggcagcacgaccgcgtcgagatcattgccaacgaccagggtaaccgcaccacgccctcgtacgtcgccttcaccgactccgagcgcctcatcggagatgcggccaagaaccaggtcgccatgaaccccatcaacaccgtctttgatgccaagcgtctcatcggcaggaggttcagtgatgcgtctgtccagagtgatatcaagttgtggcccttcaaggtcatttctgggcctggtgagaagccaatgattgttgtccagcacaagggtgaggagaagcagtttgcagctgaagagatctcctctatggttcttatcaagatgcgtgagattgctgaagcttaccttggtagcacgatcaagaatgctgtggtcacagtccctgcctacttcaatgactcacagaggcaggccacaaaggatgctggggtgattgctggccttaatgtgctgcgtatcatcaacgagccaacagctgcagctatcgcctatggtcttgacaagaaggctaccagtgtcggtgagaagaatgtcctcatctttgatcttggaggtggtacctttgatgtctccctcctcaccattgaggaaggaatctttgaggtcaaggccacagctggtgacacccatcttggtggtgaggactttgacaacaggatggtcaaccacttcgtccaggagttcaagaggaagaacaagaaggatatcactggcaaccccagggctctccggaggctgaggaccgcttgtgagagggcgaagaggactctgtcttccactgcccagaccacgattgagattgactcgctgtatgagggcatcgacttctactccaccatcacccgtgccaggtttgaggagctcaacatggacctgttcaggaagtgcatggagcctgttgagaagtgcctgagggatgccaagatgctccaggacttcttcaacggcaaggagctgtgcaagaacatcaaccccgatgaggctgtcgcctatggtgctgctgtccaggctgccatcctgagcggtgagggcaatgagaaggtgcaggacctgcttctgctggacgtcacccctctgtccctgggtctggagactgctggaggagttatgacagtgctgatcccgaggaacaccaccatccccaccaagaaggagcaggtattctccacctactcggacaaccagcccggtgtcctgatccaggtctacgagggtgagaggacccggacacgcgacaacaacctgctgggcaagttcgagctctccggcatcccccctgcaccccgtggtgtgccacagatcaccgtgtgctttgacatcgacgccaacggcatcctgaacgtgtctgccgaggacaagacaacggggcagaagaacaagatcacaatcaccaacgacaagggccgtctctccaaggaggagatcgagaagatggttcaggacgctgagaagtacaagtctgaggatgaggagcacaagaagaaggtggaggccaagaactcgctggagaactactcctacaacatgcgcaacacgatcaaggacgagaagattgcgtccaagctgccggccgatgacaagaagaagatcgaggacgccatcgacgcggccatcagctggctggacgccaaccagctcgccgaggcggacgagttcgaggacaagatgaaggagctggagagcctctgcaaccccatcatcgccaagatgtaccagggcgcgggtgaagacatgggcggcgctggcggcatggacgaggacgcccctgccggcagcggcggccctggccccaagatcgaggaggtggactaagcggtttgttgtcagtcttgagtgtgctgcagttgctggctggcccagttgctgccgagagttatcgtcagttggtgcggtgtgtccgcttaaactttatttgtggttggttggtacttttgtggtggttatttttttggacctcgtgatagtcggtcggttcaatgttatcgcggctactggcaaaccttaagtgatacggtattcttcttttcgactaaaatagaataaaacatagagactaaaacttagtctctagaaaccaaactgttacaagatctaag

SEQ ID NO: 215297 - DNA, 2229 bp, Zea Mays
  misc_feature (2228)..(2229): n is a, c, g, or t
atggtcgcgattgttggatttggtgatagatggcggctacggttgagccatgagattatattccaggcagtttggaatcttctctccattctccgcacaggtgatcgtgaagcctacagacaattctttctagatgctatggttgcggtagaagacacacctgggccttttagtgagctcccagccagttgccgacctaagaatggacctggcgtgctggttgatctgacaggcgatgcaagatggcgcccatttgccacttcgttgattaagctagttaacaaatgtcttacagacgggaccttgtatgtcgatgggctcgttaccatgccatttgtttctgctgcttgttctatcctctgctatggtgatggttctctgcacaaggtttgttttgatttcgcacgtattgttgccacggtaatgactcctgagattcttcctctagaaagcatcattcgttcaatcacatgcattttgagccaagaaattagcgaactctctgatatcagagatgcagattatgacttttcaatgggagcgtgcctttgtgcactgcattcttcatgtcctgactatattgttgaatctacagctgctgatattgttaatgttctcaaaagagcagtaaagaccagcaaaagtgcagaacttcaggttgcactgtacactgcatacaagagaataattgaactctgctctgtacaagtatggaaaccagaaatccttctgaagttgctcagcttgccaaaaccttgcagcaaactgatccaatgtattcgagcagttattggcaaatttggtcaaacctttttcactctggatgatggtaacagtcaaagcagtcctcaggcaagatctgaaaaaaatgagttgcaaaaagctggccataaaagaataccacagaacgaggaaagcaattctgccaaacgtcagaagataactgaatcaggattttctgctgccactggatttgaaaaagaagattatggctatgcttttctacagtctttaaattcactgattaattgcctgtcaccagacaatcatgagtcttatccattagaccctgatgttgctatagaagtgattagtctgctgtgtatttcattatgtgtttatccgaagacaagtttgtttaccagagtttctaagcaagttctttcctggatttcttggattcataaacagacagtccagagaaacctgtattcctttgatgcatcactgtattttgaagctcttcatactgtaatgcttctccaattcaatcttcctggacacacgaaactgcttgaagatgactatcagttgattggcgatggtacacattttgttaatccaatatatgctgacctcatcagcatgttgaaactgatatgggatgttggtcatgatgtcactgaaacaagttcaaactacaagatagagtatcttttgatgcaagtctttgctaagcttggcaatagactgaattctggatgtgatcttgaattctttgatttggctatctgtaatggaactgctgagattaaaaatgaagcaattatatcactacccataattgtgctgtattctggtcctaggattcttggagcgatgtttaagaaacttgagtcagtggatgctttaggactcgagaacgtggggaaacatattgccttttcacttggttttctatcttgcttaaatggaaccacttattacactgacaatgtggggaaggggaaccattgcaagctattcttggacaagcactatgaacaacctgtgtcaacattagatcttctcttgagaggtttctgttgtcctcaatgtgatatcaggaatagaactatccacaatgaagaacaaatttctatagtgaacattgcaccattacaagttgagaatgcggacttcaatattaacatctccaaggcccacactctccttttcaaatttctctacgcagggacttctgaggaatttatagtttctttggttgaagcgtcttctacttgagatgagaactcaatggaatcagtgttttgaatttctactgtgtcatgaaatgaaagctgtcagggaagcattttctggtgtagtctactgcttcttggaagacagtgttatggatattttgttttctggtggactgggaatgaatggagggtctaaagaacttcaattcatggataagataaaatgtgctttcactgaagctgaagatcctcagattcttttgnn

SEQ ID NO: 215298 - DNA, 2245 bp, Zea Mays
  misc_feature (2244)..(2245): n is a, c, g, or t
atggtcgcgattgttggatttggtgatagatggcggctacggttgagccatgagattatattccaggcagtttggaatcttctctccattctccgcacaggtgatcgtgaagcctacagacaattctttctagatgctatggttgcggtagaagacgtgctatatgtggcatcattgcatgacagaagtcttagtggtgtgtctcctggaagatgtttagttaaatgcctatgtggatccttggacatattagacacacctgggccttttagtgagctcccagccagttgccgacctaagaatggacctggcgtgctggttgatctgacaggcgatgcaagatggcgcccatttgccacttcgttgattaagctagttaacaaatgtcttacagacgggaccttgtatgtcgatgggctcgttaccatgccatttgtttctgctgcttgttctatcctctgctatggtgatggttctctgcacaaggtttgttttgatttcgcacgtattgttgccacggtaatgactcctgagattcttcctctagaaagcatcattcgttcaatcacatgcattttgagccaagaaattagcgaactctctgatatcagctgctgatattgttaatgttctcaaaagagcagtaaagaccagcaaaagtgcagaacttcaggttgcactgtacactgcatacaagagaataattgaactctgctctgtacaagtatggaaaccagaaatccttctgaagttgctcagcttgccaaaaccttgcagcaaactgatccaatgtattcgagcagttattggcaaatttggtcaaacctttttcactctggatgatggtaacagtcaaagcagtcctcaggcaagatctgaaaaaaatgagttgcaaaaagctggccataaaagaataccacagaacgaggaaagcaattctgccaaacgtcagaagataactgaatcaggattttctgctgccactggatttgaaaaagaagattatggctatgcttttctacagtctttaaattcactgattaattgcctgtcaccagacaatcatgagtcttatccattagaccctgatgttgctatagaagtgattagtctgctgtgtatttcattatgtgtttatccgaagacaagtttgtttaccagagtttctaagcaagttctttcctggatttcttggattcataaacagacagtccagagaaacctgtattcctttgatgcatcactgtattttgaagctcttcatactgtaatgcttctccaattcaatcttcctggacacacgaaactgcttgaagatgactatcagttgattggcgatggtacacattttgttaatccaatatatgctgacctcatcagcatgttgaaactgatatgggatgttggtcatgatgtcactgaaacaagttcaaactacaagatagagtatcttttgatgcaagtctttgctaagcttggcaatagactgaattctggatgtgatcttgaattctttgatttggctatctgtaatggaactgctgagattaaaaatgaagcaattatatcactacccataattgtgctgtattctggtcctaggattcttggagcgatgtttaagaaacttgagtcagtggatgctttaggactcgagaacgtggggaaacatattgccttttcacttggttttctatcttgcttaaatggaaccacttattacactgacaatgtggggaaggggaaccattgcaagctattcttggacaagcactatgaacaacctgtgtcaacattagatcttctcttgagaggtttctgttgtcctcaatgtgatatcaggaatagaactatccacaatgaagaacaaatttctatagtgaacattgcaccattacaagttgagaatgcggacttcaatattaacatctccaaggcccacactctccttttcaaatttctctacgcagggacttctgaggaatttatagtttctttggttgaagcgtcttctacttgagatgagaactcaatggaatcagtgttttgaatttctactgtgtcatgaaatgaaagctgtcagggaagcattttctggtgtagtctactgcttcttggaagacagtgttatggatattttgttttctggtggactgggaatgaatggagggtctaaagaacttcaattcatggataagataaaatgtgctttcactgaagctgaagatcctcagattcttttgnn

SEQ ID NO: 215299 - DNA, 2257 bp, Zea Mays
  misc_feature (2256)..(2257): n is a, c, g, or t
atggtcgcgattgttggatttggtgatagatggcggctacggttgagccatgagattatattccaggcagtttggaatcttctctccattctccgcacaggtgatcgtgaagcctacagacaattctttctagatgctatggttgcggtagaagacacacctgggccttttagtgagctcccagccagttgccgacctaagaatggacctggcgtgctggttgatctgacaggcgatgcaagatggcgcccatttgccacttcgttgattaagctagttaacaaatgtcttacagacgggaccttgtatgtcgatgggctcgttaccatgccatttgtttctgctgcttgttctatcctctgctatggtgatggttctctgcacaaggtttgttttgatttcgcacgtattgttgccacggtaatgactcctgagattcttcctctagaaagcatcattcgttcaatcacatgcattttgagccaagaaattagcgaactctctgatatcagagatgcagattatgacttttcaatgggagcgtgcctttgtgcactgcattcttcatgtcctgactatattgttgaatctacagctgctgatattgttaatgttctcaaaagagcagtaaagaccagcaaaagtgcagaacttcaggttgcactgtacactgcatacaagagaataattgaactctgctctgtacaagtatggaaaccagaaatccttctgaagttgctcagcttgccaaaaccttgcagcaaactgatccaatgtattcgagcagttattggcaaatttggtcaaacctttttcactctggatgatggtaacagtcaaagcagtcctcaggcaagatctgaaaaaaatgagttgcaaaaagctggccataaaagaataccacagaacgaggaaagcaattctgccaaacgtcagaagataactgaatcaggattttctgctgccactggatttgaaaaagaagattatggctatgcttttctacagtctttaaattcactgattaattgcctgtcaccagacaatcatgagtcttatccattagaccctgatgttgctatagaagtgattagtctgctgtgtatttcattatgtgtttatccgaagacaagtttgtttaccagagtttctaagcaagttctttcctggatttcttggattcataaacagtccagagaaacctgtattcctttgatgcatcactgtattttgaagctcttcatactgtaatgcttctccaattcaatcttcctggacacacgaaactgcttgaagatgactatcagttgattggcgatggtacacattttgttaatccaatatatgctgacctcatcagcatgttgaaactgatatgggatgttggtcatgatgtcactgaaacaagttcaaactacaagatagagtatcttttgatgcaagtctttgctaagcttggcaatagactgaattctggatgtgatcttgaattctttgatttggctatctgtaatggaactgctgagattaaaaatgaagcaattatatcactacccataattgtgctgtattctggtcctaggattcttggagcgatgtttaagaaacttgagtcagtggatgctttaggactcgagaacgtggggaaacatattgccttttcacttggttttctatcttgcttaaatggaaccacttattacactgacaatgtggggaaggggaaccattgcaagctattcttggacaagcactatgaacaacctgtgtcaacattagatcttctcttgagaggtttctgttgtcctcaatgtgatatcaggaatagaactatccacaatgaagaacaaatttctatagtgaacattgcaccattacaagttgagaatgcggacttcaatattaacatctccaaggcccacactctccttttcaaatttctctacgcagggacttctgaggaatttatagtttctttggttgaagtattgccacggctattgaggcattctaacaggcgtcttctacttgagatgagaactcaatggaatcagtgttttgaatttctactgtgtcatgaaatgaaagctgtcagggaagcattttctggtgtagtctactgcttcttggaagacagtgttatggatattttgttttctggtggactgggaatgaatggagggtctaaagaacttcaattcatggataagataaaatgtgctttcactgaagctgaagatcctcagattcttttgnn

SEQ ID NO: 215300 - DNA, 2644 bp, Zea Mays
cccagctccgcctcctccgctcgtccgctcatccgccgtcttccgttcctccactgcatggcctccaccctccgcccgagcacctcggctcctccatcctgcggccccacgcctcggctgctccgctcgtccagccttcggccccgcgctcaccgcggccgccgtatctcccgtcatctggccatccacaacggtgatgtggagcacgtggtatgtcgtgaagggctaaaggcagtttcatctctggcgtcacggtgagggaatgccacaacgtggcggacgccaccgccgtggtgctccccttgcgacgcctaagctacttcttttgcagggtttggtacaagtggagtggcccatatgttgtgcggaggagcactggtgaagcctaagaacccttatgtcgatgggcgtggtctcaagggaggtgttgtcagcatgcgagaggctctgcttcatttgcccgtcactgcggacgaggtcccgccatccggtcaagcgctacaagaaattgcttgcagaaatcttccctcggacacaggatgaagaaccaaatgatcgcaagatagggaaactgtgcgaatatatttcaaggaatcctatgcgtgttccaaagattacattttacttagagcaaaagtgctacaaggaattaagggctgagcgctatggttcagtgaaagttgttattgcaatctatcgaaaggtgatatgttcttgtcaggagcaattgccactttttgccaacagcttgctaacaattgtagagacattattggagcaaaatagacaggatgacttgcggaaattggcatgtcaaacactttttgactttataaataatcaggttgacagtacttacatgttcaatttagaaaaccagattcctaaactatgtcatctggcccaagagatgggtgaaaaggagaagatatgcattcttcatgcagctgggctacaagctctttcatctatgatttggtttatgggtgagcattcccatatgtctgcagagcttgataatgttgtttctgcagttctggaaaattatgagagcccatatgcaaatgctgataatgatgccgctattgaggatagacgaattcagtgggtggatgaagtgctcaaagctgaaggtcatgaacctcctgctgttaccattttgacaagggttccttcatggaaagttattagaactgttcacggtgaattaagtttgacaatagaagaatcaacaagtccaaatttttggtcagggatttgtctacataaccttgctagaatatccagggaagcaacaacagtgcgacgagttctggaagttatatttcgttattttgataataacaatctgtggtcaccttctaaaggatttgcactgtgtgtcctactggatatgcagattgtcatggagaaatctggacagaatgctcatatattgttgtctatgttagtcaagcatcttgaacacaagaatgtattgaaacaaccagatatgaatctagatatcattgaagttacttcacgccttgctgggcactccaaagctcagtcttctacagcactaatggcttcaataagtgatatggtcaggcatatgggtaaaagcatgcaatccttggccagcgatgcaggtcctggagacaacatggtcaaatggaatagcagatatgggaaagctgtagatgaatgtcttgttcaattgtctagaaaggtcggtgatgctggacctatccttgatacattagctgtagtgctggaaaacatttcaagttctatgattgttgcacggtctactatctttgcagcatatcgtactgctcaaatagttgcatcattgccaaacttgtcacatcagagcaaagcatttcctgaggcattgtttcaccaactgcttttagcaatggtctatccggactgtgggacacatttaggagcacatcggattttctctgttgttcttgttccctctgctgtcgctccgtgctcattttcagacacttcacggacaaggaagattgatctccgaaggacattatctagaacaacatcagtgttttcatcttctgctgctttgtttgggaaacttaaaagagacatgctttcatttcgtgaaagtccgctccatgataatacaaagctactacccatcagtgaggatgcagatgagatcagcgcaaatgatgcaaaactattcaagtcacagactattcaaaggatggctagtacaaaagatatttctcttccctcttccacagatgcaagtactttgagtgaacaaactccaaatcaggaaaaggatgctgtcacccttatgctcagtgttcgtcaggcaaatcttcttctttcctcgttatggactcaggcactgtcacctgaaaatgttccacggaattatgaagcaatttctcatacttacagcttgatgctattgttttctagagccaaggtgccgacgttttggttggtagctttcagcttgctttttcattaagaagtgtttcgttacaagcaggttttcttccaccttcacgcaggcgctctctttttactttggcaacttcaatgcttgtgtttttctcgaaagctttcaacgttccagcgctcattccagttgtgaagcatgtgttgacagaaagtacagtaa

SEQ ID NO: 215301 - DNA, 2638 bp, Zea Mays
ccgaccccagctccgcctcctccgctcgtccgctcatccgccgtcttccgttcctccactgcatggcctccaccctccgcccgagcacctcggctcctccatcctgcggccccacgcctcggctgctccgctcgtccagccttcggccccgcgctcaccgcggccgccgtatctcccgtcatctggccatccacaacggtgatgtggagcacgtggtatgtcgtgaagggctaaaggcagtttcatctctggcgtcacggtgagggaatgccacaacgtggcggacgccaccgccgtggtgctccccttgcgacgcctaagctacttcttttgcagggtttggtacaagtggagtggcccatatgttgtgcggaggagcactggtgaagcctaagaacccttatgtcgatgggcgtggtctcaagggaggtgttgtcagcatgcgagaggctctgcttcatttgcccgtcactgcggacgaggtcccgccatccggtcaagcgctacaagaaattgcttgcagaaatcttccctcggacacaggatgaagaaccaaatgatcgcaagatagggaaactgtgcgaatatatttcaaggaatcctatgcgtgttccaaagattacattttacttagagcaaaagtgctacaaggaattaagggctgagcgctatggttcagtgaaagttgttattgcaatctatcgaaaggtgatatgttcttgtcaggagcaattgccactttttgccaacagcttgctaacaattgtagagacattattggagcaaaatagacaggatgacttgcggaaattggcatgtcaaacactttttgactttataaataatcaggttgacagtacttacatgttcaatttagaaaaccagattcctaaactatgtcatctggcccaagagatgggtgaaaaggagaagatatgcattcttcatgcagctgggctacaagctctttcatctatgatttggtttatgggtgagcattcccatatgtctgcagagcttgataatttctggaaaattatgagagcccatatgcaaatgctgataatgatgccgctattgaggatagacgaattcagtgggtggatgaagtgctcaaagctgaaggtcatgaacctcctgctgttaccattttgacaagggttccttcatggaaagttattagaactgttcacggtgaattaagtttgacaatagaagaatcaacaagtccaaatttttggtcagggatttgtctacataaccttgctagaatatccagggaagcaacaacagtgcgacgagttctggaagttatatttcgttattttgataataacaatctgtggtcaccttctaaaggatttgcactgtgtgtcctactggatatgcagattgtcatggagaaatctgaatgctcatatattgttgtctatgttagtcaagcatcttgaacacaagaatgtattgaaacaaccagatatgaatctagatatcattgaagttacttcacgccttgctgggcactccaaagctcagtcttctacagcactaatggcttcaataagtgatatggtcaggcatatgggtaaaagcatgcaatccttggccagcgatgcaggtcctggagacaacatggtcaaatggaatagcagatatgggaaagctgtagatgaatgtcttgttcaattgtctagaaaggtcggtgatgctggacctatccttgatacattagctgtagtgctggaaaacatttcaagttctatgattgttgcacggtctactatctttgcagcatatcgtactgctcaaatagttgcatcattgccaaacttgtcacatcagagcaaagcatttcctgaggcattgtttcaccaactgcttttagcaatggtctatccggactgtgggacacatttaggagcacatcggattttctctgttgttcttgttccctctgctgtcgctccgtgctcattttcagacacttcacggacaaggaagattgatctccgaaggacattatctagaacaacatcagtgttttcatcttctgctgctttgtttgggaaacttaaaagagacatgctttcatttcgtgaaagtccgctccatgataatacaaagctactacccatcagtgaggatgcagatgagatcagcgcaaatgatgcaaaactattcaagtcacagactattcaaaggatggctagtacaaaagatatttctcttccctcttccacagatgcaagtactttgagtgaacaaactccaaatcaggaaaaggatgctgtcacccttatgctcagtgttcgtcaggcaaatcttcttctttcctcgttatggactcaggcactgtcacctgaaaatgttccacggaattatgaagcaatttctcatacttacagcttgatgctattgttttctagagccaagggctcaggtgccgacgttttggttggtagctttcagcttgctttttcattaagaagtgtttcgttacaagcaggttttcttccaccttcacgcaggcgctctctttttactttggcaacttcaatgcttgtgtttttctcgaaagctttcaacgttccagcgctcattccagttgtgaagcatgtgttgacagaaagtacagtaa

SEQ ID NO: 215302 - DNA, 5266 bp, Zea Mays
ccaccctccttcccaccgccgccgcaatcaacgcgctcctcccccacgtggatccctccaccctcctccccaccgccgccgctcgaccgcggtttcgtcgcactccttccttcgaaagcgctcctttccatcctcgattcctccttccttccatgtcgctccttccttcgacggccagcctcatccggtcattcctcctcgctgtgccccctcccccgtattcaaccacctcttcctcctgcggatccaccaccgccgtcctcgcccaacgtctccttgacgcatatgcccgcagcggctccctcgcgtccccaatgttgagtctggcctgtatggaaggagtgcgggcgtgggtggagtgtgtagagaaatccaagcgaaaccccgtgagagcgaggtgacggcagacggaggcgagtgggtgagctgcgggcgagagacgaggtagcgggctagcggatggcgtcgctggttgtagtggccgcagcgctgctggtggcggcgctggtggcattctgcggcacggacccgctctggacggggttcgagtcccacctcgtcgaccttcccggggttcgagtcccacctcgtcgacctccccgatcccgccgagatgtcgacgcacgcggacgaacgggagtggctccgcggagccgaggtgcaacccctccaaaccggcgttcaaggacggcgccgctcaccagttgtatctggttgtgaagaactaggggtgggagcgcctgtatggcgggcttatgccttctctcatcggcaccgctgcctcccaggagagggcttggcgatgggtctgttgggatgctccagtctctcactgtctactactacttgtaccaaatatctactggactctggatgggcatcgaattttatgctataaacaccgattcccaagcccttattaattcacaagcgcaatatcctctgcaaattggagagcagttgacccacgacttaggtaccggtggaaatccaaatttgggagagcaggctgctgaggaatcaagagaaaccatagccactgccctgagggattcagatcttgttttcataacagctgggatgggagggggtgctgctccaattgttgcccagatatcaaaggaagctggttatcttactgttggtgttgtcacctatccattcaatttcgagggccgtaagcgctctttacaggatctcccatgtgacagatggcttggcaagattatactagagacttgtatttctcagatccatatttggcttaggtatgattcttgtgtcaatgctacatatatttttcctaattattgtaggtacttccatttagccttgcgacaataaatattttgtgcgaaacacatcatctcttcacggttcaatacgatcatcggctatatatcctggctgatcatcgtcaagagcattagtagttgctactgatatatataggtcagctctttgctcttttcacatctatatcaattgcttgccccacaaatgatcagccagggtcaggtaaaccatattgtgtaaccatcactataacactgcaatcattttctaaatagtacttttataaatcacaaatcgaaggtataaatacaaaagtgtagaaaattataatgagaacattacctatataaacaagaaaggaaaaccaatgatgttttccttgttgaagttatttgtggcttttacaatgtcagagaacgtgagcttgttttcatttacttttccttgtggcaccatgatcactccaaatgcaattgcaagaatggccttcttatttcttcctcctgtggataccagaggcacatcggctgaatcgcatcgacgaccgatcataaagccgcacagctttggattccctagaaagctggagttctgaaatgtaccaaattgaccaccggttggaataggcccctctaggtcattgttagaaacgttgaatgtggaaaggaagtgcagattctcgaatgcaactggaattttacccgtgagatcattgctggataaatctagcatccagcaggtttgtgagattgcagatagatgtggggatcggtccggttaagctgttggagctgatatcaagtgaaaggaggccttttaactgaccaatctctgggagaatcagaactgtgaatatgttgctgcttagatttagaattttaggaaaagcaatcggtatccggtacggtttcttcaaagaaattgatgccaagaagaagcgtggtcaggttcttagagctcctcagtatctgaagcgtgtttgttatatttgaaaggctgttgtttgggcaaggcgaatcaggcaagagttgatgacgagcggctaaactaatccaagagttgatgacgaccggcttgttctttcacttgcaacgacttagagtcgggcgacctgcaagatcaaggtgcatggtcgtcgaaggatggcgacggcgtatcctcgttcaggcaaggcgaatcaggcaagcatctatttggaggttggttagttatcccatgtcatcagacatcacgcaggaatcaagtcatccatcaggaagcagccaactctgcctggactaacccagggcaaaggcaaacagcaaactttccaggataagtctctgacttcgttatactttcctgtgtgcaggaggtcttgaagatctggaactgcaggtgcagaatgctattgcagcagttgcagctccacccaaggaaagcaatagtgtcagcagcaacgatcctggtagctcgtcctctgtgatttttccgtctggtccagctgatcaagtccctgttcctgctacctctccagaaattgagccccgttttgcaaaccaaatccctgctgcttcttcggaggttaaggcaccatgcatggcaggtctgttgtttgtaagcgacaggaacgagaggaactttaggttgcctagcccttctgataattgtccatggaacttattcgaatctagccgtagcgcagtcagctttctacaggagtatatgctttccggaatcgtgccactgaagttattcagcatgagatctatggttcttagactgggcatattgctgaataactatagttggtagatggtctcgctacagtagacaggaaaggcaccatgcctggcactggcaggtctgcagcgaacaccgttgtatgtgtatgtatagtatgcacgtgtgcaattcatattagcttaacagcctgtgtaacaaaaacaattacccaacttcccaagatagttaatgcactatatatccaaaacctgatacatgcatcaatttgtcttaaaaagtacattcataaaaatataaatgtataaagagttcatttgtattttaacaaaagtctttggtcaaagccatattctggagaccgtgtcagtgtcctagaccacaaataacattggagggagtaaattatatctcatgtctatcaacgaagttttactttttaggttctattaatgtctaattcttgtaacccctcttttttggtatctcaattgttgcagttaggaaaccttccattacggccttatttctgcagaagtatgacaccaactttcatctattctctaccaccaaagagatggaaaagcaggtcaaagggccatacttcatagctttttgctcctcattgttttaagtgaaagggcgccaactattcaaaatttactctaggtagataattttcattgtcgagttttattttggtatatgtaactttttgtaattgggcctaagcgtattggagcactctaagttaacaggtgcttgaagctgatgatgaaattatacagcttggatgaataaacctttgttgtagtgacataaggagtttcgaaattacaaggaattttaaatttgaatatttttcagtgagatgttgaggttgataattttaatctttgtgcactaatattttgtagaaagtagtttgttcaccgttgcaacgcacgggcatgtacctagtcaagcattaagcacgcgatgaacaacgtccttcccgttatcgcccaacaactagaattccacttctatcatcgaccccataacatcacacaacataacaccataacaacggatctagccataattaccaagcgcacacctcgcatcactggtatttctaacttaatcgtatacgcatacgaagcgtcttattttacgatcataaaaccgatagtaaaaatagcgaatcggctcaccacatcacaattcgatttggtagttgcctgaacaacgacggccttcagctgaagtccttgatcgaacatctggcgagcgtgaccgacgagctaagtctgaggcgaagctcgacgacgagatcgaacaggggatgatgagcgtgagggtttcacaacgaggatgagtgacatcgtggaatcttggtccaacatttaatcgaacacaacggaagcgaggcacagcaggaatggcagtattaagcatgggcacgataagggacgcgctgctgcacgacgcgatgatgaacgacgacaacctatgacggccaaaacggaagacttggtcgaggcggggtccaagcatccagagtttttttttgccgaggctgaacagagaaggatgcacaaatcctaggcacgatggtggccatagccaagcagtgggacgcgactgcgcgcagagaactcggcatggcgagggacgacggaacgctgcgtgcgcgtccagggagcaaggcgcggtcgagaacggacagagggagccgggagaaagaactgcggcgctgcgagcagagcgcaggggagttcgtggctgcgcgcagatgggcgagctggagcgccgcgacgagcgcaggggcgcggcacaagcgagggcgagctgccgcagggagaaagaagctggggaaagggccgcagcgctgggggctcgacgtgccgtgaccagcagagagatgcggcgctgcgcagaggagggagaggaaggagagagagcagccatgggaaagggaggagaactgggcgcgacgcaggcagccaagggagcttcaaggccgagcgccaggaagaatgagcagggcgccgcgacactgggacagggcaccggcgagcagcaagcagagagagaaggcgcggcggtcaggacgaacgtcagggagcttcggctggccatggaaccgagcagtgatgcgccatgggggagaaaccagcgcgcagcagagaagctcggcgaggaagatggggcaggaactcggcgccggcgaggggagcagggtgatgaacgccgaggaagctga

SEQ ID NO: 215303 - DNA, 5544 bp, Zea Mays
ccaccctccttcccaccgccgccgcaatcaacgcgctcctcccccacgtggatccctccaccctcctccccaccgccgccgctcgaccgcggtttcgtcgcactccttccttcgaaagcgctcctttccatcctcgattcctccttccttccatgtcgctccttccttcgacggccagcctcatccggtcattcctcctcgctgtgccccctcccccgtattcaaccacctcttcctcctgcggatccaccaccgccgtcctcgcccaacgtctccttgacgcatatgcccgcagcggctccctcgcgtccccaatgttgagtctggcctgtatggaaggagtgcgggcgtgggtggagtgtgtagagaaatccaagcgaaaccccgtgagagcgaggtgacggcagacggaggcgagtgggtgagctgcgggcgagagacgaggtagcgggctagcggatggcgtcgctggttgtagtggccgcagcgctgctggtggcggcgctggtggcattctgcggcacggacccgctctggacggggttcgagtcccacctcgtcgaccttcccggggttcgagtcccacctcgtcgacctccccgatcccgccgagatgtcgacgcacgcggacgaacgggagtggctccgcggagccgaggtgcaacccctccaaaccggcgttcaaggacggcgccgctcaccagttgtatctggttgtgaagaactaggggtgggagcgcctgtatggcgggcttatgccttctctcatcggcaccgctgcctcccaggagagggcttggcgatgggtctgttgggatgctccagtctctcactgtctactactacttgtaccaaatatctactggactctggatgggcatcgaattttatgctataaacaccgattcccaagcccttattaattcacaagcgcaatatcctctgcaaattggagagcagttgacccacgacttaggtaccggtggaaatccaaatttgggagagcaggctgctgaggaatcaagagaaaccatagccactgccctgagggattcagatcttgttttcataacagctgggatgggagggggtgctgctccaattgttgcccagatatcaaaggaagctggttatcttactgttggtgttgtcacctatccattcaatttcgagggccgtaagcgctctttacaggcaagtatctgagccccccttcactcctgaattagaattcaaactgtcatatctcgttttgcgactttcttttgctccatggaagcattagtttgtagtcataacaatgacatccaaccacatttattgttgatcatgtatacaatggtcggtcaaataaaggtagcatattgcgagggcggtcctcgtcgctcccatgtgcaggatctcccatgtgacagatggcttggcaagattatactagagacttgtatttctcagatccatatttggcttaggtatgattcttgtgtcaatgctacatatatttttcctaattattgtaggtacttccatttagccttgcgacaataaatattttgtgcgaaacacatcatctcttcacggttcaatacgatcatcggctatatatcctggctgatcatcgtcaagagcattagtagttgctactgatatatataggtcagctctttgctcttttcacatctatatcaattgcttgccccacaaatgatcagccagggtcaggtaaaccatattgtgtaaccatcactataacactgcaatcattttctaaatagtacttttataaatcacaaatcgaaggtataaatacaaaagtgtagaaaattataatgagaacattacctatataaacaagaaaggaaaaccaatgatgttttccttgttgaagttatttgtggcttttacaatgtcagagaacgtgagcttgttttcatttacttttccttgtggcaccatgatcactccaaatgcaattgcaagaatggccttcttatttcttcctcctgtggataccagaggcacatcggctgaatcgcatcgacgaccgatcataaagccgcacagctttggattccctagaaagctggagttctgaaatgtaccaaattgaccaccggttggaataggcccctctaggtcattgttagaaacgttgaatgtggaaaggaagtgcagattctcgaatgcaactggaattttacccgtgagatcattgctggataaatctagcatccagcaggtttgtgagattgcagatagatgtggggatcggtccggttaagctgttggagctgatatcaagtgaaaggaggccttttaactgaccaatctctgggagaatcagaactgtgaatatgttgctgcttagatttagaattttaggaaaagcaatcggtatccggtacggtttcttcaaagaaattgatgccaagaagaagcgtggtcaggttcttagagctcctcagtatctgaagcgtgtttgttatatttgaaaggctgttgtttgggcaaggcgaatcaggcaagagttgatgacgagcggctaaactaatccaagagttgatgacgaccggcttgttctttcacttgcaacgacttagagtcgggcgacctgcaagatcaaggtgcatggtcgtcgaaggatggcgacggcgtatcctcgttcaggcaaggcgaatcaggaggtcttgaagatctggaactgcaggtgcagaatgctattgcagcagttgcagctccacccaaggaaagcaatagtgtcagcagcaacgatcctggtagctcgtcctctgtgatttttccgtctggtccagctgatcaagtccctgttcctgctacctctccagaaattgagccccgttttgcaaaccaaatccctgctgcttcttcggaggttaaggcaccatgcatggcaggtctgttgtttgtaagcgacaggaacgagaggaactttaggttgcctagcccttctgataattgtccatggaacttattcgaatctagccgtagcgcagtcagctttctacaggagtatatgctttccggaatcgtgccactgaagttattcagcatgagatctatggttcttagactgggcatattgctgaataactatagttggtagatggtctcgctacagtagacaggaaaggcaccatgcctggcactggcaggtctgcagcgaacaccgttgtatgtgtatgtatagtatgcacgtgtgcaattcatattagcttaacagcctgtgtaacaaaaacaattacccaacttcccaagatagttaatgcactatatatccaaaacctgatacatgcatcaatttgtcttaaaaagtacattcataaaaatataaatgtataaagagttcatttgtattttaacaaaagtctttggtcaaagccatattctggagaccgtgtcagtgtcctagaccacaaataacattggagggagtaaattatatctcatgtctatcaacgaagttttactttttaggttctattaatgtctaattcttgtaacccctcttttttggtatctcaattgttgcagttaggaaaccttccattacggccttatttctgcagaagtatgacaccaactttcatctattctctaccaccaaagagatggaaaagcaggttgcccccacccccatagctttctgttttgtccctataacaggtttacctatgttatatatagacaccgtagcaatgcacgtgtaatggtagattttctgattggttagtttggaagtgaagtaggtgccaatgttgtgcatgagcagaagaaatattattcccttcaatattagtagaggtagagatatttacttttatcagtatttgtgttgtgatagctatttttagcctaatgtttcaggtcaaagggccatacttcatagctttttgctcctcattgttttaagtgaaagggcgccaactattcaaaatttactctaggtagataattttcattgtcgagttttattttggtatatgtaactttttgtaattgggcctaagcgtattggagcactctaagttaacaggtgcttgaagctgatgatgaaattatacagcttggatgaataaacctttgttgtagtgacataaggagtttcgaaattacaaggaattttaaatttgaatatttttcagtgagatgttgaggttgataattttaatctttgtgcactaatattttgtagaaagtagtttgttcaccgttgcaacgcacgggcatgtacctagtcaagcattaagcacgcgatgaacaacgtccttcccgttatcgcccaacaactagaattccacttctatcatcgaccccataacatcacacaacataacaccataacaacggatctagccataattaccaagcgcacacctcgcatcactggtatttctaacttaatcgtatacgcatacgaagcgtcttattttacgatcataaaaccgatagtaaaaatagcgaatcggctcaccacatcacaattcgatttggtagttgcctgaacaacgacggccttcagctgaagtccttgatcgaacatctggcgagcgtgaccgacgagctaagtctgaggcgaagctcgacgacgagatcgaacaggggatgatgagcgtgagggtttcacaacgaggatgagtgacatcgtggaatcttggtccaacatttaatcgaacacaacggaagcgaggcacagcaggaatggcagtattaagcatgggcacgataagggacgcgctgctgcacgacgcgatgatgaacgacgacaacctatgacggccaaaacggaagacttggtcgaggcggggtccaagcatccagagtttttttttgccgaggctgaacagagaaggatgcacaaatcctaggcacgatggtggccatagccaagcagtgggacgcgactgcgcgcagagaactcggcatggcgagggacgacggaacgctgcgtgcgcgtccagggagcaaggcgcggtcgagaacggacagagggagccgggagaaagaactgcggcgctgcgagcagagcgcaggggagttcgtggctgcgcgcagatgggcgagctggagcgccgcgacgagcgcaggggcgcggcacaagcgagggcgagctgccgcagggagaaagaagctggggaaagggccgcagcgctgggggctcgacgtgccgtgaccagcagagagatgcggcgctgcgcagaggagggagaggaaggagagagagcagccatgggaaagggaggagaactgggcgcgacgcaggcagccaagggagcttcaaggccgagcgccaggaagaatgagcagggcgccgcgacactgggacagggcaccggcgagcagcaagcagagagagaaggcgcggcggtcaggacgaacgtcagggagcttcggctggccatggaaccgagcagtgatgcgccatgggggagaaaccagcgcgcagcagagaagctcggcgaggaagatggggcaggaactcggcgccggcgaggggagcagggtgatgaacgccgaggaagctga

SEQ ID NO: 215304 - DNA, 5450 bp, Zea Mays
ccaccctccttcccaccgccgccgcaatcaacgcgctcctcccccacgtggatccctccaccctcctccccaccgccgccgctcgaccgcggtttcgtcgcactccttccttcgaaagcgctcctttccatcctcgattcctccttccttccatgtcgctccttccttcgacggccagcctcatccggtcattcctcctcgctgtgccccctcccccgtattcaaccacctcttcctcctgcggatccaccaccgccgtcctcgcccaacgtctccttgacgcatatgcccgcagcggctccctcgcgtccccaatgttgagtctggcctgtatggaaggagtgcgggcgtgggtggagtgtgtagagaaatccaagcgaaaccccgtgagagcgaggtgacggcagacggaggcgagtgggtgagctgcgggcgagagacgaggtagcgggctagcggatggcgtcgctggttgtagtggccgcagcgctgctggtggcggcgctggtggcattctgcggcacggacccgctctggacggggttcgagtcccacctcgtcgaccttcccggggttcgagtcccacctcgtcgacctccccgatcccgccgagatgtcgacgcacgcggacgaacgggagtggctccgcggagccgaggtgcaacccctccaaaccggcgttcaaggacggcgccgctcaccagttgtatctgccttgagcgatccaggagagggcttggcgatgggtctgttgggatgctccagtctctcactgtctactactacttgtaccaaatatctactggactctggatgggcatcgaattttatgctataaacaccgattcccaagcccttattaattcacaagcgcaatatcctctgcaaattggagagcagttgacccacgacttaggtaccggtggaaatccaaatttgggagagcaggctgctgaggaatcaagagaaaccatagccactgccctgagggattcagatcttgttttcataacagctgggatgggagggggtgctgctccaattgttgcccagatatcaaaggaagctggttatcttactgttggtgttgtcacctatccattcaatttcgagggccgtaagcgctctttacaggatctcccatgtgacagatggcttggcaagattatactagagacttgtatttctcagatccatatttggcttaggtatgattcttgtgtcaatgctacatatatttttcctaattattgtaggtacttccatttagccttgcgacaataaatattttgtgcgaaacacatcatctcttcacggttcaatacgatcatcggctatatatcctggctgatcatcgtcaagagcattagtagttgctactgatatatataggtcagctctttgctcttttcacatctatatcaattgcttgccccacaaatgatcagccagggtcaggtaaaccatattgtgtaaccatcactataacactgcaatcattttctaaatagtacttttataaatcacaaatcgaaggtataaatacaaaagtgtagaaaattataatgagaacattacctatataaacaagaaaggaaaaccaatgatgttttccttgttgaagttatttgtggcttttacaatgtcagagaacgtgagcttgttttcatttacttttccttgtggcaccatgatcactccaaatgcaattgcaagaatggccttcttatttcttcctcctgtggataccagaggcacatcggctgaatcgcatcgacgaccgatcataaagccgcacagctttggattccctagaaagctggagttctgaaatgtaccaaattgaccaccggttggaataggcccctctaggtcattgttagaaacgttgaatgtggaaaggaagtgcagattctcgaatgcaactggaattttacccgtgagatcattgctggataaatctagcatccagcaggtttgtgagattgcagatagatgtggggatcggtccggttaagctgttggagctgatatcaagtgaaaggaggccttttaactgaccaatctctgggagaatcagaactgtgaatatgttgctgcttagatttagaattttaggaaaagcaatcggtatccggtacggtttcttcaaagaaattgatgccaagaagaagcgtggtcaggttcttagagctcctcagtatctgaagcgtgtttgttatatttgaaaggctgttgtttgggcaaggcgaatcaggcaagagttgatgacgagcggctaaactaatccaagagttgatgacgaccggcttgttctttcacttgcaacgacttagagtcgggcgacctgcaagatcaaggtgcatggtcgtcgaaggatggcgacggcgtatcctcgttcaggcaaggcgaatcaggcaagcatctatttggaggttggttagttatcccatgtcatcagacatcacgcaggaatcaagtcatccatcaggaagcagccaactctgcctggactaacccagggcaaaggcaaacagcaaactttccaggataagtctctgacttcgttatactttcctgtgtgcaggaggtcttgaagatctggaactgcaggtgcagaatgctattgcagcagttgcagctccacccaaggaaagcaatagtgtcagcagcaacgatcctggtagctcgtcctctgtgatttttccgtctggtccagctgatcaagtccctgttcctgctacctctccagaaattgagccccgttttgcaaaccaaatccctgctgcttcttcggaggttaaggcaccatgcatggcaggtctgttgtttgtaagcgacaggaacgagaggaactttaggttgcctagcccttctgataattgtccatggaacttattcgaatctagccgtagcgcagtcagctttctacaggagtatatgctttccggaatcgtgccactgaagttattcagcatgagatctatggttcttagactgggcatattgctgaataactatagttggtagatggtctcgctacagtagacaggaaaggcaccatgcctggcactggcaggtctgcagcgaacaccgttgtatgtgtatgtatagtatgcacgtgtgcaattcatattagcttaacagcctgtgtaacaaaaacaattacccaacttcccaagatagttaatgcactatatatccaaaacctgatacatgcatcaatttgtcttaaaaagtacattcataaaaatataaatgtataaagagttcatttgtattttaacaaaagtctttggtcaaagccatattctggagaccgtgtcagtgtcctagaccacaaataacattggagggagtaaattatatctcatgtctatcaacgaagttttactttttaggttctattaatgtctaattcttgtaacccctcttttttggtatctcaattgttgcagttaggaaaccttccattacggccttatttctgcagaagtatgacaccaactttcatctattctctaccaccaaagagatggaaaagcaggttgcccccacccccatagctttctgttttgtccctataacaggtttacctatgttatatatagacaccgtagcaatgcacgtgtaatggtagattttctgattggttagtttggaagtgaagtaggtgccaatgttgtgcatgagcagaagaaatattattcccttcaatattagtagaggtagagatatttacttttatcagtatttgtgttgtgatagctatttttagcctaatgtttcaggtcaaagggccatacttcatagctttttgctcctcattgttttaagtgaaagggcgccaactattcaaaatttactctaggtagataattttcattgtcgagttttattttggtatatgtaactttttgtaattgggcctaagcgtattggagcactctaagttaacaggtgcttgaagctgatgatgaaattatacagcttggatgaataaacctttgttgtagtgacataaggagtttcgaaattacaaggaattttaaatttgaatatttttcagtgagatgttgaggttgataattttaatctttgtgcactaatattttgtagaaagtagtttgttcaccgttgcaacgcacgggcatgtacctagtcaagcattaagcacgcgatgaacaacgtccttcccgttatcgcccaacaactagaattccacttctatcatcgaccccataacatcacacaacataacaccataacaacggatctagccataattaccaagcgcacacctcgcatcactggtatttctaacttaatcgtatacgcatacgaagcgtcttattttacgatcataaaaccgatagtaaaaatagcgaatcggctcaccacatcacaattcgatttggtagttgcctgaacaacgacggccttcagctgaagtccttgatcgaacatctggcgagcgtgaccgacgagctaagtctgaggcgaagctcgacgacgagatcgaacaggggatgatgagcgtgagggtttcacaacgaggatgagtgacatcgtggaatcttggtccaacatttaatcgaacacaacggaagcgaggcacagcaggaatggcagtattaagcatgggcacgataagggacgcgctgctgcacgacgcgatgatgaacgacgacaacctatgacggccaaaacggaagacttggtcgaggcggggtccaagcatccagagtttttttttgccgaggctgaacagagaaggatgcacaaatcctaggcacgatggtggccatagccaagcagtgggacgcgactgcgcgcagagaactcggcatggcgagggacgacggaacgctgcgtgcgcgtccagggagcaaggcgcggtcgagaacggacagagggagccgggagaaagaactgcggcgctgcgagcagagcgcaggggagttcgtggctgcgcgcagatgggcgagctggagcgccgcgacgagcgcaggggcgcggcacaagcgagggcgagctgccgcagggagaaagaagctggggaaagggccgcagcgctgggggctcgacgtgccgtgaccagcagagagatgcggcgctgcgcagaggagggagaggaaggagagagagcagccatgggaaagggaggagaactgggcgcgacgcaggcagccaagggagcttcaaggccgagcgccaggaagaatgagcagggcgccgcgacactgggacagggcaccggcgagcagcaagcagagagagaaggcgcggcggtcaggacgaacgtcagggagcttcggctggccatggaaccgagcagtgatgcgccatgggggagaaaccagcgcgcagcagagaagctcggcgaggaagatggggcaggaactcggcgccggcgaggggagcagggtgatgaacgccgaggaagctga

SEQ ID NO: 215305 - DNA, 5094 bp, Zea Mays
catcaacgcccggatccccaccctccttcccaccgccgccgcaatcaacgcgctcctcccccacgtggatccctccaccctcctccccaccgccgccgctcgaccgcggtttcgtcgcactccttccttcgaaagcgctcctttccatcctcgattcctccttccttccatgtcgctccttccttcgacggccagcctcatccggtcattcctcctcgctgtgccccctcccccgtattcaaccacctcttcctcctgcggatccaccaccgccgtcctcgcccaacgtctccttgacgcatatgcccgcagcggctccctcgcgtccccaatgttgagtctggcctgtatggaaggagtgcgggcgtgggtggagtgtgtagagaaatccaagcgaaaccccgtgagagcgaggtgacggcagacggaggcgagtgggtgagctgcgggcgagagacgaggtagcgggctagcggatggcgtcgctggttgtagtggccgcagcgctgctggtggcggcgctggtggcattctgcggcacggacccgctctggacggggttcgagtcccacctcgtcgaccttcccggggttcgagtcccacctcgtcgacctccccgatcccgccgagatgtcgacgcacgcggacgaacgggagtggctccgcggagccgaggtgcaacccctccaaaccggcgttcaaggacggcgccgctcaccagttgtatctggttgtgaagaactaggggtgggagcgcctgtatggcgggcttatgccttctctcatcggcaccgctgcctcccaggagagggcttggcgatgggtctgttgggatgctccagtctctcactgtctactactacttgtaccaaatatctactggactctggatgggcatcgaattttatgctataaacaccgattcccaagcccttattaattcacaagcgcaatatcctctgcaaattggagagcagttgacccacgacttaggtaccggtggaaatccaaatttgggagagcaggctgctgaggaatcaagagaaaccatagccactgccctgagggattcagatcttgttttcataacagctgggatgggagggggtgctgctccaattgttgcccagatatcaaaggaagctggttatcttactgttggtgttgtcacctatccattcaatttcgagggccgtaagcgctctttacaggcaagtatctgagccccccttcactcctgaattagaattcaaactgtcatatctcgttttgcgactttcttttgctccatggaagcattagtttgtagtcataacaatgacatccaaccacatttattgttgatcatgtatacaatggtcggtcaaataaaggtagcatattgcgagggcggtcctcgtcgctcccatgtgcaggatctcccatgtgacagatggcttggcaagattatactagagacttgtatttctcagatccatatttggcttaggtatgattcttgtgtcaatgctacatatatttttcctaattattgtaggtacttccatttagccttgcgacaataaatattttgtgcgaaacacatcatctcttcacggttcaatacgatcatcggctatatatcctggctgatcatcgtcaagagcattagtagttgctactgatatatataggtcagctctttgctcttttcacatctatatcaattgcttgccccacaaatgatcagccagggtcaggtaaaccatattgtgtaaccatcactataacactgcaatcattttctaaatagtacttttataaatcacaaatcgaaggtataaatacaaaagtgtagaaaattataatgagaacattacctatataaacaagaaaggaaaaccaatgatgttttccttgttgaagttatttgtggcttttacaatgtcagagaacgtgagcttgttttcatttacttttccttgtggcaccatgatcactccaaatgcaattgcaagaatggccttcttatttcttcctcctgtggataccagaggcacatcggctgaatcgcatcgacgaccgatcataaagccgcacagctttggattccctagaaagctggagttctgaaatgtaccaaattgaccaccggttggaataggcccctctaggtcattgttagaaacgttgaatgtggaaaggaagtgcagattctcgaatgcaactggaattttacccgtgagatcattgctggataaatctagcatccagcaggtttgtgagattgcagatagatgtggggatcggtccggttaagctgttggagctgatatcaagtgaaaggaggccttttaactgaccaatctctgggagaatcagaactgtgaatatgttgctgcttagatttagaattttaggaaaagcaatcggtatccggtacggtttcttcaaagaaattgatgccaagaagaagcgtggtcaggttcttagagctcctcagtatctgaagcgtgtttgttatatttgaaaggctgttgtttgggcaaggcgaatcaggcaagagttgatgacgagcggctaaactaatccaagagttgatgacgaccggcttgttctttcacttgcaacgacttagagtcgggcgacctgcaagatcaaggtgcatggtcgtcgaaggatggcgacggcgtatcctcgttcaggcaaggcgaatcaggcaagcatctatttggaggttggttagttatcccatgtcatcagacatcacgcaggaatcaagtcatccatcaggaagcagccaactctgcctggactaacccagggcaaaggcaaacagcaaactttccaggataagtctctgacttcgttatactttcctgtgtgcaggaggtcttgaagatctggaactgcaggtgcagaatgctattgcagcagttgcagctccacccaaggaaagcaatagtgtcagcagcaacgatcctggtagctcgtcctctgtgatttttccgtctggtccagctgatcaagtccctgttcctgctacctctccagaaattgagccccgttttgcaaaccaaatccctgctgcttcttcggaggttaaggcaccatgcatggcagttaggaaaccttccattacggccttatttctgcagaagtatgacaccaactttcatctattctctaccaccaaagagatggaaaagcaggttgcccccacccccatagctttctgttttgtccctataacaggtttacctatgttatatatagacaccgtagcaatgcacgtgtaatggtagattttctgattggttagtttggaagtgaagtaggtgccaatgttgtgcatgagcagaagaaatattattcccttcaatattagtagaggtagagatatttacttttatcagtatttgtgttgtgatagctatttttagcctaatgtttcaggtcaaagggccatacttcatagctttttgctcctcattgttttaagtgaaagggcgccaactattcaaaatttactctaggtagataattttcattgtcgagttttattttggtatatgtaactttttgtaattgggcctaagcgtattggagcactctaagttaacaggtgcttgaagctgatgatgaaattatacagcttggatgaataaacctttgttgtagtgacataaggagtttcgaaattacaaggaattttaaatttgaatatttttcagtgagatgttgaggttgataattttaatctttgtgcactaatattttgtagaaagtagtttgttcaccgttgcaacgcacgggcatgtacctagtcaagcattaagcacgcgatgaacaacgtccttcccgttatcgcccaacaactagaattccacttctatcatcgaccccataacatcacacaacataacaccataacaacggatctagccataattaccaagcgcacacctcgcatcactggtatttctaacttaatcgtatacgcatacgaagcgtcttattttacgatcataaaaccgatagtaaaaatagcgaatcggctcaccacatcacaattcgatttggtagttgcctgaacaacgacggccttcagctgaagtccttgatcgaacatctggcgagcgtgaccgacgagctaagtctgaggcgaagctcgacgacgagatcgaacaggggatgatgagcgtgagggtttcacaacgaggatgagtgacatcgtggaatcttggtccaacatttaatcgaacacaacggaagcgaggcacagcaggaatggcagtattaagcatgggcacgataagggacgcgctgctgcacgacgcgatgatgaacgacgacaacctatgacggccaaaacggaagacttggtcgaggcggggtccaagcatccagagtttttttttgccgaggctgaacagagaaggatgcacaaatcctaggcacgatggtggccatagccaagcagtgggacgcgactgcgcgcagagaactcggcatggcgagggacgacggaacgctgcgtgcgcgtccagggagcaaggcgcggtcgagaacggacagagggagccgggagaaagaactgcggcgctgcgagcagagcgcaggggagttcgtggctgcgcgcagatgggcgagctggagcgccgcgacgagcgcaggggcgcggcacaagcgagggcgagctgccgcagggagaaagaagctggggaaagggccgcagcgctgggggctcgacgtgccgtgaccagcagagagatgcggcgctgcgcagaggagggagaggaaggagagagagcagccatgggaaagggaggagaactgggcgcgacgcaggcagccaagggagcttcaaggccgagcgccaggaagaatgagcagggcgccgcgacactgggacagggcaccggcgagcagcaagcagagagagaaggcgcggcggtcaggacgaacgtcagggagcttcggctggccatggaaccgagcagtgatgcgccatgggggagaaaccagcgcgcagcagagaagctcggcgaggaagatggggcaggaactcggcgccggcgaggggagcagggtgatgaacgccgaggaagctga

SEQ ID NO: 215306 - DNA, 5512 bp, Zea Mays
cgccatcaacgcccggatccccaccctccttcccaccgccgccgcaatcaacgcgctcctcccccacgtggatccctccaccctcctccccaccgccgccgctcgaccgcggtttcgtcgcactccttccttcgaaagcgctcctttccatcctcgattcctccttccttccatgtcgctccttccttcgacggccagcctcatccggtcattcctcctcgctgtgccccctcccccgtattcaaccacctcttcctcctgcggatccaccaccgccgtcctcgcccaacgtctccttgacgcatatgcccgcagcggctccctcgcgtccccaatgttgagtctggcctgtatggaaggagtgcgggcgtgggtggagtgtgtagagaaatccaagcgaaaccccgtgagagcgaggtgacggcagacggaggcgagtgggtgagctgcgggcgagagacgaggtagcgggctagcggatggcgtcgctggttgtagtggccgcagcgctgctggtggcggcgctggtggcattctgcggcacggacccgctctggacggggttcgagtcccacctcgtcgaccttcccggggttcgagtcccacctcgtcgacctccccgatcccgccgagatgtcgacgcacgcggacgaacgggagtggctccgcggagccgaggtgcaacccctccaaaccggcgttcaaggacggcgccgctcaccagttgtatctgccttgagcgatccaggagagggcttggcgatgggtctgttgggatgctccagtctctcactgtctactactacttgtaccaaatatctactggactctggatgggcatcgaattttatgctataaacaccgattcccaagcccttattaattcacaagcgcaatatcctctgcaaattggagagcagttgacccacgacttaggtaccggtggaaatccaaatttgggagagcaggctgctgaggaatcaagagaaaccatagccactgccctgagggattcagatcttgttttcataacagctgggatgggagggggtgctgctccaattgttgcccagatatcaaaggaagctggttatcttactgttggtgttgtcacctatccattcaatttcgagggccgtaagcgctctttacaggtagcatattgcgagggcggtcctcgtcgctcccatgtgcaggatctcccatgtgacagatggcttggcaagattatactagagacttgtatttctcagatccatatttggcttaggtatgattcttgtgtcaatgctacatatatttttcctaattattgtaggtacttccatttagccttgcgacaataaatattttgtgcgaaacacatcatctcttcacggttcaatacgatcatcggctatatatcctggctgatcatcgtcaagagcattagtagttgctactgatatatataggtcagctctttgctcttttcacatctatatcaattgcttgccccacaaatgatcagccagggtcaggtaaaccatattgtgtaaccatcactataacactgcaatcattttctaaatagtacttttataaatcacaaatcgaaggtataaatacaaaagtgtagaaaattataatgagaacattacctatataaacaagaaaggaaaaccaatgatgttttccttgttgaagttatttgtggcttttacaatgtcagagaacgtgagcttgttttcatttacttttccttgtggcaccatgatcactccaaatgcaattgcaagaatggccttcttatttcttcctcctgtggataccagaggcacatcggctgaatcgcatcgacgaccgatcataaagccgcacagctttggattccctagaaagctggagttctgaaatgtaccaaattgaccaccggttggaataggcccctctaggtcattgttagaaacgttgaatgtggaaaggaagtgcagattctcgaatgcaactggaattttacccgtgagatcattgctggataaatctagcatccagcaggtttgtgagattgcagatagatgtggggatcggtccggttaagctgttggagctgatatcaagtgaaaggaggccttttaactgaccaatctctgggagaatcagaactgtgaatatgttgctgcttagatttagaattttaggaaaagcaatcggtatccggtacggtttcttcaaagaaattgatgccaagaagaagcgtggtcaggttcttagagctcctcagtatctgaagcgtgtttgttatatttgaaaggctgttgtttgggcaaggcgaatcaggcaagagttgatgacgagcggctaaactaatccaagagttgatgacgaccggcttgttctttcacttgcaacgacttagagtcgggcgacctgcaagatcaaggtgcatggtcgtcgaaggatggcgacggcgtatcctcgttcaggcaaggcgaatcaggcaagcatctatttggaggttggttagttatcccatgtcatcagacatcacgcaggaatcaagtcatccatcaggaagcagccaactctgcctggactaacccagggcaaaggcaaacagcaaactttccaggataagtctctgacttcgttatactttcctgtgtgcaggaggtcttgaagatctggaactgcaggtgcagaatgctattgcagcagttgcagctccacccaaggaaagcaatagtgtcagcagcaacgatcctggtagctcgtcctctgtgatttttccgtctggtccagctgatcaagtccctgttcctgctacctctccagaaattgagccccgttttgcaaaccaaatccctgctgcttcttcggaggttaaggcaccatgcatggcaggtctgttgtttgtaagcgacaggaacgagaggaactttaggttgcctagcccttctgataattgtccatggaacttattcgaatctagccgtagcgcagtcagctttctacaggagtatatgctttccggaatcgtgccactgaagttattcagcatgagatctatggttcttagactgggcatattgctgaataactatagttggtagatggtctcgctacagtagacaggaaaggcaccatgcctggcactggcaggtctgcagcgaacaccgttgtatgtgtatgtatagtatgcacgtgtgcaattcatattagcttaacagcctgtgtaacaaaaacaattacccaacttcccaagatagttaatgcactatatatccaaaacctgatacatgcatcaatttgtcttaaaaagtacattcataaaaatataaatgtataaagagttcatttgtattttaacaaaagtctttggtcaaagccatattctggagaccgtgtcagtgtcctagaccacaaataacattggagggagtaaattatatctcatgtctatcaacgaagttttactttttaggttctattaatgtctaattcttgtaacccctcttttttggtatctcaattgttgcagttaggaaaccttccattacggccttatttctgcagaagtatgacaccaactttcatctattctctaccaccaaagagatggaaaagcaggttgcccccacccccatagctttctgttttgtccctataacaggtttacctatgttatatatagacaccgtagcaatgcacgtgtaatggtagattttctgattggttagtttggaagtgaagtaggtgccaatgttgtgcatgagcagaagaaatattattcccttcaatattagtagaggtagagatatttacttttatcagtatttgtgttgtgatagctatttttagcctaatgtttcaggtcaaagggccatacttcatagctttttgctcctcattgttttaagtgaaagggcgccaactattcaaaatttactctaggtagataattttcattgtcgagttttattttggtatatgtaactttttgtaattgggcctaagcgtattggagcactctaagttaacaggtgcttgaagctgatgatgaaattatacagcttggatgaataaacctttgttgtagtgacataaggagtttcgaaattacaaggaattttaaatttgaatatttttcagtgagatgttgaggttgataattttaatctttgtgcactaatattttgtagaaagtagtttgttcaccgttgcaacgcacgggcatgtacctagtcaagcattaagcacgcgatgaacaacgtccttcccgttatcgcccaacaactagaattccacttctatcatcgaccccataacatcacacaacataacaccataacaacggatctagccataattaccaagcgcacacctcgcatcactggtatttctaacttaatcgtatacgcatacgaagcgtcttattttacgatcataaaaccgatagtaaaaatagcgaatcggctcaccacatcacaattcgatttggtagttgcctgaacaacgacggccttcagctgaagtccttgatcgaacatctggcgagcgtgaccgacgagctaagtctgaggcgaagctcgacgacgagatcgaacaggggatgatgagcgtgagggtttcacaacgaggatgagtgacatcgtggaatcttggtccaacatttaatcgaacacaacggaagcgaggcacagcaggaatggcagtattaagcatgggcacgataagggacgcgctgctgcacgacgcgatgatgaacgacgacaacctatgacggccaaaacggaagacttggtcgaggcggggtccaagcatccagagtttttttttgccgaggctgaacagagaaggatgcacaaatcctaggcacgatggtggccatagccaagcagtgggacgcgactgcgcgcagagaactcggcatggcgagggacgacggaacgctgcgtgcgcgtccagggagcaaggcgcggtcgagaacggacagagggagccgggagaaagaactgcggcgctgcgagcagagcgcaggggagttcgtggctgcgcgcagatgggcgagctggagcgccgcgacgagcgcaggggcgcggcacaagcgagggcgagctgccgcagggagaaagaagctggggaaagggccgcagcgctgggggctcgacgtgccgtgaccagcagagagatgcggcgctgcgcagaggagggagaggaaggagagagagcagccatgggaaagggaggagaactgggcgcgacgcaggcagccaagggagcttcaaggccgagcgccaggaagaatgagcagggcgccgcgacactgggacagggcaccggcgagcagcaagcagagagagaaggcgcggcggtcaggacgaacgtcagggagcttcggctggccatggaaccgagcagtgatgcgccatgggggagaaaccagcgcgcagcagagaagctcggcgaggaagatggggcaggaactcggcgccggcgaggggagcagggtgatgaacgccgaggaagctga

SEQ ID NO: 215307 - DNA, 3140 bp, Zea Mays
gtcgctgtcgcctcgcgtaatcccaactgagtagggacagagagggcgggcaccatcacgcggccccagatcctagccacgctcccgcacccactcttccatcgcacgcacgggcgagtgcggcagatcgctggcggatccaatgctgctgccctggtagctgctgcaccgcgcggctgctggtttggtgccctccggctgcggcgccgggtcactttcgatgtgaccatctgaggaggaaaggatggcggcttcggcggcggcagcgcctgggtcggctgagaggcaggcgcgcggcggcgcggcgtcggcgatcggcaacgcggtatttaagagtggccctctcttcatatcatcgaaaggaattggatggaaatcatggaaaaaacgttggttcatcctcacacgaacgtcactggttttcttcaagaatgatcctagtacattaccacagagaagtggtgaagtgaaccttacattgggggggattgaccttaataattctgggagtggtcagggaagacaaaaggctgctgaccgtcctttttccagatggccgtgatggtcgcgcctttaccttgaaggcagaaagttctaaagatttgttcgagtggaaaacatcactggaagaagctcttgcacaagctccaaatgcagctcttctgatggggcataatggaatatttcgcaatgacacaacagatgtgtatgaagaggctattccaaattggagagagaagagacctaccaaatcactagttgttggcaggccaatactacttgcactggaagatatagatggcagtccttcttttctggaaaaagctttgtgtttccttgagaaacatggaataaaggtggaaggaattttgcgtcaagctgcagatgtggaggaggttgacaggagattgcaagaatatgagcaaggaaggacagagtttgcaccagaagaggatgctcatgttattggtgactgtgtaaaacatgttctccgggagcttccatcttctcctgttccagcttcctgctgtacagcattattggaagctttccgtctggacatcaaggaatctcggatcaaatctatgcgtgcagcaatatctgaaacatttcctgagcctactaggcggctgctacagagaattttgaaaatgatgcataccgttgcttctcatactgccgagaatagaatgactccatcagcagttgctgcatgtatggccccactcttgttgcgtccccttctttctggtgaatgcgagctggaagatgattttgacatgagtgatgacagtgctgctcagcttattgctgctgcaaatgctgctaacagcgctcaaggcattgtaactactctattagaggaatacgagagtatattcaatgatgagcactttaggtgctccttatcacctgattctcaaacaggagatagtggaagtgaagaatcaactgatgatgaaactgtggatatcaaggataatgggtttcatgatgcagaaaatgatgtagatcaagaattagatgatgccgagcgaatactgaatggaaaattgagtgaaaccagtgcatgtgtccatgctgacctccatgactacaagcaggaagttaatggcaacgattcagacgctgagctctttgttgaggataacacatttgaaccaaatgtaaatttaaatgatactcccctaagtcgtttaatagaaaatggaaagaaaccatcaaatctggcgtccagtcatgaaactccattatcagtgggagaaattctttcgtctttggatgctggagttccattacctggtcgtgcagctgaatattccaaggacagactctctagcaaacccaatggaattcagcagcatgtgaagcgtactaacttatggggacggagcaatgcaagaaagggccaacgttcagagttagttgatccttcaagtgaagaagagcttgctattcaacgacttgaggtaatgaagaatgacctacaggtcaggattgcaaaggaggctagaagtaatgcaatcctacaggcaagtttagaaagaagaaaacaagcactacatgagcgccgtgtggctctggaacaaaatgtgtcaaggttgcaagagcagctacaggctgaaagggatcttagagctgcactggagattggattaagcatgtattcttcacaattttctagctcgcactccatggactcaaagacaaaggcagagcttgaggaaattgctctcgcagaagctgatgttgcaagattaaaacagaaggttgcagagctgcatctccaactcaatcaacagcgccagcaccagtatggctcttcggtagatgcaaatgattgtcctccgcaccttccaaatcatctctcacagaacactgtccaaactggatttgataggaccgttgctttttgtaatcaagagaagcaaagaaatgaggagagcttgccgtgcacatcccactggagaagcatcaaacagcatgtgctctctcaggattcttcaaggcctttctcccgaaagcattcctcagacacctccttgagtgattcaatggaggcatcaacaagtgtgcttgcagagggcgggccactgttggtgaacatcgccagaacaacagaaggtgttgaatacgggagacctccgactgtgccgtcatctactctagttgaactaacaaccaggctagatttcttcaaagaacggcggtcacaattgatggaacagctccacagcctcgatttagggcatggatccgcgtcccatggtttcccatacaaatcttcatctccctggaacaacccaaggtagggggcttgttcagttgctgcattaccgcgcatctgtatattcttggtataggatcccttttgtttcactttatctctgtagaagctggtctcgtttttgtttcacttgttatctctgtagaagctggtagtgagaatgtatataccccttgcctgccttcacttgttttgctagtgcttccagcggacatttttcgagcgtgatttttgttttgcttttgtatttattgtgtatgtaatgactcaaggggaaatatatagatgcgtctttttttcttggggatatattccactgcaggagaggcaaatgttgccatttcgaaaacct

SEQ ID NO: 215308 - DNA, 3762 bp, Zea Mays
ttggaatactttcctccgctcagcgccggggcagcatttgctcgcgattaaccgccccgcttttgccgcttatttcagcttgtccttttcccccagtggggaaggttagcatccagcacaagcaaccgccggttcttgccgcagtttctgcgcgctcgctttttgtccgcaagaccgaggagagcgagagcggagaggttcctgtgtggaattcttcagcgatgaggcccggcgcccgtctggactcggtggtcttccagctcactcccacccggaccaggttcgacttggtcctcatagcgaatggccggaaggagaagtttgcatctggtttgttgaaacccttcctggctcacctgaaggccgcccaggatcagattgcgaagggagggtactcgatcacacttgaaccaatctcagagttcgacgtgtcattgttcacgagaggcgccgtggagaggtttgtgcgtttcgtgagtactacggaggtccttgagcgagtcacaacactggagtctgagatcctgcagctcgaggatgccattgctatccagaggaacgatagtcttagattaaaatgtgtcggagaccatggaagaaagttgactgaaagcaatgaaagtagtatgacgctgcaccaacctgattgctttctgagagcatgttgtatagaatagtgcatgcctttgaggattgtctgaatcacattgtttcgttgggctaccaaaaagaaaagcaaggtgcaatccactactattgttttagaatctagtcatcatggagtttgatgcgacatcacatcaagggccattattaagttggtacttgtcacttaactcccaaaatgttaggggtcataatctgatttatggacaacctttactatcgtttaatgttatgaattttctgtgtgatcacaataacttacatatgaatctatattttttgaagacctgaatatttagcaaaatcttatttgaaactggagaattctggatggtattatattctacattcaggggagtactgaaatggatccagctgtttcatccttttattcgccttaccatagtcacaagaaacgggtacagcggtactatggtagcgacccttgacacagaaatatcgtccccgcgaccaggatacacatgataattttcgttcccagtttcccaccatgtaaaaatctctcacaagtagtgtaccatgttccttggccctatcgatccaggaactttatgactatgcgccttacctgtcacagcctgccatatctttttatatttatttctaccacatgcctaatactatccatccactaataggtggaccggcaaattatgatcctaattcagccacggcaattgttgtttacaagcctgggtcaaattcaattccaccaatgcagaatgaaacaacagcacaggaggagaattcaaaagttcaaaactgtgttaagaaaagagcaagctatggctttcactcgtgctgtggctgctgggtttgacattgacaacctgggttactttacttgattgcgtttgcagagcgctttggtgcttcacgtatgatgaaggcatgttcacatttcatcgaactatggaagcagaagcatgaaactggacaatggattgaagttgaacctgaagcaatttctacacgctctgaatttcctccatttaatgcatctggcattgtgttgatgggagacaacatgaagcaaaacctggaatcagggtctattaatggagagccaaatggcgaggatggagctaaagctgatcagaagtccagccagcagatggggtctcatgctgcatatcctccatgggcaatgcatcctgcatctggtgcagttctttacccaccttatcctatgcaaggaatgcctttctatcctggggtgaatccctactaccctccatatcctccagtggatgatcccagttcaggtggaggaaattctcatggtcacaagtcacatagaaaggggaagaggtctggaaagaagcctagtgtagttgttatcaagaatgtgaatgtaacatctaagaagtgtggctcatcagagagtgaatcacaatcaagttctgaagttgagtctgctgacagtgacaactcacactccaaatcaagagaaagaaagcataaaagctcatgttcaaaggagggtaggagaactacttttgatccgggagatgagtataacaaggatgaaacatcgaatggccatggtgttgagcaaggcaactggagtgcattccaaaatttcttgttgagagcagaagaaaaaacaagatctagtgatgcagacctgtttgctggtgagaaagaacccccatcacggagaaaacagaatgtaaacacagcagatcctattattttagttgagagagatggtggcaacgtctgtgagcagaacaaaataggttttgattcagccaatgggaggactagagttatccgggtcatgtccaatgatgaacttgttatgtctggagaagggagaatctatatggattgtgaaatgaaggagattgaagctggtggaggaaggtacaggagagggacaggtgacgactacatggtttatggtcagggatgtcagatagacagacattgtttgttggatcctcttgcagaggcccagtacaagaatcctgttcagcaggacaataataggaatggtgttacggatgagtcctttatgattcctcttaggtccagctcacaggataatatcggagcagagagcagaactactatggacatagatgttgagcttccttctagcattcataaagcatcagataaaaaggctgggcatcagcttttttacgaacctgatgaactgagtactgtgaaggttgaagatgcaaaaccagaggatgtcttgccggtcactgacggtgtacagaaggtagagaaagagaagctaaagaacgcaagggatggttcagataaaagaacgaaggattccctattgaggagactatcggcgccaaggaccccactgaatgatgcacaaaaacgtgcacagaacctgcgtgcatataaagcagaccttcagaaactgaagaaagagcaggaagaagagcaaataaagcgattggagaggcttaaattggataggcaaaagtggatcgccgcaagaggtaatggaaagggtccagggaacgatgctcctagagcgaacggtatgaatggacttagtaaatcagttccaaccttcactgggatgaaaagggttgaaaacggaacgactgaatcactcagcggtcgactgaagaggctttctgaacccaaaagcattgttggggcagagcattcgttgaacccaaagtcagctggtgcaggccgttcacgaagaagtatggcatgagttgatgtgagatggagaactgaatagcttgagtccatcgtgccactcgctagcccggtaacttacttactagaaacgtgaaaggcatctcaaaaggctttttgtacaggaaaaaaggaaatggctggctctgtagcattgtctgcttccaagatttgtgatggaaaatcgagctatctttcaatggcatggcgttggactttcaattttaacataattatttcattcttttgattcagggtggcttgtgatagctgtaaacctggtttttttcccaatgtggagctatattgtgggtgtatttatggaatggattgatctgtgtttgagatatattgtggtatttatatagtgtataaatgtccgactttggattggac

SEQ ID NO: 215309 - DNA, 3259 bp, Zea Mays
ttggaatactttcctccgctcagcgccggggcagcatttgctcgcgattaaccgccccgcttttgccgcttatttcagcttgtccttttcccccagtggggaaggttagcatccagcacaagcaaccgccggttcttgccgcagtttctgcgcgctcgctttttgtccgcaagaccgaggagagcgagagcggagaggttcctgtgtggaattcttcagcgatgaggcccggcgcccgtctggactcggtggtcttccagctcactcccacccggaccaggttcgacttggtcctcatagcgaatggccggaaggagaagtttgcatctggtttgttgaaacccttcctggctcacctgaaggccgcccaggatcagattgcgaagggagggtactcgatcacacttgaaccaatctcagagttcgacgtgtcattgttcacgagaggcgccgtggagagttctttgcaggtttgtgcgtttcgtgagtactacggaggtccttgagcgagtcacaacactggagtctgagatcctgcagctcgaggatgccattgctatccagaggaacgatagtcttagattaaaatgtgtcggagaccatggaagaaagttgactgaaagcaatgaaagtagtatgacgctgcaccaacctgattgctttctgagagcatgttgtatagaatagtgcatgcctttgaggattgtctgaatcacattgtttcgttgggctaccaaaaagaaaagcaaggtggaccggcaaattatgatcctaattcagccacggcaattgttgtttacaagcctgggtcaaattcaattccaccaatgcagaatgaaacaacagcacaggaggagaattcaaaagttcaaaactgtgttaagaaaagagcaagctatggctttcactcgtgctgtggctgctgggtttgacattgacaacctgggttactttacttgattgcgtttgcagagcgctttggtgcttcacgtatgatgaaggcatgttcacatttcatcgaactatggaagcagaagcatgaaactggacaatggattgaagttgaacctgaagcaatttctacacgctctgaatttcctccatttaatgcatctggcattgtgttgatgggagacaacatgaagcaaaacctggaatcagggtctattaatggagagccaaatggcgaggatggagctaaagctgatcagaagtccagccagcagatggggtctcatgctgcatatcctccatgggcaatgcatcctgcatctggtgcagttctttacccaccttatcctatgcaaggaatgcctttctatcctggggtgaatccctactaccctccatatcctccagtggatgatcccagttcaggtggaggaaattctcatggtcacaagtcacatagaaaggggaagaggtctggaaagaagcctagtgtagttgttatcaagaatgtgaatgtaacatctaagaagtgtggctcatcagagagtgaatcacaatcaagttctgaagttgagtctgctgacagtgacaactcacactccaaatcaagagaaagaaagcataaaagctcatgttcaaaggagggtaggagaactacttttgatccgggagatgagtataacaaggatgaaacatcgaatggccatggtgttgagcaaggcaactggagtgcattccaaaatttcttgttgagagcagaagaaaaaacaagatctagtgatgcagacctgtttgctggtgagaaagaacccccatcacggagaaaacagaatgtaaacacagcagatcctattattttagttgagagagatggtggcaacgtctgtgagcagaacaaaataggttttgattcagccaatgggaggactagagttatccgggtcatgtccaatgatgaacttgttatgtctggagaagggagaatctatatggattgtgaaatgaaggagattgaagctggtggaggaaggtacaggagagggacaggtgacgactacatggtttatggtcagggatgtcagatagacagacattgtttgttggatcctcttgcagaggcccagtacaagaatcctgttcagcaggacaataataggaatggtgttacggatgagtcctttatgattcctcttaggtccagctcacaggataatatcggagcagagagcagaactactatggacatagatgttgagcttccttctagcattcataaagcatcagataaaaaggctgggcatcagcttttttacgaacctgatgaactggtgcctgagcgttgattcgaagatgtttcatttggatatgatccagcaatggattatgatagccacatgcagagtactgtgaaggttgaagatgcaaaaccagaggatgtcttgccggtcactgacggtgtacagaaggtagagaaagagaagctaaagaacgcaagggatggttcagataaaagaacgaaggattccctattgaggagactatcggcgccaaggaccccactgaatgatgcacaaaaacgtgcacagaacctgcgtgcatataaagcagaccttcagaaactgaagaaagagcaggaagaagagcaaataaagcgattggagaggcttaaattggataggcaaaagtggatcgccgcaagaggtaatggaaagggtccagggaacgatgctcctagagcgaacggtatgaatggacttagtaaatcagttccaaccttcactgggatgaaaagggttgaaaacggaacgactgaatcactcagcggtcgactgaagaggctttctgaacccaaaagcattgttggggcagagcattcgttgaacccaaagtcagctggtgcaggccgttcacgaagaagtatggcatgagttgatgtgagatggagaactgaatagcttgagtccatcgtgccactcgctagcccggtaacttacttactagaaacgtgaaaggcatctcaaaaggctttttgtacaggaaaaaaggaaatggctggctctgtagcattgtctgcttccaagatttgtgatggaaaatcgagctatctttcaatggcatggcgttggactttcaattttaacataattatttcattcttttgattcagggtggcttgtgatagctgtaaacctggtttttttcccaatgtggagctatattgtgggtgtatttatggaatggattgatctgtgtttgagatatattgtggtatttatatagtgtataaatgtccgactttggattggac

SEQ ID NO: 215310 - DNA, 2958 bp, Zea Mays
ttggaatactttcctccgctcagcgccggggcagcatttgctcgcgattaaccgccccgcttttgccgcttatttcagcttgtccttttcccccagtggggaaggttagcatccagcacaagcaaccgccggttcttgccgcagtttctgcgcgctcgctttttgtccgcaagaccgaggagagcgagagcggagaggttcctgtgtggaattcttcagcgatgaggcccggcgcccgtctggactcggtggtcttccagctcactcccacccggaccaggttcgacttggtcctcatagcgaatggccggaaggagaagtttgcatctggtttgttgaaacccttcctggctcacctgaaggccgcccaggatcagattgcgaagggagggtactcgatcacacttgaaccaatctcagagttcgacgtgtcattgttcacgagaggcgccgtggagaggtttgtgcgtttcgtgagtactacggaggtccttgagcgagtcacaacactggagtctgagatcctgcagctcgaggatgccattgctatccagaggaacgatagtcttagattaaaatgtgtggaccggcaaattatgatcctaattcagccacggcaattgttgtttacaagcctgggtcaaattcaattccaccaatgcagaatgaaacaacagcacaggaggagaattcaaagaaggcatgttcacatttcatcgaactatggaagcagaagcatgaaactggacaatggattgaagttgaacctgaagcaatttctacacgctctgaatttcctccatttaatgcatctggcattgtgttgatgggagacaacatgaagcaaaacctggaatcagggtctattaatggagagccaaatggcgaggatggagctaaagctgatcagaagtccagccagcagatggggtctcatgctgcatatcctccatgggcaatgcatcctgcatctggtgcagttctttacccaccttatcctatgcaaggaatgcctttctatcctggggtgaatccctactaccctccatatcctccagtggatgatcccagttcaggtggaggaaattctcatggtcacaagtcacatagaaaggggaagaggtctggaaagaagcctagtgtagttgttatcaagaatgtgaatgtaacatctaagaagtgtggctcatcagagagtgaatcacaatcaagttctgaagttgagtctgctgacagtgacaactcacactccaaatcaagagaaagaaagcataaaagctcatgttcaaaggagggtaggagaactacttttgatccgggagatgagtataacaaggatgaaacatcgaatggccatggtgttgagcaaggcaactggagtgcattccaaaatttcttgttgagagcagaagaaaaaacaagatctagtgatgcagacctgtttgctggtgagaaagaacccccatcacggagaaaacagaatgtaaacacagcagatcctattattttagttgagagagatggtggcaacgtctgtgagcagaacaaaataggttttgattcagccaatgggaggactagagttatccgggtcatgtccaatgatgaacttgttatgtctggagaagggagaatctatatggattgtgaaatgaaggagattgaagctggtggaggaaggtacaggagagggacaggtgacgactacatggtttatggtcagggatgtcagatagacagacattgtttgttggatcctcttgcagaggcccagtacaagaatcctgttcagcaggacaataataggaatggtgttacggatgagtcctttatgattcctcttaggtccagctcacaggataatatcggagcagagagcagaactactatggacatagatgttgagcttccttctagcattcataaagcatcagataaaaaggctgggcatcagcttttttacgaacctgatgaactggtgcctgagcgttgattcgaagatgtttcatttggatatgatccagcaatggattatgatagccacatgcagagtactgtgaaggttgaagatgcaaaaccagaggatgtcttgccggtcactgacggtgtacagaaggtagagaaagagaagctaaagaacgcaagggatggttcagataaaagaacgaaggattccctattgaggagactatcggcgccaaggaccccactgaatgatgcacaaaaacgtgcacagaacctgcgtgcatataaagcagaccttcagaaactgaagaaagagcaggaagaagagcaaataaagcgattggagaggcttaaattggataggcaaaagtggatcgccgcaagaggtaatggaaagggtccagggaacgatgctcctagagcgaacggtatgaatggacttagtaaatcagttccaaccttcactgggatgaaaagggttgaaaacggaacgactgaatcactcagcggtcgactgaagaggctttctgaacccaaaagcattgttggggcagagcattcgttgaacccaaagtcagctggtgcaggccgttcacgaagaagtatggcatgagttgatgtgagatggagaactgaatagcttgagtccatcgtgccactcgctagcccggtaacttacttactagaaacgtgaaaggcatctcaaaaggctttttgtacaggaaaaaaggaaatggctggctctgtagcattgtctgcttccaagatttgtgatggaaaatcgagctatctttcaatggcatggcgttggactttcaattttaacataattatttcattcttttgattcagggtggcttgtgatagctgtaaacctggtttttttcccaatgtggagctatattgtgggtgtatttatggaatggattgatctgtgtttgagatatattgtggtatttatatagtgtataaatgtccgactttggattggac

SEQ ID NO: 215311 - DNA, 3630 bp, Zea Mays
ttggaatactttcctccgctcagcgccggggcagcatttgctcgcgattaaccgccccgcttttgccgcttatttcagcttgtccttttcccccagtggggaaggttagcatccagcacaagcaaccgccggttcttgccgcagtttctgcgcgctcgctttttgtccgcaagaccgaggagagcgagagcggagaggttcctgtgtggaattcttcagcgatgaggcccggcgcccgtctggactcggtggtcttccagctcactcccacccggaccaggttcgacttggtcctcatagcgaatggccggaaggagaagtttgcatctggtttgttgaaacccttcctggctcacctgaaggccgcccaggatcagattgcgaagggagggtactcgatcacacttgaaccaatctcagagttcgacgtgtcattgttcacgagaggcgccgtggagaggtttgtgcgtttcgtgagtactacggaggtccttgagcgagtcacaacactggagtctgagatcctgcagctcgaggatgccattgctatccagaggaacgatagtcttagattaaaatgtgtcggagaccatggaagaaagttgactgaaagcaatgaaagtagtatgacgctgcaccaacctgattgctttctgagagcatgttgtatagaatagtgcatgcctttgaggattgtctgaatcacattgtttcgttgggctaccaaaaagaaaagcaaggtgcaatccactactattgttttagaatctagtcatcatggagtttgatgcgacatcacatcaagggccattattaagttggtacttgtcacttaactcccaaaatgttaggggtcataatctgatttatggacaacctttactatcgtttaatgttatgaattttctgtgtgatcacaataacttacatatgaatctatattttttgaagacctgaatatttagcaaaatcttatttgaaactggagaattctggatggtattatattctacattcaggggagtactgaaatggatccagctgtttcatccttttattcgccttaccatagtcacaagaaacgggtacagcggtactatggtagcgacccttgacacagaaatatcgtccccgcgaccaggatacacatgataattttcgttcccagtttcccaccatgtaaaaatctctcacaagtagtgtaccatgttccttggccctatcgatccaggaactttatgactatgcgccttacctgtcacagcctgccatatctttttatatttatttctaccacatgcctaatactatccatccactaataggtggaccggcaaattatgatcctaattcagccacggcaattgttgtttacaagcctgggtcaaattcaattccaccaatgcagaatgaaacaacagcacaggaggagaattcaaagaaggcatgttcacatttcatcgaactatggaagcagaagcatgaaactggacaatggattgaagttgaacctgaagcaatttctacacgctctgaatttcctccatttaatgcatctggcattgtgttgatgggagacaacatgaagcaaaacctggaatcagggtctattaatggagagccaaatggcgaggatggagctaaagctgatcagaagtccagccagcagatggggtctcatgctgcatatcctccatgggcaatgcatcctgcatctggtgcagttctttacccaccttatcctatgcaaggaatgcctttctatcctggggtgaatccctactaccctccatatcctccagtggatgatcccagttcaggtggaggaaattctcatggtcacaagtcacatagaaaggggaagaggtctggaaagaagcctagtgtagttgttatcaagaatgtgaatgtaacatctaagaagtgtggctcatcagagagtgaatcacaatcaagttctgaagttgagtctgctgacagtgacaactcacactccaaatcaagagaaagaaagcataaaagctcatgttcaaaggagggtaggagaactacttttgatccgggagatgagtataacaaggatgaaacatcgaatggccatggtgttgagcaaggcaactggagtgcattccaaaatttcttgttgagagcagaagaaaaaacaagatctagtgatgcagacctgtttgctggtgagaaagaacccccatcacggagaaaacagaatgtaaacacagcagatcctattattttagttgagagagatggtggcaacgtctgtgagcagaacaaaataggttttgattcagccaatgggaggactagagttatccgggtcatgtccaatgatgaacttgttatgtctggagaagggagaatctatatggattgtgaaatgaaggagattgaagctggtggaggaaggtacaggagagggacaggtgacgactacatggtttatggtcagggatgtcagatagacagacattgtttgttggatcctcttgcagaggcccagtacaagaatcctgttcagcaggacaataataggaatggtgttacggatgagtcctttatgattcctcttaggtccagctcacaggataatatcggagcagagagcagaactactatggacatagatgttgagcttccttctagcattcataaagcatcagataaaaaggctgggcatcagcttttttacgaacctgatgaactgagtactgtgaaggttgaagatgcaaaaccagaggatgtcttgccggtcactgacggtgtacagaaggtagagaaagagaagctaaagaacgcaagggatggttcagataaaagaacgaaggattccctattgaggagactatcggcgccaaggaccccactgaatgatgcacaaaaacgtgcacagaacctgcgtgcatataaagcagaccttcagaaactgaagaaagagcaggaagaagagcaaataaagcgattggagaggcttaaattggataggcaaaagtggatcgccgcaagaggtaatggaaagggtccagggaacgatgctcctagagcgaacggtatgaatggacttagtaaatcagttccaaccttcactgggatgaaaagggttgaaaacggaacgactgaatcactcagcggtcgactgaagaggctttctgaacccaaaagcattgttggggcagagcattcgttgaacccaaagtcagctggtgcaggccgttcacgaagaagtatggcatgagttgatgtgagatggagaactgaatagcttgagtccatcgtgccactcgctagcccggtaacttacttactagaaacgtgaaaggcatctcaaaaggctttttgtacaggaaaaaaggaaatggctggctctgtagcattgtctgcttccaagatttgtgatggaaaatcgagctatctttcaatggcatggcgttggactttcaattttaacataattatttcattcttttgattcagggtggcttgtgatagctgtaaacctggtttttttcccaatgtggagctatattgtgggtgtatttatggaatggattgatctgtgtttgagatatattgtggtatttatatagtgtataaatgtccgactttggattggac

SEQ ID NO: 215312 - DNA, 3249 bp, Zea Mays
ttggaatactttcctccgctcagcgccggggcagcatttgctcgcgattaaccgccccgcttttgccgcttatttcagcttgtccttttcccccagtggggaaggttagcatccagcacaagcaaccgccggttcttgccgcagtttctgcgcgctcgctttttgtccgcaagaccgaggagagcgagagcggagaggttcctgtgtggaattcttcagcgatgaggcccggcgcccgtctggactcggtggtcttccagctcactcccacccggaccaggttcgacttggtcctcatagcgaatggccggaaggagaagtttgcatctggtttgttgaaacccttcctggctcacctgaaggccgcccaggatcagattgcgaagggagggtactcgatcacacttgaaccaatctcagagttcgacgtgtcattgttcacgagaggcgccgtggagaggtttgtgcgtttcgtgagtactacggaggtccttgagcgagtcacaacactggagtctgagatcctgcagctcgaggatgccattgctatccagaggaacgatagtcttagattaaaatgtgtcggagaccatggaagaaagttgactgaaagcaatgaaagtagtatgacgctgcaccaacctgattgctttctgagagcatgttgtatagaatagtgcatgcctttgaggattgtctgaatcacattgtttcgttgggctaccaaaaagaaaagcaaggtggaccggcaaattatgatcctaattcagccacggcaattgttgtttacaagcctgggtcaaattcaattccaccaatgcagaatgaaacaacagcacaggaggagaattcaaaagttcaaaactgtgttaagaaaagagcaagctatggctttcactcgtgctgtggctgctgggtttgacattgacaacctgggttactttacttgattgcgtttgcagagcgctttggtgcttcacgtatgatgaaggcatgttcacatttcatcgaactatggaagcagaagcatgaaactggacaatggattgaagttgaacctgaagcaatttctacacgctctgaatttcctccatttaatgcatctggcattgtgttgatgggagacaacatgaagcaaaacctggaatcagggtctattaatggagagccaaatggcgaggatggagctaaagctgatcagaagtccagccagcagatggggtctcatgctgcatatcctccatgggcaatgcatcctgcatctggtgcagttctttacccaccttatcctatgcaaggaatgcctttctatcctggggtgaatccctactaccctccatatcctccagtggatgatcccagttcaggtggaggaaattctcatggtcacaagtcacatagaaaggggaagaggtctggaaagaagcctagtgtagttgttatcaagaatgtgaatgtaacatctaagaagtgtggctcatcagagagtgaatcacaatcaagttctgaagttgagtctgctgacagtgacaactcacactccaaatcaagagaaagaaagcataaaagctcatgttcaaaggagggtaggagaactacttttgatccgggagatgagtataacaaggatgaaacatcgaatggccatggtgttgagcaaggcaactggagtgcattccaaaatttcttgttgagagcagaagaaaaaacaagatctagtgatgcagacctgtttgctggtgagaaagaacccccatcacggagaaaacagaatgtaaacacagcagatcctattattttagttgagagagatggtggcaacgtctgtgagcagaacaaaataggttttgattcagccaatgggaggactagagttatccgggtcatgtccaatgatgaacttgttatgtctggagaagggagaatctatatggattgtgaaatgaaggagattgaagctggtggaggaaggtacaggagagggacaggtgacgactacatggtttatggtcagggatgtcagatagacagacattgtttgttggatcctcttgcagaggcccagtacaagaatcctgttcagcaggacaataataggaatggtgttacggatgagtcctttatgattcctcttaggtccagctcacaggataatatcggagcagagagcagaactactatggacatagatgttgagcttccttctagcattcataaagcatcagataaaaaggctgggcatcagcttttttacgaacctgatgaactggtgcctgagcgttgattcgaagatgtttcatttggatatgatccagcaatggattatgatagccacatgcagagtactgtgaaggttgaagatgcaaaaccagaggatgtcttgccggtcactgacggtgtacagaaggtagagaaagagaagctaaagaacgcaagggatggttcagataaaagaacgaaggattccctattgaggagactatcggcgccaaggaccccactgaatgatgcacaaaaacgtgcacagaacctgcgtgcatataaagcagaccttcagaaactgaagaaagagcaggaagaagagcaaataaagcgattggagaggcttaaattggataggcaaaagtggatcgccgcaagaggtaatggaaagggtccagggaacgatgctcctagagcgaacggtatgaatggacttagtaaatcagttccaaccttcactgggatgaaaagggttgaaaacggaacgactgaatcactcagcggtcgactgaagaggctttctgaacccaaaagcattgttggggcagagcattcgttgaacccaaagtcagctggtgcaggccgttcacgaagaagtatggcatgagttgatgtgagatggagaactgaatagcttgagtccatcgtgccactcgctagcccggtaacttacttactagaaacgtgaaaggcatctcaaaaggctttttgtacaggaaaaaaggaaatggctggctctgtagcattgtctgcttccaagatttgtgatggaaaatcgagctatctttcaatggcatggcgttggactttcaattttaacataattatttcattcttttgattcagggtggcttgtgatagctgtaaacctggtttttttcccaatgtggagctatattgtgggtgtatttatggaatggattgatctgtgtttgagatatattgtggtatttatatagtgtataaatgtccgactttggattggac

SEQ ID NO: 215313 - DNA, 2851 bp, Zea Mays
gccatttaaaaggtcggagaccatggaagaaagttgactgaaagcaatgaaagtagtatgacgctgcaccaacctgattgctttctgagagcatgttgtatagaatagtgcatgcctttgaggattgtctgaatcacattgtttcgttgggctaccaaaaagaaaagcaaggtgcaatccactactattgttttagaatctagtcatcatggagtttgatgcgacatcacatcaagggccattattaagttggtggaccggcaaattatgatcctaattcagccacggcaattgttgtttacaagcctgggtcaaattcaattccaccaatgcagaatgaaacaacagcacaggaggagaattcaaaagttcaaaactgtgttaagaaaagagcaagctatggctttcactcgtgctgtggctgctgggtttgacattgacaacctgggttactttacttgattgcgtttgcagagcgctttggtgcttcacgtatgatgaaggcatgttcacatttcatcgaactatggaagcagaagcatgaaactggacaatggattgaagttgaacctgaagcaatttctacacgctctgaatttcctccatttaatgcatctggcattgtgttgatgggagacaacatgaagcaaaacctggaatcagggtctattaatggagagccaaatggcgaggatggagctaaagctgatcagaagtccagccagcagatggggtctcatgctgcatatcctccatgggcaatgcatcctgcatctggtgcagttctttacccaccttatcctatgcaaggaatgcctttctatcctggggtgaatccctactaccctccatatcctccagtggatgatcccaggtaccactagccaggaaggaaatctttgaggaagcactcctcggatagtaaggactcagaaactcttgacgctgaaagtgaccatagcagttcaggtggaggaaattctcatggtcacaagtcacatagaaaggggaagaggtctggaaagaagcctagtgtagttgttatcaagaatgtgaatgtaacatctaagaagtgtggctcatcagagagtgaatcacaatcaagttctgaagttgagtctgctgacagtgacaactcacactccaaatcaagagaaagaaagcataaaagctcatgttcaaaggagggtaggagaactacttttgatccgggagatgagtataacaaggatgaaacatcgaatggccatggtgttgagcaaggcaactggagtgcattccaaaatttcttgttgagagcagaagaaaaaacaagatctagtgatgcagacctgtttgctggtgagaaagaacccccatcacggagaaaacagaatgtaaacacagcagatcctattattttagttgagagagatggtggcaacgtctgtgagcagaacaaaataggttttgattcagccaatgggaggactagagttatccgggtcatgtccaatgatgaacttgttatgtctggagaagggagaatctatatggattgtgaaatgaaggagattgaagctggtggaggaaggtacaggagagggacaggtgacgactacatggtttatggtcagggatgtcagatagacagacattgtttgttggatcctcttgcagaggcccagtacaagaatcctgttcagcaggacaataataggaatggtgttacggatgagtcctttatgattcctcttaggtccagctcacaggataatatcggagcagagagcagaactactatggacatagatgttgagcttccttctagcattcataaagcatcagataaaaaggctgggcatcagcttttttacgaacctgatgaactggtgcctgagcgttgattcgaagatgtttcatttggatatgatccagcaatggattatgatagccacatgcagagtactgtgaaggttgaagatgcaaaaccagaggatgtcttgccggtcactgacggtgtacagaaggtagagaaagagaagctaaagaacgcaagggatggttcagataaaagaacgaaggattccctattgaggagactatcggcgccaaggaccccactgaatgatgcacaaaaacgtgcacagaacctgcgtgcatataaagcagaccttcagaaactgaagaaagagcaggaagaagagcaaataaagcgattggagaggcttaaattggataggcaaaagtggatcgccgcaagaggtaatggaaagggtccagggaacgatgctcctagagcgaacggtatgaatggacttagtaaatcagttccaaccttcactgggatgaaaagggttgaaaacggaacgactgaatcactcagcggtcgactgaagaggctttctgaacccaaaagcattgttggggcagagcattcgttgaacccaaagtcagctggtgcaggccgttcacgaagaagtatggcatgagttgatgtgagatggagaactgaatagcttgagtccatcgtgccactcgctagcccggtaacttacttactagaaacgtgaaaggcatctcaaaaggctttttgtacaggaaaaaaggaaatggctggctctgtagcattgtctgcttccaagatttgtgatggaaaatcgagctatctttcaatggcatggcgttggactttcaattttaacataattatttcattcttttgattcagggtggcttgtgatagctgtaaacctggtttttttcccaatgtggagctatattgtgggtgtatttatggaatggattgatctgtgtttgagatatattgtggtatttatatagtgtataaatgtccgactttggattggac

SEQ ID NO: 215314 - DNA, 3063 bp, Zea Mays
gaccatggaagaaagttgactgaaagcaatgaaagtagtatgacgctgcaccaacctgattgctttctgagagcatgttgtatagaatagtgcatgcctttgaggattgtctgaatcacattgtttcgttgggctaccaaaaagaaaagcaaggtgcaatccactactattgttttagaatctagtcatcatggagtttgatgcgacatcacatcaagggccattattaagttggtacttgtcacttaactcccaaaatgttaggggtcataatctgatttatggacaacctttactatcgtttaatgttatgaattttctgtgtgatcacaataacttacatatgaatctatattttttgaagacctgaatatttagcaaaatcttatttgaaactggagaattctggatggtattatattctacattcaggggagtactgaaatggatccagctgtttcatccttttattcgccttaccatagtcacaagaaacgggtacagcggtactatggtagcgacccttgacacagaaatatcgtccccgcgaccaggatacacatgataattttcgttcccagtttcccaccatgtaaaaatctctcacaagtagtgtaccatgttccttggccctatcgatccaggaactttatgactatgcgccttacctgtcacagcctgccatatctttttatatttatttctaccacatgcctaatactatccatccactaataggtggaccggcaaattatgatcctaattcagccacggcaattgttgtttacaagcctgggtcaaattcaattccaccaatgcagaatgaaacaacagcacaggaggagaattcaaagaaggcatgttcacatttcatcgaactatggaagcagaagcatgaaactggacaatggattgaagttgaacctgaagcaatttctacacgctctgaatttcctccatttaatgcatctggcattgtgttgatgggagacaacatgaagcaaaacctggaatcagggtctattaatggagagccaaatggcgaggatggagctaaagctgatcagaagtccagccagcagatggggtctcatgctgcatatcctccatgggcaatgcatcctgcatctggtgcagttctttacccaccttatcctatgcaaggaatgcctttctatcctggggtgaatccctactaccctccatatcctccagtggatgatcccagttcaggtggaggaaattctcatggtcacaagtcacatagaaaggggaagaggtctggaaagaagcctagtgtagttgttatcaagaatgtgaatgtaacatctaagaagtgtggctcatcagagagtgaatcacaatcaagttctgaagttgagtctgctgacagtgacaactcacactccaaatcaagagaaagaaagcataaaagctcatgttcaaaggagggtaggagaactacttttgatccgggagatgagtataacaaggatgaaacatcgaatggccatggtgttgagcaaggcaactggagtgcattccaaaatttcttgttgagagcagaagaaaaaacaagatctagtgatgcagacctgtttgctggtgagaaagaacccccatcacggagaaaacagaatgtaaacacagcagatcctattattttagttgagagagatggtggcaacgtctgtgagcagaacaaaataggttttgattcagccaatgggaggactagagttatccgggtcatgtccaatgatgaacttgttatgtctggagaagggagaatctatatggattgtgaaatgaaggagattgaagctggtggaggaaggtacaggagagggacaggtgacgactacatggtttatggtcagggatgtcagatagacagacattgtttgttggatcctcttgcagaggcccagtacaagaatcctgttcagcaggacaataataggaatggtgttacggatgagtcctttatgattcctcttaggtccagctcacaggataatatcggagcagagagcagaactactatggacatagatgttgagcttccttctagcattcataaagcatcagataaaaaggctgggcatcagcttttttacgaacctgatgaactgagtactgtgaaggttgaagatgcaaaaccagaggatgtcttgccggtcactgacggtgtacagaaggtagagaaagagaagctaaagaacgcaagggatggttcagataaaagaacgaaggattccctattgaggagactatcggcgccaaggaccccactgaatgatgcacaaaaacgtgcacagaacctgcgtgcatataaagcagaccttcagaaactgaagaaagagcagtgacttttcttatttctcaggaagaagagcaaataaagcgattggagaggcttaaattggataggcaaaagtggatcgccgcaagaggtaatggaaagggtccagggaacgatgctcctagagcgaacggtatgaatggacttagtaaatcagttccaaccttcactgggatgaaaagggttgaaaacggaacgactgaatcactcagcggtcgactgaagaggctttctgaacccaaaagcattgttggggcagagcattcgttgaacccaaagtcagctggtgcaggccgttcacgaagaagtatggcatgagttgatgtgagatggagaactgaatagcttgagtccatcgtgccactcgctagcccggtaacttacttactagaaacgtgaaaggcatctcaaaaggctttttgtacaggaaaaaaggaaatggctggctctgtagcattgtctgcttccaagatttgtgatggaaaatcgagctatctttcaatggcatggcgttggactttcaattttaacataattatttcattcttttgattcagggtggcttgtgatagctgtaaacctggtttttttcccaatgtggagctatattgtgggtgtatttatggaatggattgatctgtgtttgagatatattgtggtatttatatagtgtataaatgtccgactttggattggac

SEQ ID NO: 215315 - DNA, 2279 bp, Zea Mays
ctgttgcattcctttttttattaagaatgctgctcgcttggacagtgaaataatttatgatagggatttcgactatgactactttggcttcaaaactctggagaggtcttacctcttgaagcttggtgggaaggtcgttgaaaggcctcagcacatgctgatgagggtttcagtgggaatacacaaggaagacattgagtctgccattaggacgtaccatctgatgtcccagcgctggtttacacatgcatcaccaacacttttcaacgctggcacaccgaggccccaattaagcagctgttttcttatatgcatgaaagatgacagcattgagggaatctatgaaaccctgaaggagtgtgctgtaataagcaaatcagctggaggaattggtgtctcagttcataatattcgtgctactgggagttacatacgaggaacaaatggaacatcaaatggaattgtgcctatgttacgagtctttaatgatactgctcgttatgttgatcagggtggtgggaaaagaaagggtgcatttgctgtatacttggagccttggcatgctgatattttcgagttccttgatctaagaaagaaccatgggaaggaggaaaatcgtgcaagggatcttttctatgcgctatgggttcctgatctattcatgcaaagagtccagagtaatggagaatggtcattgttttgccctaatgaagctccagggttggctgattgctggggtgaggagtttgataatttgtacaagaaatatgagagccaaggcaaggcaaagaaagttgttcctgcacagaccctctggtttgacattttgaaggcacaaatagagactggtacaccttatatgctttacaaggatacttgcaataggaaaagtaaccagcagaatctgggcacaattaaatcgtcaaacttgtgcactgagataattgagtttacaagccctactgaaactgctgtctgcaacctagcatctattgctttacctcgttttgttcgggaaaagggtgttccattagagtcccatccatctaagcttgtgggtagcagtgattcgaaaaatagatattttgattttgagaagctggctgaggttacctcaactgttacttacaatcttaacaaaattatcgatattaattactatcctgttgagacagcaaagagatcaaatatgcgtcacaggccaattggcataggtgttcaaggcctggccgatactttcatattattgggcatgccatttgattcactagaggctcatcagttgaataaggatatatttgaaactatctactatcatgctctgaaatcttctgctgaacttgctgttaaagaaggtccctatgaaacatatgaagggagccctgttagcaagggcattcttcaacctgacatgtggaatgtagtgccatctaccaggtggaattggccatctctaagggagaccatttctaaagctgggataagaaattctcttcttgttgctccaatgcccactgcttccactagtcagattcttggcaacaatgagtgctttgaaccctacacatctaatatttacagtcgacgggttctaagtggggaatttgttgtggttaacaagcatcttcttcatgatttgactgaaatgggcatttggactcctactctgaaaaaccagataatatatgatgatggttctgtccaaaagatagcagaaatcccagatgatctgaaagcaatctacaagactgtttgggagatcaagcagaaaactttagttgatatggcggttgaccgtggatgctatattgaccagagccagagcctcaacgtccacatggagcaagcaaactttgggaagctaacatcacttcacttccatgcttggtccaagggcctgaaaactggaatgtactatctacgcacacgagctgctgctgatgcaatcaagtttaccgtcgataccacacttctaaaggagaatgggaatgggatgaatgatggaaagcccacagaggaagacgtagaagctaaaatggcacaaatggtctgttcttttaacaaccgggaagagtgcctggcgtgtggaagctagattggagctccatctggacactgcaattatttgtgacctcaggccacagcattatatgccgccggctgatgactggagcccaataatcagaacgaaatctgatgtaggatgagacgagcaagccatagaggatccagggcttcagctggttgagactgctgagcaggagctcgttgaaggcaag

SEQ ID NO: 215316 - DNA, 2740 bp, Zea Mays
ctccccccgccccacctcaatacaatcctctgctcgcgttctctcgtcccggcggcggcgtaggcgcgcgcaccaggtgttcgacgggagttttcgccaccgcggaagatgtacgtggtcaagcgggacggccgccaggagacagtgcacttcgacaagatcacggcgcgcctcaagaagctcagctacggccttagccaggaccactgcgacccggtgctcgtcgcgcagaaggtctgcgcgggggtctacaagggcgtcaccaccagccagctcgacgagctcgccgccgagaccgcggcggccatgactgcgtcccaccccgactacgcctcgttggcggcgaggattgctgtgtctaacctgcacaagaacacaaagaagtccttctcggagacgattaaggacatgtacaggcactttaacgagaggtctgggctgatggcccctctggtcgctgaagatgtttatgaaatcatcatgaataatgctgctcgcttggacagtgaaataatttatgatagggatttcgactatgactactttggcttcaaaactctggagaggtcttacctcttgaagcttggtgggaaggtcgttgaaaggcctcagcacatgctgatgagggtttcagtgggaatacacaaggaagacattgagtctgccattaggacgtaccatctgatgtcccagcgctggtttacacatgcatcaccaacacttttcaacgctggcacaccgaggccccaattaagcagctgttttcttatatgcatgaaagatgacagcattgagggaatctatgaaaccctgaaggagtgtgctgtaataagcaaatcagctggaggaattggtgtctcagttcataatattcgtgctactgggagttacatacgaggaacaaatggaacatcaaatggaattgtgcctatgttacgagtctttaatgatactgctcgttatgttgatcagggtggtgggaaaagaaagggtgcatttgctgtatacttggagccttggcatgctgatattttcgagttccttgatctaagaaagaaccatgggaaggaggaaaatcgtgcaagggatcttttctatgcgctatgggttcctgatctattcatgcaaagagtccagagtaatggagaatggtcattgttttgccctaatgaagctccagggttggctgattgctggggtgaggagtttgataatttgtacaagaaatatgagagccaaggcaaggcaaagaaagttgttcctgcacagaccctctggtttgacattttgaaggcacaaatagagactggtacaccttatatgctttacaaggatacttgcaataggaaaagtaaccagcagaatctgggcacaattaaatcgtcaaacttgtgcactgagataattgagtttacaagccctactgaaactgctgtctgcaacctagcatctattgctttacctcgttttgttcgggaaaagggtgttccattagagtcccatccatctaagcttgtgggtagcagtgattcgaaaaatagatattttgattttgagaagctggctgaggttacctcaactgttacttacaatcttaacaaaattatcgatattaattactatcctgttgagacagcaaagagatcaaatatgcgtcacaggccaattggcataggtgttcaaggcctggccgatactttcatattattgggcatgccatttgattcactagaggctcatcagttgaataaggatatatttgaaactatctactatcatgctctgaaatcttctgctgaacttgctgttaaagaaggtccctatgaaacatatgaagggagccctgttagcaagggcattcttcaacctgacatgtggaatgtagtgccatctaccaggtggaattggccatctctaagggagaccatttctaaagctgggataagaaattctcttcttgttgctccaatgcccactgcttccactagtcagattcttggcaacaatgagtgctttgaaccctacacatctaatatttacagtcgacgggttctaagtggggaatttgttgtggttaacaagcatcttcttcatgatttgactgaaatgggcatttggactcctactctgaaaaaccagataatatatgatgatggttctgtccaaaagatagcagaaatcccagatgatctgaaagcaatctacaagactgtttgggagatcaagcagaaaactttagttgatatggcggttgaccgtggatgctatattgaccagagccagagcctcaacgtccacatggagcaagcaaactttgggaagctaacatcacttcacttccatgcttggtccaagggcctgaaaactggaatgtactatctacgcacacgagctgctgctgatgcaatcaagtttaccgtcgataccacacttctaaaggagaatgggaatgggatgaatgatggaaagcccacagaggaagacgtagaagctaaaatggcacaaatggtctgttcttttaacaaccgggaagagtgcctggcgtgtggaagctagattggagctccatctggacactgcaattatttgtgacctcaggccacagcattatatgccgccggctgatgactggagcccaataatcagaacgaaatctgatgtaggatgagacgagcaagccatagaggatccagggcttcagctggttgagactgctgagcaggagctcgttgaaggcaag

SEQ ID NO: 215317 - DNA, 2867 bp, Zea Mays
tctttccgcgccgcgaaggcgtttaaatccgcccccaaaccctactgcccccctcccatccctgcccctccccccgccccacctcaatacaatcctctgctcgcgttctctcgtcccggcggcggcgtaggcgcgcgcaccaggtgttcgacgggagttttcgccaccgcggaagatgtacgtggtcaagcgggacggccgccaggagacagtgcacttcgacaagatcacggcgcgcctcaagaagctcagctacggccttagccaggaccactgcgacccggtgctcgtcgcgcagaaggtctgcgcgggggtctacaagggcgtcaccaccagccagctcgacgagctcgccgccgagaccgcggcggccatgactgcgtcccaccccgactacgcctcgttggcggcgaggattgctgtgtctaacctgcacaagaacacaaagaagtccttctcggagacggtgaaggctggattagttggattgggttgtgagttggaatgtggccgttgtggatgcaggattaaggacatgtacaggcactttaacgagaggtctgggctgatggcccctctggtcgctgaagatgtttatgaaatcatcatgaataatgctgctcgcttggacagtgaaataatttatgatagggatttcgactatgactactttggcttcaaaactctggagaggtcttacctcttgaagcttggtgggaaggtcgttgaaaggcctcagcacatgctgatgagggtttcagtgggaatacacaaggaagacattgagtctgccattaggacgtaccatctgatgtcccagcgctggtttacacatgcatcaccaacacttttcaacgctggcacaccgaggccccaattaagcagctgttttcttatatgcatgaaagatgacagcattgagggaatctatgaaaccctgaaggagtgtgctgtaataagcaaatcagctggaggaattggtgtctcagttcataatattcgtgctactgggagttacatacgaggaacaaatggaacatcaaatggaattgtgcctatgttacgagtctttaatgatactgctcgttatgttgatcagggtggtgggaaaagaaagggtgcatttgctgtatacttggagccttggcatgctgatattttcgagttccttgatctaagaaagaaccatgggaaggaggaaaatcgtgcaagggatcttttctatgcgctatgggttcctgatctattcatgcaaagagtccagagtaatggagaatggtcattgttttgccctaatgaagctccagggttggctgattgctggggtgaggagtttgataatttgtacaagaaatatgagagccaaggcaaggcaaagaaagttgttcctgcacagaccctctggtttgacattttgaaggcacaaatagagactggtacaccttatatgctttacaaggatacttgcaataggaaaagtaaccagcagaatctgggcacaattaaatcgtcaaacttgtgcactgagataattgagtttacaagccctactgaaactgctgtctgcaacctagcatctattgctttacctcgttttgttcgggaaaagggtgttccattagagtcccatccatctaagcttgtgggtagcagtgattcgaaaaatagatattttgattttgagaagctggctgaggttacctcaactgttacttacaatcttaacaaaattatcgatattaattactatcctgttgagacagcaaagagatcaaatatgcgtcacaggccaattggcataggtgttcaaggcctggccgatactttcatattattgggcatgccatttgattcactagaggctcatcagttgaataaggatatatttgaaactatctactatcatgctctgaaatcttctgctgaacttgctgttaaagaaggtccctatgaaacatatgaagggagccctgttagcaagggcattcttcaacctgacatgtggaatgtagtgccatctaccaggtggaattggccatctctaagggagaccatttctaaagctgggataagaaattctcttcttgttgctccaatgcccactgcttccactagtcagattcttggcaacaatgagtgctttgaaccctacacatctaatatttacagtcgacgggttctaagtggggaatttgttgtggttaacaagcatcttcttcatgatttgactgaaatgggcatttggactcctactctgaaaaaccagataatatatgatgatggttctgtccaaaagatagcagaaatcccagatgatctgaaagcaatctacaagactgtttgggagatcaagcagaaaactttagttgatatggcggttgaccgtggatgctatattgaccagagccagagcctcaacgtccacatggagcaagcaaactttgggaagctaacatcacttcacttccatgcttggtccaagggcctgaaaactggaatgtactatctacgcacacgagctgctgctgatgcaatcaagtttaccgtcgataccacacttctaaaggagaatgggaatgggatgaatgatggaaagcccacagaggaagacgtagaagctaaaatggcacaaatggtctgttcttttaacaaccgggaagagtgcctggcgtgtggaagctagattggagctccatctggacactgcaattatttgtgacctcaggccacagcattatatgccgccggctgatgactggagcccaataatcagaacgaaatctgatgtaggatgagacgagcaagccatagaggatccagggcttcagctggttgagactgctgagcaggagctcgttgaaggcaag

SEQ ID NO: 215318 - DNA, 3018 bp, Zea Mays
cggcgtaggcgcgcgcaccaggtgttcgacgggagttttcgccaccgcggaagatgtacgtggtcaagcgggacggccgccaggagacagtgcacttcgacaagatcacggcgcgcctcaagaagctcagctacggccttagccaggaccactgcgacccggtgctcgtcgcgcagaaggtctgcgcgggggtctacaagggcgtcaccaccagccagctcgacgagctcgccgccgagaccgcggcggccatgactgcgtcccaccccgactacgcctcgttggcggcgaggattgctgtgtctaacctgcacaagaacacaaagaagtccttctcggagacaggattaaggacatgtacaggcactttaacgagaggtctgggctgatggcccctctggtcgctgaagatgtttatgaaatcatcatgaataatgctgctcgcttggacagtgaaataatttatgatagggatttcgactatgactactttggcttcaaaactctggagaggtcttacctcttgaagcttggtgggaaggtcgttgaaaggcctcagcacatgctgatgagggtttcagtgggaatacacaaggaagacattgagtctgccattaggacgtaccatctgatgtcccagcgctggtttacacatgcatcaccaacacttttcaacgctggcacaccgaggccccaattaagcagctgttttcttatatgcatgaaagatgacagcattgagggaatctatgaaaccctgaaggagtgtgctgtaataagcaaatcagctggaggaattggtgtctcagttcataatattcgtgctactgggagttacatacgaggaacaaatggaacatcaaatggaattgtgcctatgttacgagtctttaatgatactgctcgttatgttgatcagggtggtgggaaaagaaagggtgcatttgctgtatacttggagccttggcatgctgatattttcgagttccttgatctaagaaagaaccatgggaaggaggaaaatcgtgcaagggatcttttctatgcgctatgggttcctgatctattcatgcaaagagtccagagtaatggagaatggtcattgttttgccctaatgaagctccagggttggctgattgctggggtgaggagtttgataatttgtacaagaaatatgagagccaaggcaaggcaaagaaagttgttcctgcacagaccctctggtttgacattttgaaggcacaaatagagactggtacaccttatatgctttacaaggatacttgcaataggaaaagtaaccagcagaatctgggcacaattaaatcgtcaaacttgtgcactgagataattgagtttacaagccctactgaaactgctgtctgcaacctagcatctattgctttacctcgttttgttcgggaaaagggtgttccattagagtcccatccatctaagcttgtgggtagcagtgattcgaaaaatagatattttgattttgagaagctggctgaggttacctcaactgttacttacaatcttaacaaaattatcgatattaattactatcctgttgagacagcaaagagatcaaatatgcgtcacaggccaattggcataggtgttcaaggcctggccgatactttcatattattgggcatgccatttgattcactagaggctcatcagttgaataaggatatatttgaaactatctactatcatgctctgaaatcttctgctgaacttgctgttaaagaaggtccctatgaaacatatgaagggagccctgttagcaagggcattcttcaacctgacatgtggaatgtagtgccatctaccaggtggaattggccatctctaagggagaccatttctaaagctgggataagaaattctcttcttgttgctccaatgcccactgcttccactagtcagattcttggcaacaatgagtgctttgaaccctacacatctaatatttacagtcgacgggttctaagtggggaatttgttgtggttaacaagcatcttcttcatgatttgactgaaatgggcatttggactcctactctgaaaaaccagataatatatgatgatggttctgtccaaaagatagcagaaatcccagatgatctgaaagcaatctacaagactgtttgggagatcaagcagaaaactttagttgatatggcggttgaccgtggatgctatattgaccagagccagagcctcaacgtccacatggagcaagcaaactttgggaagctaacatcacttcacttccatgcttggtccaagggcctgaaaactggaatgtactatctacgcacacgagctgctgctgatgcaatcaagtttaccgtcgataccacacttctaaaggagaatgggaatgggatgaatgatggaaagcccacagaggaagacgtagaagctaaaatggcacaaatggtctgttcttttaacaaccgggaagagtgcctggcgtgtggaagctagattggagctccatctggacactgcaattatttgtgacctcaggccacagcattatatgccgccggctgatgactggagcccaataatcagaacgaaatctgatgtaggatgaggtagaaactccattcccttcccataatgggaacaataccttgcctctgaaatactgttaggactagtttggtaactctattttttcaagagattcatattttttcaagtgaaaatgaattaattttcttttgagaaaatagaaagaaatcccttgaaaaaaatgagattctctaggagccataaaaccggagtaaattggaggagctaaattcatcctttttattcaattttgaataagaggaatttagctcctctggttttgtggcttccaaactaaggttgtattctctaagatatttgtgctgctgctgctgccaatgtactgtaaatatctactaccatcaaagttattgatgttctctaagctattttttaactgtgcgcgttggatcgaacatgat

SEQ ID NO: 215319 - DNA, 3067 bp, Zea Mays
ccccgccccacctcaatacaatcctctgctcgcgttctctcgtcccggcggcggcgtaggcgcgcgcaccaggtgttcgacgggagttttcgccaccgcggaagatgtacgtggtcaagcgggacggccgccaggagacagtgcacttcgacaagatcacggcgcgcctcaagaagctcagctacggccttagccaggaccactgcgacccggtgctcgtcgcgcagaaggtctgcgcgggggtctacaagggcgtcaccaccagccagctcgacgagctcgccgccgagaccgcggcggccatgactgcgtcccaccccgactacgcctcgttggcggcgaggattgctgtgtctaacctgcacaagaacacaaagaagtccttctcggagacgattaaggacatgtacaggcactttaacgagaggtctgggctgatggcccctctggtcgctgaagatgtttatgaaatcatcatgaataatgctgctcgcttggacagtgaaataatttatgatagggatttcgactatgactactttggcttcaaaactctggagaggtcttacctcttgaagcttggtgggaaggtcgttgaaaggcctcagcacatgctgatgagggtttcagtgggaatacacaaggaagacattgagtctgccattaggacgtaccatctgatgtcccagcgctggtttacacatgcatcaccaacacttttcaacgctggcacaccgaggccccaattaagcagctgttttcttatatgcatgaaagatgacagcattgagggaatctatgaaaccctgaaggagtgtgctgtaataagcaaatcagctggaggaattggtgtctcagttcataatattcgtgctactgggagttacatacgaggaacaaatggaacatcaaatggaattgtgcctatgttacgagtctttaatgatactgctcgttatgttgatcagggtggtgggaaaagaaagggtgcatttgctgtatacttggagccttggcatgctgatattttcgagttccttgatctaagaaagaaccatgggaaggaggaaaatcgtgcaagggatcttttctatgcgctatgggttcctgatctattcatgcaaagagtccagagtaatggagaatggtcattgttttgccctaatgaagctccagggttggctgattgctggggtgaggagtttgataatttgtacaagaaatatgagagccaaggcaaggcaaagaaagttgttcctgcacagaccctctggtttgacattttgaaggcacaaatagagactggtacaccttatatgctttacaaggatacttgcaataggaaaagtaaccagcagaatctgggcacaattaaatcgtcaaacttgtgcactgagataattgagtttacaagccctactgaaactgctgtctgcaacctagcatctattgctttacctcgttttgttcgggaaaagggtgttccattagagtcccatccatctaagcttgtgggtagcagtgattcgaaaaatagatattttgattttgagaagctggctgaggttacctcaactgttacttacaatcttaacaaaattatcgatattaattactatcctgttgagacagcaaagagatcaaatatgcgtcacaggccaattggcataggtgttcaaggcctggccgatactttcatattattgggcatgccatttgattcactagaggctcatcagttgaataaggatatatttgaaactatctactatcatgctctgaaatcttctgctgaacttgctgttaaagaaggtccctatgaaacatatgaagggagccctgttagcaagggcattcttcaacctgacatgtggaatgtagtgccatctaccaggtggaattggccatctctaagggagaccatttctaaagctgggataagaaattctcttcttgttgctccaatgcccactgcttccactagtcagattcttggcaacaatgagtgctttgaaccctacacatctaatatttacagtcgacgggttctaagtggggaatttgttgtggttaacaagcatcttcttcatgatttgactgaaatgggcatttggactcctactctgaaaaaccagataatatatgatgatggttctgtccaaaagatagcagaaatcccagatgatctgaaagcaatctacaagactgtttgggagatcaagcagaaaactttagttgatatggcggttgaccgtggatgctatattgaccagagccagagcctcaacgtccacatggagcaagcaaactttgggaagctaacatcacttcacttccatgcttggtccaagggcctgaaaactggaatgtactatctacgcacacgagctgctgctgatgcaatcaagtttaccgtcgataccacacttctaaaggagaatgggaatgggatgaatgatggaaagcccacagaggaagacgtagaagctaaaatggcacaaatggtctgttcttttaacaaccgggaagagtgcctggcgtgtggaagctagattggagctccatctggacactgcaattatttgtgacctcaggccacagcattatatgccgccggctgatgactggagcccaataatcagaacgaaatctgatgtaggatgaggtagaaactccattcccttcccataatgggaacaataccttgcctctgaaatactgttaggactagtttggtaactctattttttcaagagattcatattttttcaagtgaaaatgaattaattttcttttgagaaaatagaaagaaatcccttgaaaaaaatgagattctctaggagccataaaaccggagtaaattggaggagctaaattcatcctttttattcaattttgaataagaggaatttagctcctctggttttgtggcttccaaactaaggttgtattctctaagatatttgtgctgctgctgctgccaatgtactgtaaatatctactaccatcaaagttattgatgttctctaagctattttttaactgtgcgcgttggatcgaacatgat

SEQ ID NO: 215320 - DNA, 7256 bp, Zea Mays
gggagggccgcaaccgaacttcacactccgacggaaccaattcgcatccgcacggacggaacgtctgaaccccaccgccgcaccgcgcgcgtccatcccccaatgcccccagcagcggcagttcgtcgggctccctcgccggacgcggcgggcggagcgaggctagccgcggagcaagcctctggcccgtgagaaacatgtctccacaggagacacggcaacgcgcccttgtagattgcaacggcggagaggaggttattgtgctgttccatttggctgaatacggaagttaatggtggttgagtgcaagaaaagaaatttaactaacactgtaaagatcgaggaatatagaaacagagctaattgacactagtgatgaaaacagtctcatgacttgtgaaagcttgatggtcactgcttgctgactggtgagcagcaatagggcttgtctagaaagtgaggtacagacataaggcaaccttgcattcctgatcaggtaatatatcagtcttttgcttccactagtgcagaggcggatccatagggggggcaaagtaggccatggccccccctcaattttgtacacccttttatgtatatgattatttagtattaagtgtagaaaaaaaatcaaagttttagatagtatagagtcttgttctaaatctctaaaactaatagctagttgctaaaattagtcgagaggtttagaatggatcaactaattgttagttatattcctcaaataaatattagttgttagatgccacaacccagctaaaaccagttaatagttagttataaaggtttagaacatgacataaaacaaccatgttatgagcctgctcgtctgatcctctcggtctagtccttgcatctacctgtctaactctaatcttttcgacaccacctaaaccagtctgctcgttgtcctgttttcgccgccgacccattcccgatgcgacgccacccgacttcgccccttcctgccgccttcgtcccttgttttgtttttacatgacgtcaatccgctcgacaagctagatctcgctcgtcgcaacgatatgacttgtcccatgcggttgacggacatggcgaactagaaaatcatgtctctcatgtggtctttttggccccccctgaattttcgtcctgcgtccgccactgcactagtggaattagtttgtatcatgtacgattgatttatgctaatgtcaaaagctcccgataacaatttaatgtcaatgtttttttaactaaatgtaattttttttttacaatgagttcgtaaaattaagatgaatagggtccttgctcgcgggcagaacttattcatatctgtttcgtgtagccacatcttaaacgaaggaaattctgatattaattaaactccaaaagaacaagtcaatgtgcttggatttcggaatcatcttgccagcttatgacaatagaatagttgcaattcgataattcaccaatatcttggattgatgccagcttgaatagttacactatggtacctttgctggacacatttttcagtggttttataatttaaactattcaatctcatgccttgattttatttttttttgctggaaaagatgaaatatcattgcaattttgcctgtaggagcagtttgtatttaatgcctgtcatggtgcaagcacattttctaatttatgtggttatttttaaggaacatgtgttaatttaaaatatttttgaagtaaaacaatgtgaactgtcaaccaagggattaaatgtagctactcagatagtcagaaaaaacacacagaagcctaagacctagccttgtggtggaggcacaacaaataactatctgtttctggaagttttaacaaacctgtaaaaatatcagaaaaaatgaatattcagattgttgacacttcaaaattgtaagtgattttcactgtttcattatcattttcttacctgttcaaattggaccaaaattttacatatgtaaaaaagaaatgagattatcttctggatttaaacatatgaaggtgttccccatccatctggacgcacatcagtggaaagtatggttagtttcttctgcactttaaacttacgtactttgtgccagtagacacactatacctgcgaatggttcaaaggcaatccaaccattttttctcaaggtaaccatgtgcacagaaaagtgtaatgactcatctattcttgaatcgacaagtatttttgggaagttgccccctgatctgcagcaataagatttagataagttataatatttagtgaaagatctttctgcaaaataaaaaaagtttacttgtgaagtacttcataatatgaaattgtgcagtgtcatgtttttgttcacatgattattaaactggatgctaaagacatcgcttgagtaaaccgcagagtaggaacgggccttagttgttctctttgaagttgaatagatcaatactgcgcccattgatacgtgagggagattgacccgtaactactcttggtgactgattgatggaaacacgtcaatttgggttgctgataaacctgtaatgtcattcaacgtcagtgtccaaacaacgactaaatcaattaatctattcacatcaaagttgtttgtaagaaacttaggcacacaatcgcttgttgttgacatccttactccgtggccaagatttgttagctaagcattcatatattattcatagcagaactaactggcctataaaattacacatttcacattggccatccacttggaaaattgcagtatgagtagctagaagctatatttcttctagatgaattcactccacactagtacagaccttccatgagaccatgattaagaaagatgggtgagaagtttgttttctcctcgtcactacaaaggaatgcatgtttcttttatgtaatactgttacttttatgctatcttgtttgatccacatgccatgattttgttcccactgcacttttcttggttaagctgcacttgcaacaaaaacaacatttcacagtcaacaagtagcattgttagttactataaatgttaatatcagttactagtgaaatatatgccctaagtaatacttgtaggtataatgcagctcagcgctgttgggaggggggagaggtcaatcatttctcttgttcaatggtacactcactgttgtgtagcgattgaagcattctggaactgtggacgctagtgtcttagacagttgacgtggaaactaggtgaggcgaaattgtcgcttcagaatatcatataattgaatcttctgctctgggtgtagtatctaggtgttctatttataaaccccttcaaacaggaagaaagaagaaactgaaagattatagtttatataatttttatcttcctgaattagaattgtacctataaactgaaagatgtttcttcatcaccttctgttaagaaattttcagttctcacaatcggtacaattggctaaaattttataatagaagcacagctgcctttgtaaatatccaaattgtttgtccggcctaggatctaattggtggtggtgttatattttttgtttggccctggtctggtttctttggacttcacctccctgatctgcaaatatcgatttatactgtggcctttgcatgcatacaacatgcatactatgcacagtttcttcataatgtgtttatcgattacagcctctttctgacttgatggaccttctgtgcggtctagacaattgtagttcaccgctacggttatctggggaagttagatgaaccaacacctcaagttttgctttgcaaagcatcctcttgaatctctcgattgctggggaaatattgttctgactttttttttctaggcaaacttatgtgatgagaggttggttttgctgaagaattatacttttaatgaattcggatgactcaaatccatatttctcttctgacaggtatcactcgagtgtgtaggtttttccgggatgcagacagatcatgagagattagactgtcttcgaagccaatgctgctgggagtttctagtttatcaacagatttcctcttagttgttgatcgcagcaagaaacggctgtccttgctagcttgtcatttcgcttttaggtgttcgtaggtaagaaaaacatgcgacagaaccaggcatcgttgacacttgttagacagcaacgatgatgacatcgccattttctagagaacgacgtcaatgcggacaagaaagccaattgttttttgttcaatagttttttcatctcgtattcttggacaaaggttaacctgtatttgtgcttctgtctttcaggcaggaaaaacatgtatctgactctatccgatgtttctcacgggcaccatgggaatgggaattgctgttgccctcgttttaaactcatctagaggatattgcccacgcccagatcaatatgctgtctctccatctccatgcttcacctccggcattgatgcagccagctgtatcaattatgcaaaagaaaagttcctatctgattgctctctgctgagtaccgatcaccaaactgtttccgtgctccacacccttacctccagctcaagatcatgttcctgcatccaatttactgtgcaacagacagaggacatcaaggtggctcgaagccccccgggcgacttcctcgtcaccttcacacaccgccaccaccgggaggcggccgtcgctgcaagagacttcctacacagcaaccttgacttccgcatcaggccatggcagctggtcgccctcggggagcgccatgatctctacttccatgtcagactgtgcttggagggcatccctccccatgcctggaacgaaaacatcgccaagcgctcggtggctcgtgcctgcgtccttgactacgtcgaagaagattgtctctcctccaacaaggcggacgcgcgctgcctcaacctgtgggcgtggacgggaaatccgtctgacatccccaagatcgtctggctcaccatcacgggccgttcaatggtgatccatgacaacgccccccctccgccagggcagtgtggcctcaccttccgggtgctggtgcacattgatctggtggagagcccctcggggcagggtgggcggctggccactcgctcacttccgtggcgccatggtgtggtcgacggcgagcggggcccccgcgaccgacatgacccgcccccaacggatcactgtaatgggagtcgccgttgggacagagaagacgaagatgatgaggatggtaggcgtgggcgtcggcaacacaaggcgaggagctggagttcccgcctcttccgcagcgtctcccgcgcgccacgtgaccgtgaccgtgatcgctccgagcctagacgtgacgcccacgaccggggatccaacactggtggtcgacgccaccaccatgtccggggcccttgcaccgatggcctagcccatccccccgggcccgtgtctaccccccactccgggcctgcgtggcaggaccgtggacgcagtcgggagaggcattcgccccgtcgccatggacaccgcaacaggtcctccccccgtgggctccaccagcgccacgcgccctctccggccgtgctgttgggctgtagccccggatcccccgcgggcgctggggaagaccgctggccctccccacggccgccgctgcatcgcgtcggaggcgaccggtgcggagaggatgtgccacaggatgatcataaccactcaacaccgccgccacagacagtgacgtcgagcccaggtttgatgtctgtgcacgcagagcgacgctttctgcctggccgggtctaccgcaggcgcgcccgttctgccccaccagaaccggggcaacattcgcctgccaccatcatgatggatgcagcgccgggggtagctgtgggttcggagacagctcttgtcaccggcatggagaccgctcagcaggctacaactgttttcccagagctaggggagccggccactaccaccgtggcgtccttcatcagcaaccacacctgccctgttgcaccaccactgctccaggagctccatcaagcgccaccaaacctgaagacaaagaagaagcaagctgccagggcgacccgcaagagtatgcggctggcggcgatcgcatggccgcgtgggaacatccaggaacgcgcacgccaggtcctgctaaagcgcctgggcttgctgcctaaggaaggccagccgtctgatcaggctactgcaagtgccgcgctggagacctgcatcaacctcttcaagggtccactgtcgtccgtggtgctgcaatcgctgatggacctctgcggaatcattccgccacaggggcctgcggcgcagagctggacgacagaggatcatccttggaaagggtttgatgtgccttgtaaccttgcggacaggctcctctttagcgcctccaccatcgtcaccgttggagatggcaagacaaccaaattctggcacgacagttggcttgatggcatggcgccaagaaacctagcaccacacctcttcgagctagtctcaagaaagaacaagtcagttgccattgagatcaatgacgggaattggatcaggtcgttgagaggcaagattacctccacggtgcagattgaggaattcgtctccctctggtttagactccatgatttccacctccaaccacaggtgccggactccattgcctggaaatggaaccccgacggtgtcttcacggtaaaatcagcctacaatgcacaattcattgggtcgtacagccacattaattctgattttgtttggcgggcacgggcagagcaaaagtgcaagatttttgcttggattcttctacaggacaagctcctcactgctaacaatctggccactcggggttggccgcaccaaccaaactgctccctctgcaatggtcccttggagaccggcccccacctctgtttgcattgcccttttgcccgggcggtgtggcgtcagattctagtttgggagggcttgagcctcctggcccaggctgaccctactcacttctccagcataaaagactggtgggaagctacatcctccccgctcccaaagaaccaaaagcgtgacttcaacggcctcatgatatacaccctgtggaacatctggaaggagagaaaccggaggatattcgaaaacagcgccctcacccctatccaattagccttgaagattaaagaggacgtgtgcactttcaagagagccatgttcctccagtattag

SEQ ID NO: 215321 - DNA, 1135 bp, Zea Mays
cagaagccctagccgccgagagctagcgctgacagacgtgaggtattgccgccagcggcggtccacgtgagcaacgccgtcgggtcatcgccgaggaatcgtagagcttttctggtgcatgtgaagcgctcctgcggagtttcaaggctcgcgggttaatcagggcttcggaactcgtcgccggagttgactctctgccacgcgtcgaggccaggcgttacccacaaaatcctcggtggggaggtatagaattccctctaccttttggaagagtactcagtcctacagaaagtttcatccatgaactagatgagaagggagttttccgtaccgctgacatgtgaacgatttatattgggacttccctactactgctttaacacttctggactatctatttgcgattgagataatattgggaaagagtgacaaattcgacgagttgatggttgctgccgccgacgagaggggagaagttgaagatggtgaagagcaggcttgaaaaaacagtgtcgaccatccctgcaacgcgtgacgcgtccaatgacccctgtaggatcctttcgtctcctgctgtggccccttcacccgcagccgcccaatcagcccatcctccacagctggcctgaacgccgcctcgatggcttccttgcttccctgtccggcagccccttgtcttccccgtccacctcttcttcgagggtgtaacaattgtcttaaggattaggtacttgtcaaaggaatgcccgatcaagtggttgaaggattagtttcaggaagagacatcaaaatgtttcttttgaatcccactaagccatatgcgttgttgcatatttagactttggagtgtggacctatgtaacagacataattagtacagctcatggcttggatatctgaaacttgattttgttgcaggaagcctgtgatcagttcaaggttatgaacgactacatagttcagttcgatgtttcaatatagcttagcaggatacttctctatatttggtattgttacagcgcccgataggacgcaaacttttctagtgtttttataaagaacccccagcgtttttactaatcaacccgtagtacacctgtacacaaagatcattacctccaagtcccgaaatttg

SEQ ID NO: 215322 - DNA, 1389 bp, Zea Mays
cccgcgaggagtttatcgaagggtttttaaaaagagaaaaagggagaaaataaaggcgagagaaaaaaaactgcggagaggtagcggtggatcgaaaccctaggcgcggtcggcggcgatggcggcggcggcagcagcggcagctgcagcgcctgagtcgtacatcgggagcttgataagcctcatgtcgaagagcgagatccggtacgagggcgtcctgtacaccatcaacaccgaggagtccagcatcgggctaaaaaacgttcgctcatttggaactgaaggtcgtaagaaggatggccaacagattcctgccagcgacaagatatatgagtacatactctttcgaggaagtgatataaaggatttgcaagtcaaatcatctccaccatctcagtcggcaactttacacaatgatcctgctattattcagcctgtaggagtttcctcatatgtccggtacaacagtagaggtcgcggaagaggaagaggccgtgggcaatcgcatcccataaccaagttcacagaggactttgatttcatggcaatgaatgagaagttcaacaaagatgaagtatggggccatcttggtaaaagaatagggcagttaaatgatgaaccaaatggttacgaagatgatgttatagaagatgatgagatatctcctagaaagccagaagctaaggctgtgtatgttaaagatgacttctttgattcactctcttgcaaccaaattgacaatggagggaggaacggaagagtgaaattctctgagcagaggaaaatagacactgagacctttggtgactcagcaaggcatcgaccaatgggcatccgaggtaggggcccccgtggcggcgctcgtggtcgtggctattatggtattagaggatatggatatacgggtagggggcgtggctactcttacccaaatcaccagccgtgatacctcggtgtctggaagcacactgaatggcaatggtaaattggccaatttgcgtggtaaaactgagatttatcgcagattacagtgctgctgttgtaagcgtcttattagtttgtttactgatgtggttggtaattcaagaatcaacgtctcttttattgatggcagattggtgtagaagctttcacatctatatcttgttagtgtcgatggtcatttatttccttttggaggtagaagctgttagcagattgctagatgatgtaacacagatctgtccaagatcaacggaaaaacaagcagcagtattgataatctgaaaaaaaaagggatggagttcagggtaggaaagtaacttatccaacaaagcaccatgagtacaaaactatactcgcaagatttatgtaatataagtgagacaaggatcatgctttaagtctaac

SEQ ID NO: 215323 - DNA, 2394 bp, Zea Mays
cccgcgaggagtttatcgaagggtttttaaaaagagaaaaagggagaaaataaaggcgagagaaaaaaaactgcggagaggtagcggtggatcgaaaccctaggcgcggtcggcggcgatggcggcggcggcagcagcggcagctgcagcgcctgagtcgtacatcgggagcttgataagcctcatgtcgaagagcgagatccggtacgagggcgtcctgtacaccatcaacaccgaggagtccagcatcgggctaaaaaacgttcgctcatttggaactgaaggtcgtaagaaggatggccaacagattcctgccagcgacaagatatatgagtacatactctttcgaggaagtgatataaaggatttgcaagtcaaatcatctccaccatctcagtcggcaactttacacaatgatcctgctattattcagtcacattatcctcatccagcttcgctttctacaagtttgccttctgctgcaagcacaataggagccaaccctacttcacagaatgctccatctttgattcagatgccaccgccatttcaagggaatttgcccccttaccagtctggcaccagcttacagtcatggaactcagcacctatgccatcatctgcaaatggcactggccttacaatgccaccaatgtactggccaggatattacacaccaccaactgggttttctcatctgcagccaccactcttccttaggccaccccacagtttggctgttccacaggtcctgcagcttcctgtacaatatcctggacttggatctttacctgctggatttccaaatatgccggagcttccttctttccttcaacctggtaacagtaatagtttaaatcaaacttcaggtgtacctacatctgtgtcaacgcctgcttcattgagtacatcacaaactgaatcatcaagaagccaactgccaaataagttttcatctgattcagcttctgtattttctgtgggttttactcctccatctgtgactccttcagtttcgacagttgaaccttccattcctgtgtcagcagtcttgccttctctggtgaacagtaagccagtagctctacctgactccaccatgccatctctctccactgccaagcctgtgattgtacctgatgcttcagtgcttacctatctatcatctcagccaccatctgctaatgatgtttctccagtcaatgctgcggagcaggttccattggctgccccctctacagttccatcttctcaggctacattgtttgaaggttcaaccacacaggttgcctcctcttctattttgtcacaacaggtggcaatgacaaatgaaagtaaagtagccaagcagcgtgagtggaaggcaaaacaaactgtggttggtagacccggaaataaggagcccctattgcctgaaccaaagtcggtgtttcaaaagcctgtaggagtttcctcatatgtccggtacaacagtagaggtcgcggaagaggaagaggccgtgggcaatcgcatcccataaccaagttcacagaggactttgatttcatggcaatgaatgagaagttcaacaaagatgaagtatggggccatcttggtaaaagaatagggcagttaaatgatgaaccaaatggttacgaagatgatgttatagaagatgatgagatatctcctagaaagccagaagctaaggctgtgtatgttaaagatgacttctttgattcactctcttgcaaccaaattgacaatggagggaggaacggaagagtgaaattctctgagcagaggaaaatagacactgagacctttggtgactcagcaaggcatcgaccaatgggcatccgaggtaggggcccccgtggcggcgctcgtggtcgtggctattatggtattagaggatatggatatacgggtagggggcgtggctactcttacccaaatcaccagccgtgatacctcggtgtctggaagcacactgaatggcaatggtaaattggccaatttgcgtggtaaaactgagatttatcgcagattacagtgctgctgttgtaagcgtcttattagtttgtttactgatgtggttggtaattcaagaatcaacgtctcttttattgatggcagattggtgtagaagctttcacatctatatcttgttagtgtcgatggtcatttatttccttttggaggtagaagctgttagcagattgctagatgatgtaacacagatctgtccaagatcaacggaaaaacaagcagcagtattgataatctgaaaaaaaaagggatggagttcagggtaggaaagtaacttatccaacaaagcaccatgagtacaaaactatactcgcaagatttatgtaatataagtgagacaaggatcatgctttaagtctaac

SEQ ID NO: 215324 - DNA, 2180 bp, Zea Mays
attaagatagaacgaataatttgtgagctattgtatctggaatctaattatgttaaggatttgcaagtcaaatcatctccaccatctcagtcggcaactttacacaatgatcctgctattattcagtcacattatcctcatccagcttcgctttctacaagtttgccttctgctgcaagcacaataggagccaaccctacttcacagaatgctccatctttgattcagatgccaccgccatttcaagggaatttgcccccttaccagtctggcaccagcttacagtcatggaactcagcacctatgccatcatctgcaaatggcactggccttacaatgccaccaatgtactggccaggatattacacaccaccaactgggttttctcatctgcagccaccactcttccttaggccaccccacagtttggctgttccacaggtcctgcagcttcctgtacaatatcctggacttggatctttacctgctggatttccaaatatgccggagcttccttctttccttcaacctggtaacagtaatagtttaaatcaaacttcaggtgtacctacatctgtgtcaacgcctgcttcattgagtacatcacaaactgaatcatcaagaagccaactgccaaataagttttcatctgattcagcttctgtattttctgtgggttttactcctccatctgtgactccttcagtttcgacagttgaaccttccattcctgtgtcagcagtcttgccttctctggtgaacagtaagccagtagctctacctgactccaccatgccatctctctccactgccaagcctgtgattgtacctgatgcttcagtgcttacctatctatcatctcagccaccatctgctaatgatgtttctccagtcaatgctgcggagcaggttccattggtaacccctgggcaacttctgtcaactacttcctctacaattatatcatctcatgccttgcaaactgcttctgctgtggatctatcctctaaggctgccccctctacagttccatcttctcaggctacattgtttgaaggttcaaccacacaggttgcctcctcttctattttgtcacaacaggtggcaatgacaaatgaaagtaaagtagccaagcagcgtgagtggaaggcaaaacaaactgtggttggtagacccggaaataaggagcccctattgcctgaaccaaagtcggtgtttcaaaagcctgtaggagtttcctcatatgtccggtacaacagtagaggtcgcggaagaggaagaggccgtgggcaatcgcatcccataaccaagttcacagaggactttgatttcatggcaatgaatgagaagttcaacaaagatgaagtatggggccatcttggtaaaagaatagggcagttaaatgatgaaccaaatggttacgaagatgatgttatagaagatgatgagatatctcctagaaagccagaagctaaggctgtgtatgttaaagatgacttctttgattcactctcttgcaaccaaattgacaatggagggaggaacggaagagtgaaattctctgagcagaggaaaatagacactgagacctttggtgactcagcaaggcatcgaccaatgggcatccgaggtaggggcccccgtggcggcgctcgtggtcgtggctattatggtattagaggatatggatatacgggtagggggcgtggctactcttacccaaatcaccagccgtgatacctcggtgtctggaagcacactgaatggcaatggtaaattggccaatttgcgtggtaaaactgagatttatcgcagattacagtgctgctgttgtaagcgtcttattagtttgtttactgatgtggttggtaattcaagaatcaacgtctcttttattgatggcagattggtgtagaagctttcacatctatatcttgttagtgtcgatggtcatttatttccttttggaggtagaagctgttagcagattgctagatgatgtaacacagatctgtccaagatcaacggaaaaacaagcagcagtattgataatctgaaaaaaaaagggatggagttcagggtaggaaagtaacttatccaacaaagcaccatgagtacaaaactatactcgcaagatttatgtaatataagtgagacaaggatcatgctttaagtctaac

SEQ ID NO: 215325 - DNA, 1305 bp, Zea Mays
cacggtcccacacacccgacgtcccgccctccgagcccacctcccaatgtcacctccctcgcatgtcgacccgacgcgtgaagtttggttgataacaccactaaacaatgatctatacatacacaagtgtcaccctgccagttgattaccttattaaataatgacctatgcctgcataagtattacccgttgcaacgcacggtcatatgcctaataaaaggcataaacctggcctcaccccaccgcgagccgaaccggagcgtcaagcaaacatccgtcgatcccgattccgaccactgcgctcgcgccatcgcgccatccacccggcattgtgcgcccgagccgggctcgttggatggcgtccggaggcgccgcccgcggtcgccttgctgaggagcgcaaggcgtggcgcaagagccatcccctcggctttgtggccaagccggcgatgctgccggatggttctgtcaatctcatgctctggaactgcgtcgtccccggcaaggaaggcgtcatgctgtcaggcaagcagcacctggttgcagatgtaccaggacagtagttaatccctgtgctatagctagtagtattttattgaaccttacttgtggccagatgtaacatttgaaacgagctgatcgatttgtaactaaatgaatcagaagcatgattgaatcaactgaaaatctgaaagactgttgctgcggagcaggacgagccattattaaagactgactgattgggaaggtggatatttcccggtcactctccatttcactgaaaattacccaagtaaccccccaacctgcaagttcccacgaaggtttttccatgtcaatgtctatgattctggggatgtatgcctgtcaatacttggtgatgcatgggcgccttctatcacagtgcggcaaattctaataggcatccaggagctgctggagaacccaaacccagcctctcccgcacaggattttgcttacgatgtttttgcagagaatatgccagaatacaagagacgcgtccgtgagcaagccaagaggtatccgtcgctcgtgtagccgtggacctctgcaacacaattgctgctaaccaagtagtcactcactttggtgtagtggaacttgttcatgacgtgcttaactatggtgtctagttagccgtacgcttgttggaactgctaaagtgcagcttattggaactgctaaaatgcccttgactacgtcttattattatggtttatcagtatagtgttgtcaacatccaaaatttgttttggccctgtagaatactcaaattggtaacccc

SEQ ID NO: 215326 - DNA, 496 bp, Zea Mays
ccgcacgcaccacgagaggtgctgacgaacgcgacgtaccgcagcgtggagcaccgggtggtggtgaacgccgccgacgagcgcctgtcggtggcgctcttctacaaccctaggagcgacctgccgctggcgcccatgccggagctcgtctcgccggaccgccccgcgctctactgccccatgaccttcgacgactaccgcatgtacatccgccgcaaggggcctcgcgggaagagccaggtcgactccctcaaggtcgccgacgcagtcgacgccgacgccgacgccgacggcagacggtgctactagctagtatatacctagccagccctgctgccgatcgagattgtttgtatgtgtggtgtgtgcatgcattttgcccacactgaccactgtccacatgtacgccgccagctgccggcctaaataaaaccatgcatagattagctagcttatgattaatcagtctagcagctagaagagtgctttggttggg

SEQ ID NO: 215327 - DNA, 2077 bp, Zea Mays
agaggttattacaaagaagacaagcaagccaatcaaatcgcttcagcatatgatctcacaagctcagacctcagcaagtttaacttgattgtctcatacaactcaacatacaagggtgctattgaattgtcattatcggtagcttcattttcgttttcaccaatcttgcttcgagttccacgattactgaatctggtctcaaatgcataccttcaattgaggggcagtgatactaagatgcagtttgagtttattaaagacatgcctagagttgctcaacaagaatttcctattgatatatccttcttagtgggaaaattggttttcgtatggatgataatgctttactttcctgtcatcctgagcaatttagtctatgagaaggaacagaagctaagaactataatgaagatgcatggcctaggagatatggcatactggattatatcatactgctattttcttcttctatcgctactgtatatgctcttcttagtttcttttggctctattttcggtataaagttatttagattgagtgactacagggtacaattcgtggtttacttcgcctacataaacttgcaagtttcatttgcttttcttatggcaacattcttttcaaattgcagaactgctagtggaagctggagtacactcatggagttgttcccaccattttgtttgtaccgcataatctatgagttctctccacctccatcacctttgtatcgtacagacttttctggagtacactgggaagacttaagtgatcacaagaatggaatgttagacattctcatcataatggcagtcgagtgggccacattccttttgttaacattctttgtggatgaatttggtaccttccgaaacggaattagaaaaacggtttcaattttccgctcaaacacagatcagagctctcacacttgtcagatgcagactattcagcttgaagaattcctaccctcagttgaaacagacaggactgatgtttcgagagagagagaaacagttcaacaactcttacgagaatcagatagcaatttttcagtaatatgcgacaatcttaagaaagtgtaccatggaaaagatggaaatgcagagaaaattgctgtcgcagggttatcactttctgtgcaacgtgggcagtgttttggaattcttggtccgaatggtgctggaaaaacctctctcattagcatggtaagtacaaacagtcttagatgcataaaacttgcttgtattcacatacctgaccataattcaggaaaatatatagggtgcatttcttgtacaatcgttattcgaaagagtgtggtgagctttctgtaggttgtttacatggacgagccgagttccggattggacccggcatcaaggagggcactgtggaatgctgtgatgtctgccaaagagaacagggccatagtcctcacaacgcattcgatggaagaggctgaagctctgtgcgacaggatagggatcatggtaaacgggagcctgcagtgcattggaaactccaaagagctgaaagccaggtacggaggcacgtacatgctcaccgtaacagctgcggcgggcgaggaggcggcggtggagcagcttgtccggtcgctctgccccgcggcgaacggagtgtaccgcatctccgggacgcagaagttcgagatgccgaagcaggggctgaggatcagcgaggtgttccaggccatggagcgtgccaagagctggctgaacatcgctgcctggggcctgtccgatgcaacgctggaagataccttcatcaaagtcgcaagcgggagtgacgcgtcctccgtgtaggctgtagatagatagatggcggcgtttggacttctgtattcgatctaataaatccatgccggggcgttgttactggtagacacaattgcgcacttcaaatgcatgaaaagtccgggctatttgaacttggcgttgaactaagagatgagatgatagttgtaggttcgtataatcaaataaccatgtcatgtgagagtaaagttaaccttacggaacaattgtgattatacccttcagtattgcacttgcg

SEQ ID NO: 215328 - DNA, 3238 bp, Zea Mays
caaagccgtcatttgcatgtagtgctgcactgctggtggcttcagtccttcacacgcctgctcccaagtgtagcagcagggtcttctactcttctcttctcgagctccccccattttctctccagagggaggagccgagcaggcaaaatgggtgccaactgcctcgcgcagaccaacgcactcttcaggaagaatcttgtgatccagaggcgcaaccacaggtcgaactgctgcctcatctgcttcccgctcgtcgtatgcctgctgctcggaggggtgcagctgatcgtggcgatagcgtacgccagttcggcggcgcacaggccccgggtcgactgcggtggctgcaccgctagcaccaccagcagctccagcgcggacacggtcgtaggaggaccggtttgtccgacccagtgccccctgccgaccgcgccgaaatggccgccggtgctgcagctgccgccggcgccggaagacatggaggagatcggttcctcgacgtcgaccgatgatcttaccggcgcttcgaccgcacggccgaacccacccgcggcgacgttcctcgtcactggaacaaacaggtcgtttgcagaaggtgtcatgagtaacatgttctccaagcatgacgagttgagctctgcagccaacatctccgccgttgctgatttcgcactgggtacaaatgagatgcgcttcatctctaatggcgcagaggaacttggttcagattttgaccgccgcaaccaccttttctttcttcagacaagctgcactccgaacgcgacactttcttttccagtccaacaaggtcgcagcaacttcaccaaagatgcgggatgtatcgaaggattgtttctttggcgtgaggattcatcagccattaacagtgaatcatacagaggttattacaaagaagacaagcaagccaatcaaatcgcttcaggttgtaccattcttctccttgttcatttcttttgccccgccctaaatggcaactctaagattacatttttctgtttacagcatatgatctcacaagctcagacctcagcaagtttaacttgattgtctcatacaactcaacatacaagggtgctattgaattgtcattatcggtagcttcattttcgttttcaccaatcttgcttcgagttccacgattactgaatctggtctcaaatgcataccttcaattgaggggcagtgatactaagatgcagtttgagtttattaaagacatgcctagagttgctcaacaagaatttcctattgatatatccttcttagtgggaaaattggttttcgtatggatgataatgctttactttcctgtcatcctgagcaatttagtctatgagaaggaacagaagctaagaactataatgaagatgcatggcctaggagatatggcatactggattatatcatactgctattttcttcttctatcgctactgtatatgctcttcttagtttcttttggctctattttcggtataaagttatttagattgagtgactacagggtacaattcgtggtttacttcgcctacataaacttgcaagtttcatttgcttttcttatggcaacattcttttcaaattgcagaactgctagtggaagctggagtacactcatggagttgttcccaccattttgtttgtaccgcataatctatgagttctctccacctccatcacctttgtatcgtacagacttttctggagtacactgggaagacttaagtgatcacaagaatggaatgttagacattctcatcataatggcagtcgagtgggccacattccttttgttaacattctttgtggatgaatttggtaccttccgaaacggaattagaaaaacggtttcaattttccgctcaaacacagatcagagctctcacacttgtcagatgcagactattcagcttgaagaattcctaccctcagttgaaacagacaggactgatgtttcgagagagagagaaacagttcaacaactcttacgagaatcagatagcaatttttcagtaatatgcgacaatcttaagaaagtgtaccatggaaaagatggaaatgcagagaaaattgctgtcgcagggttatcactttctgtgcaacgtgggcagtgttttggaattcttggtccgaatggtgctggaaaaacctctctcattagcatgctgacaggatttactaagcctacatctggcacagcttatattgatggaatggacatacgattggacatgaacaaaatctatacaggaattggtgtttgcccgcaatttgacttgctatgggaaacactgacgggtagggagcatttgatgttttatgggagacttaagaatttgagaggtggagcattagatgtggccgtggaacattctctgagaagtgtaaggctatttgacggcggcattgctgataagcgtgtggcaaaatacagcggtggcatgaagcgccgtctcagtgttgccatatctctaatcggtgatcctaaggttgtttacatggacgagccgagttccggattggacccggcatcaaggagggcactgtggaatgctgtgatgtctgccaaagagaacagggccatagtcctcacaacgcattcgatggaagaggctgaagctctgtgcgacaggatagggatcatggtaaacgggagcctgcagtgcattggaaactccaaagaggtacggaggcacgtacatgctcaccgtaacagctgcggcgggcgaggaggcggcggtggagcagcttgtccggtcgctctgccccgcggcgaacggagtgtaccgcatctccgggacgcagaagttcgagatgccgaagcaggggctgaggatcagcgaggtgttccaggccatggagcgtgccaagagctggctgaacatcgctgcctggggcctgtccgatgcaacgctggaagataccttcatcaaagtcgcaagcgggagtgacgcgtcctccgtgtaggctgtagatagatagatggcggcgtttggacttctgtattcgatctaataaatccatgccggggcgttgttactggtagacacaattgcgcacttcaaatgcatgaaaagtccgggctatttgaacttggcgttgaactaagagatgagatgatagttgtaggttcgtataatcaaataaccatgtcatgtgagagtaaagttaaccttacggaacaattgtgattatacccttcagtattgcacttgcg

SEQ ID NO: 215329 - DNA, 1453 bp, Zea Mays
gtcgcaactcgccagtgctctttacaactacaagtcaggacaattgctgatattgaagaatcagaaacccgagctcgcaatcaggctgaatatttgaggagcaatctagaggagcatagtcttgagcttcgggttaaagcagcaaatgaagctgaagctgcatgccagcaaaggctttcctttgctgaagtggaactagaagagttaaggaccaaagtagatgcatctgaaagagatgttgtggaacttaaggaggcaataagaattaaagaggctgaaggagacgcctatatttctgatatcgagacagttggtcaagcatatgaagacatgcaaacgcaaaatcagcatcttcttcaacagcttactgatagagatgactttaacataaagctagtatcagatagtgtgaagatgaaacaagcttgtagttcccttctctctgacaagcttatgctagagaagcaactccagcaagttaacacttcactggagtcatctaaactgaaaattgcccgtggcgaagagcagatgaagacttgtgtagcgcaagctataaaaacttcagctgaaaacagacatcttactattagcctggaaaggattgcgctggagttatccaacacagataaggaactcaagtggcttcggtcctccgttggatcctctgagaaagaatacgagcaaactcagcaaaagatatctgagctgagagcgttactggagcacgagaggagtgagaggcggcggcttgaagaacaatatgaagaggtgaaaaatgaagttatggagctgacctctgagactgaagagactactgtccggaaacttgaggatgaaataaaagaatgcaagggtattctcaagtgtggtgtatgctttgaccggcctaaagaggttgtgatcaccaaatgtttccacctattctgctcgctatgcatccagagaaacctcgagattcgccaccgaaaatgtcctggctgtggaaccccattcggacaaaacgacgttagggaggtgaagatatgaacctcaccaaagtgacagtgacaaaaccgacttgcgtgtgaacagcagcaacaaactcccttgtgaatatcgtctgttatgttggcgaacatctagatctaacttgctttattactgggattaaaattaggataagaactggaagaagtgaagttcctaatttatttgctatcgtgtgtgctatgtatgattacccttggcagcgagtggtgtatctgctgggtgtcaatatgctcgaattctagctcctccctgctagcgggtgcatgccagttttattaaggctattccatgtacatggtgtcacactctttaatacataccacataggatgaaaatctgatgtgacatgtgattgaaacatagggagacaccactcatgcaccagattatagacattgaaatctgaaccatctaaatgaac

SEQ ID NO: 215330 - DNA, 1655 bp, Zea Mays
ttgcgcttcttcctcccctgcgcttcttcctttgctcgcctgcctgtgcttcttcctccccctgcagttgcgcttccacctccctccacgccagctatgcgcctctgcctttgttgcatgtggtagtcgcaactcgccagtgctctttacaactacaagtcaggttgaggagttggagcaggaaaagcaggagctggagtttattgcagatatgtacgtgaaagaaagttctgagtctaggacaattgctgatattgaagaatcagaaacccgagctcgcaatcaggctgaatatttgaggagcaatctagaggagcatagtcttgagcttcgggttaaagcagcaaatgaagctgaagctgcatgccagcaaaggctttcctttgctgaagtggaactagaagagttaaggaccaaagtagatgcatctgaaagagatgttgtggaacttaaggaggcaataagaattaaagaggctgaaggagacgcctatatttctgatatcgagacagttggtcaagcatatgaagacatgcaaacgcaaaatcagcatcttcttcaacagcttactgatagagatgactttaacataaagctagtatcagatagtgtgaagatgaaacaagcttgtagttcccttctctctgacaagcttatgctagagaagcaactccagcaagttaacacttcactggagtcatctaaactgaaaattgcccgtggcgaagagcagatgaagacttgtgtagcgcaagctataaaaacttcagctgaaaacagacatcttactattagcctggaaaggattgcgctggagttatccaacacagataaggaactcaagtggcttcggtcctccgttggatcctctgagaaagaatacgagcaaactcagcaaaagatatctgagctgagagcgttactggagcacgagaggagtgagaggcggcggcttgaagaacaatatgaagaggtgaaaaatgaagttatggagctgacctctgagactgaagagactactgtccggaaacttgaggatgaaataaaagaatgcaagggtattctcaagtgtggtgtatgctttgaccggcctaaagaggttgtgatcaccaaatgtttccacctattctgctcgctatgcatccagagaaacctcgagattcgccaccgaaaatgtcctggctgtggaaccccattcggacaaaacgacgttagggaggtgaagatatgaacctcaccaaagtgacagtgacaaaaccgacttgcgtgtgaacagcagcaacaaactcccttgtgaatatcgtctgttatgttggcgaacatctagatctaacttgctttattactgggattaaaattaggataagaactggaagaagtgaagttcctaatttatttgctatcgtgtgtgctatgtatgattacccttggcagcgagtggtgtatctgctgggtgtcaatatgctcgaattctagctcctccctgctagcgggtgcatgccagttttattaaggctattccatgtacatggtgtcacactctttaatacataccacataggatgaaaatctgatgtgacatgtgattgaaacatagggagacaccactcatgcaccagattatagacattgaaatctgaaccatctaaatgaac

SEQ ID NO: 215331 - DNA, 3043 bp, Zea Mays
atgagctcagatagagtcaatgcatatggtggttcaagacgagacgtatatggtttcattccaatgcagaagctgaggcgcaataacagtacctggagatttggtaacatacttatagtcttagctatgaatatggattccacagctcttcaatatgaaaaccaaaaattggtgcaacaactggaggtacagaagtccgaaatgcatgcattggagcgcaagttcaaggagcttagtgatgatcaatgttcttatgacaagactctgatttctttgaataaactgtggaatcagctgattgatgatttggttctgcttggagtacgggctggtggggatttggataatttgcaagcacttgaccatgaagagttatcagaagaatctttggagtcgtgtccttccgaggagatatttctcttaaggctcttgaagacaaacaacatcagagataatagtgacactagcttgttgaaatttgttgaagaagctcttgcttttcggtcttcagcaactgttactttgatgaagtccctgcaagagactatttcttcgcagcaagctagaaatgttattgttgcccttcgaaatcataatgattgcttgaaagaggtggcagagaatgcgagtcaagccatctctattatcaacgagaagcacaaaaggtatcttgatgagattgaggcttttaaaagcaaccattcaagggagctacaggaaatcaagcgtatttcaggtgagctagaggaaagcattgcagagcttgaggaaagtcaaaggaagttggttgtgctccagttgcagaggcatggttctgtaatggatgcatctggggcaaatgctgtgaatggtggtatttctactcataaatcttcagataaaagtatgagctggcaagacctcaaagatgctgttgacgcagctaagaccctcgcaggaaaccgtctattagaactccatcagactcaagaggataatctgatactatccaaggagctgggagatcttgaggggcaattgaaagatgagaagtatgtcttggtatccaaaccgtacatgattcttaatgataaactacaacatttgaatgctgagatagagcgttatagagggttggttgaagttttacagaatgacaaggaccagctcatgcaaagggagaaagaaatttctgcaaaagcagaatcgctcgacagtgttaaacaaaccattatcacatatgagaaaaaaattgaagaactggaaactcaaattcagatactcttttctgaaaagaatgatctcgaaaccaaggttgaggagactttgcaagattcaggtaagaaagacttcaagaatgagattcatgttatggctgcagcactctccaatgaactgggtatgatggagaatcagttgagtcgatcaaaggatgcagcttctgaagcacttgcattgcgtgagcaagctgaatcattaagatcattggtagctaaaaagattgaggaacacaagaagatttcggataaatacaactcacaagtaattgagatcaagtccctcaaggcattggttgaggagttggagcaggaaaagcaggagctggagtttattgcagatatgtacgtgaaagaaagttctgagtctaggacaattgctgatattgaagaatcagaaacccgagctcgcaatcaggctgaatatttgaggagcaatctagaggagcatagtcttgagcttcgggttaaagcagcaaatgaagctgaagctgcatgccagcaaaggctttcctttgctgaagtggaactagaagagttaaggaccaaagtagatgcatctgaaagagatgttgtggaacttaaggaggcaataagaattaaagaggctgaaggagacgcctatatttctgatatcgagacagttggtcaagcatatgaagacatgcaaacgcaaaatcagcatcttcttcaacagcttactgatagagatgactttaacataaagctagtatcagatagtgtgaagatgaaacaagcttgtagttcccttctctctgacaagcttatgctagagaagcaactccagcaagttaacacttcactggagtcatctaaactgaaaattgcccgtggcgaagagcagatgaagacttgtgtagcgcaagctataaaaacttcagctgaaaacagacatcttactattagcctggaaaggattgcgctggagttatccaacacagataaggaactcaagtggcttcggtcctccgttggatcctctgagaaagaatacgagcaaactcagcaaaagatatctgagctgagagcgttactggagcacgagaggagtgagaggcggcggcttgaagaacaatatgaagaggtgaaaaatgaagttatggagctgacctctgagactgaagagactactgtccggaaacttgaggatgaaataaaagaatgcaagggtattctcaagtgtggtgtatgctttgaccggcctaaagaggttgtgatcaccaaatgtttccacctattctgctcgctatgcatccagagaaacctcgagattcgccaccgaaaatgtcctggctgtggaaccccattcggacaaaacgacgttagggaggtgaagatatgaacctcaccaaagtgacagtgacaaaaccgacttgcgtgtgaacagcagcaacaaactcccttgtgaatatcgtctgttatgttggcgaacatctagatctaacttgctttattactgggattaaaattaggataagaactggaagaagtgaagttcctaatttatttgctatcgtgtgtgctatgtatgattacccttggcagcgagtggtgtatctgctgggtgtcaatatgctcgaattctagctcctccctgctagcgggtgcatgccagttttattaaggctattccatgtacatggtgtcacactctttaatacataccacataggatgaaaatctgatgtgacatgtgattgaaacatagggagacaccactcatgcaccagattatagacattgaaatctgaaccatctaaatgaac

SEQ ID NO: 215332 - DNA, 3544 bp, Zea Mays
gtgaaaattgtgttttcggtatttgaaacctaggggatatcatgactatcgcaaccggccaacaggaaatttcagccgggcatccccaattcatcttccccacgccgcgtccgcgtccggaccggacaccggcggcacctcctcctgcctccacttcaccagttcatcgggcgccggaagtgggagccatccgccgccgccacatatctgtcctcttcggcgctgactggggctcagccgctcgaagctccatcccgcctcccgtcttcgccgccgctcgtcagatccctcgacgcgacggtcgtgtcttgactctccaccacgcgactccacccagctcttctccacgcgactgcagagcgacgatcggaggcgccgccatcgcacaatccaccgtcgctgcctgctcctggtgtgtcctctctcctctctcctctccctctccatctccgtctcaaatcttttacccaaaccctaaccccgactgctatctattcttgtaagtgatactctcacaagatccgctgctacatccatttcttcttcttccacgttgctgggaggagacgggcgcaaggatttgtgcgagggagaaagaaagggaaggaaaggggataggacgggaggaggagcacgactgcttaccacttattcttcccagcccgatggattccacagctcttcaatatgaaaaccaaaaattggtgcaacaactggaggtacagaagtccgaaatgcatgcattggagcgcaagttcaaggagcttagtgatgatcaatgttcttatgacaagactctgatttctttgaataaactgtggaatcagctgattgatgatttggttctgcttggagtacgggctggtggggatttggataatttgcaagcacttgaccatgaagagttatcagaagaatctttggagtcgtgtccttccgaggagatatttctcttaaggctcttgaagacaaacaacatcagagataatagtgacactagcttgttgaaatttgttgaagaagctcttgcttttcggtcttcagcaactgttactttgatgaagtccctgcaagagactatttcttcgcagcaagctagaagtgagtctttgtctttagctttgaatggacaaaagtcaaatgaagatgttattgttgcccttcgaaatcataatgattgcttgaaagaggtggcagagaatgcgagtcaagccatctctattatcaacgagaagcacaaaaggtatcttgatgagattgaggcttttaaaagcaaccattcaagggagctacaggaaatcaagcgtatttcaggtgagctagaggaaagcattgcagagcttgaggaaagtcaaaggaagttggttgtgctccagttgcagaggcatggttctgtaatggatgcatctggggcaaatgctgtgaatggtggtatttctactcataaatcttcagataaaagtatgagctggcaagacctcaaagatgctgttgacgcagctaagaccctcgcaggaaaccgtctattagaactccatcagactcaagaggataatctgatactatccaaggagctgggagatcttgaggggcaattgaaagatgagaagtatgtcttggtatccaaaccgtacatgattcttaatgataaactacaacatttgaatgctgagatagagcgttatagagggttggttgaagttttacagaatgacaaggaccagctcatgcaaagggagaaagaaatttctgcaaaagcagaatcgctcgacagtgttaaacaaaccattatcacatatgagaaaaaaattgaagaactggaaactcaaattcagatactcttttctgaaaagaatgatctcgaaaccaaggttgaggagactttgcaagattcaggtaagaaagacttcaagaatgagattcatgttatggctgcagcactctccaatgaactgggtatgatggagaatcagttgagtcgatcaaaggatgcagcttctgaagcacttgcattgcgtgagcaagctgaatcattaagatcattggtagctaaaaagattgaggaacacaagaagatttcggataaatacaactcacaagtaattgagatcaagtccctcaaggcattggacaattgctgatattgaagaatcagaaacccgagctcgcaatcaggctgaatatttgaggagcaatctagaggagcatagtcttgagcttcgggttaaagcagcaaatgaagctgaagctgcatgccagcaaaggctttcctttgctgaagtggaactagaagagttaaggaccaaagtagatgcatctgaaagagatgttgtggaacttaaggaggcaataagaattaaagaggctgaaggagacgcctatatttctgatatcgagacagttggtcaagcatatgaagacatgcaaacgcaaaatcagcatcttcttcaacagcttactgatagagatgactttaacataaagctagtatcagatagtgtgaagatgaaacaagcttgtagttcccttctctctgacaagcttatgctagagaagcaactccagcaagttaacacttcactggagtcatctaaactgaaaattgcccgtggcgaagagcagatgaagacttgtgtagcgcaagctataaaaacttcagctgaaaacagacatcttactattagcctggaaaggattgcgctggagttatccaacacagataaggaactcaagtggcttcggtcctccgttggatcctctgagaaagaatacgagcaaactcagcaaaagatatctgagctgagagcgttactggagcacgagaggagtgagaggcggcggcttgaagaacaatatgaagaggtgaaaaatgaagttatggagctgacctctgagactgaagagactactgtccggaaacttgaggatgaaataaaagaatgcaagggtattctcaagtgtggtgtatgctttgaccggcctaaagaggttgtgatcaccaaatgtttccacctattctgctcgctatgcatccagagaaacctcgagattcgccaccgaaaatgtcctggctgtggaaccccattcggacaaaacgacgttagggaggtgaagatatgaacctcaccaaagtgacagtgacaaaaccgacttgcgtgtgaacagcagcaacaaactcccttgtgaatatcgtctgttatgttggcgaacatctagatctaacttgctttattactgggattaaaattaggataagaactggaagaagtgaagttcctaatttatttgctatcgtgtgtgctatgtatgattacccttggcagcgagtggtgtatctgctgggtgtcaatatgctcgaattctagctcctccctgctagcgggtgcatgccagttttattaaggctattccatgtacatggtgtcacactctttaatacataccacataggatgaaaatctgatgtgacatgtgattgaaacatagggagacaccactcatgcaccagattatagacattgaaatctgaaccatctaaatgaac

SEQ ID NO: 215333 - DNA, 2318 bp, Zea Mays
gtgaaaattgtgttttcggtatttgaaacctaggggatatcatgactatcgcaaccggccaacaggaaatttcagccgggcatccccaattcatcttccccacgccgcgtccgcgtccggaccggacaccggcggcacctcctcctgcctccacttcaccagttcatcgggcgccggaagtgggagccatccgccgccgccacatatctgtcctcttcggcgctgactggggctcagccgctcgaagctccatcccgcctcccgtcttcgccgccgctcgtcagatccctcgacgcgacggtcgtgtcttgactctccaccacgcgactccacccagctcttctccacgcgactgcagagcgacgatcggaggcgccgccatcgcacaatccaccgtcgctgcctgctcctgtgatactctcacaagatccgctgctacatccatttcttcttcttccacgttgctgggaggagacgggcgcaaggatttgtgcgagggagaaagaaagggaaggaaaggggataggacgggaggaggagcacgactgcttaccacttattcttcccagcccgatggattccacagctcttcaatatgaaaaccaaaaattggtgcaacaactggaggtacagaagtccgaaatgcatgcattggagcgcaagttcaaggagcttagtgatgatcaatgttcttatgacaagactctgatttctttgaataaactgtggaatcagctgattgatgatttggttctgcttggagtacgggctggtggggatttggataatttgcaagcacttgaccatgaagagttatcagaagaatctttggagtcgtgtccttccgaggagatatttctcttaaggctcttgaagacaaacaacatcagagataatagtgacactagcttgttgaaatttgttgaagaagctcttgcttttcggtcttcagcaactgttactttgatgaagtccctgcaagagactatttcttcgcagcaagctagaaatgttattgttgcccttcgaaatcataatgattgcttgaaagaggtggcagagaatgcgagtcaagccatctctattatcaacgagaagcacaaaaggtatcttgatgagattgaggcttttaaaagcaaccattcaagggagctacaggaaatcaagcgtatttcaggtgagctagaggaaagcattgcagagcttgaggaaagtcaaaggaagttggttgtgctccagttgcagaggcatggttctgtaatggatgcatctggggcaaatgctgtgaatggtggtatttctactcataaatcttcagataaaagtatgagctggcaagacctcaaagatgctgttgacgcagctaagaccctcgcaggaaaccgtctattagaactccatcagactcaagaggataatctgatactatccaaggagctgggagatcttgaggggcaattgaaagatgagaagtatgtcttggtatccaaaccgtacatgattcttaatgataaactacaacatttgaatgctgagatagagcgttatagagggttggttgaagttttacagaatgacaaggaccagctcatgcaaagggagaaagaaatttctgcaaaagcagaatcgctcgacagtgttaaacaaaccattatcacatatgagaaaaaaattgaagaactggaaactcaaattcagatactcttttctgaaaagaatgatctcgaaaccaaggttgaggagactttgcaagattcaggtaagaaagacttcaagaatgagattcatgttatggctgcagcactctccaatgaactgggtatgatggagaatcagttgagtcgatcaaaggatgcagcttctgaagcacttgcattgcgtgagcaagctgaatcattaagatcattggtagctaaaaagattgaggaacacaagaagatttcggataaatacaactcacaagtaattgagatcaagtccctcaaggcattggtatgttgtcctaataacttctgtctccttaaaggtggtgctaaactgctaatagcctgagaaatcgatacatatatttaccccttgggaaagttagtgtgtttccttggtctctcttcgtgttgtagagcttgtatcaaagacaccagtagcagctatatcatgtttttgtctttgtgctagcaaggacatttgactttgtagtggtgaagagctcgattggttagtacatcattttaataataggcttgattcctagcttctgtaaatacactagtatgttgtcaattaacatatcatttggtctttcaattttatgtatcaat

SEQ ID NO: 215334 - DNA, 1620 bp, Zea Mays
cagtggccactggatgagaaaactaagatgagttccttgcagacccaacatgcagcgagtgaagacgcatccgtttgatcaaagcagagttcaattctctgctgtctttatattaagtcttgctgccatgatgctgagacttgttacttccgagagcagtctttgtgtttgatatccttcctgttgggtctgcaaaagtccagcctttgggtgatgctagtttcagagagtacagcaattccttcatcgttgtcatgctcacttgagttggatccactactgagggatcttgttgagaagaaactaagcctgaagaggaatgtgactgcaatggctaccgagctcagggatgccaggaacaggcttgcttcacaggaactgttgctggctcaggagatagaagccagaaaggttgctgagctaaagacgagaaatttggaggatgaggtgagcaagctgcagaaatgcttaggggacaaagatgagcagttgcgtgcatcgctatgtagcgcagatcagttccgcaatgagttggatggtttcagatcacaacttccagtgatgacaacgctgctgcactgctcatatttgttaggaaagctgaatgataggaacaattcgatgagtgagggtgaatttccggtgaacaatttagcagaacagctcaatcatcttgaaaagtgcctcgagagcagggatcccacactaagacaattcaaagattgttactctttgagaaccgagtctgacatcacggatgcctttgccagagttgcatttgataacgtaaacgaattctgaagatccattctgatgtccgatcgaaggaacagcgagaacattgacgaggatttgatttttcaggatgatggtgtggccaagccgggagaggatataagggcgctatctgctcactgggtaaacagaagcaaggaactggaatcacagcatcggaggacagcccaggagctgaagaggagggtaatgagacttgaactctgcatcctagaaccatatggaaactccataggctaagaaatcagatggccgtgcagcagcccacttgtagtggctcaggcgagaagcgcaatctctgggagagctcagccttcaagctcatagcatccgtgtcaatgttggtcctatttacacttgcaaaccgatgagctctcacggtctcgcttttgcgtacagaaaatataaacgttcatgtttgaatgtttgaattgctgtgaaacggacatttgttctcaacatccattcatgctagttacgtccataacaataaaaatgaatttctaggtccttaagcttgttaagtagcgcatcacagtggtcggtatagtcccaaaaataggcttgcagtgcaccatttttataagtttagaggatgtggtacatcacttaacaagttgaagtgtctagaaatgtattttcaaagtttgtggacctaagtatcatcctttgacgactttaaagggccactgatgcaactaactctttttaatacgcgtatgtttaaaacatacatttatatatgtatatacattttagggatcattaaaaattaccgttcttttaatcacttgttcattcacttttcacttcaacacattatca

SEQ ID NO: 215335 - DNA, 1474 bp, Zea Mays
ctagactgcagtctgcagtggccactggatgagaaaactaagatgagttccttgcagacccaacatgcagcgagtgaagacgcatccgtttgatcaaagcagagttcaattctctgctgtctttatattaagtcttgctgccatgatgctgagacttgttacttccgagagcagtctttgtgtttgatatccttcctgttgggtctgcaaaagtccagcctttgggtgatgctagtttcagagagtacagcaattccttcatcgttgtcatgctcacttgagttggatccactactgagggatcttgttgagaagaaactaagcctgaagaggaatgtgactgcaatggctaccgagctcagggatgccaggaacaggcttgcttcacaggaactgttgctggctcaggagatagaagccagaaaggttgctgagctaaagacgagaaatttggaggatgaggtgagcaagctgcagaaatgcttaggggacaaagatgagcagttgcgtgcatcgctatgtagcgcagatcagttccgcaatgagttggatggtttcagatcacaacttccagtgatgacaacgctgctgcactgctcatatttgttaggaaagctgaatgataggaacaattcgatgagtgagggtgaatttccggtgaacaatttagcagaacagctcaatcatcttgaaaagtgcctcgagagcagggatcccacactaagacaattcaaagattgttactctttgagaaccgagtctgacatcacggatgcctttgccagagttgcatttgataacgatgatggtgtggccaagccgggagaggatataagggcgctatctgctcactgggtaaacagaagcaaggaactggaatcacagctaagaaatcagatggccgtgcagcagcccacttgtagtggctcaggcgagaagcgcaatctctgggagagctcagccttcaagctcatagcatccgtgtcaatgttggtcctatttacacttgcaaaccgatgagctctcacggtctcgcttttgcgtacagaaaatataaacgttcatgtttgaatgtttgaattgctgtgaaacggacatttgttctcaacatccattcatgctagttacgtccataacaataaaaatgaatttctaggtccttaagcttgttaagtagcgcatcacagtggtcggtatagtcccaaaaataggcttgcagtgcaccatttttataagtttagaggatgtggtacatcacttaacaagttgaagtgtctagaaatgtattttcaaagtttgtggacctaagtatcatcctttgacgactttaaagggccactgatgcaactaactctttttaatacgcgtatgtttaaaacatacatttatatatgtatatacattttagggatcattaaaaattaccgttcttttaatcacttgttcattcacttttcacttcaacacattatca

SEQ ID NO: 215336 - DNA, 1578 bp, Zea Mays
gaagggtctcaattcagaagctttagcacaactacagcacgatgcttgcagcaagcacaaaactagactgcagtctgcagtggccactggatgagaaaactaagatgagttccttgcagacccaacatgcagcgagtgaagacgcatccgtttgatcaaagcagagttcaattctctgctgtctttatattaagtcttgctgccatgatgctgagacttgttacttccgagagcagtctttgtgtttgatatccttcctgttgggtctgcaaaagtccagcctttgggtgatgctagtttcagagagtacagcaattccttcatcgttgtcatgctcacttgagttggatccactactgagggatcttgttgagaagaaactaagcctgaagaggaatgtgactgcaatggctaccgagctcagggatgccaggaacaggcttgcttcacaggaactgttgctggctcaggagatagaagccagaaaggttgctgagctaaagacgagaaatttggaggatgaggtgagcaagctgcagaaatgcttaggggacaaagatgagcagttgcgtgcatcgctatgtagcgcagatcagttccgcaatgagttggatggtttcagatcacaacttccagtgatgacaacgctgctgcactgctcatatttgttaggaaagctgaatgataggaacaattcgatgagtgagggtgaatttccggtgaacaatttagcagaacagctcaatcatcttgaaaagtgcctcgagagcagggatcccacactaagacaattcaaagattgttactctttgagaaccgagtctgacatcacggatgcctttgccagagttgcatttgataacgatgatggtgtggccaagccgggagaggatataagggcgctatctgctcactgggtaaacagaagcaaggaactggaatcacagttggatcagcatcggaggacagcccaggagctgaagaggaggctaagaaatcagatggccgtgcagcagcccacttgtagtggctcaggcgagaagcgcaatctctgggagagctcagccttcaagctcatagcatccgtgtcaatgttggtcctatttacacttgcaaaccgatgagctctcacggtctcgcttttgcgtacagaaaatataaacgttcatgtttgaatgtttgaattgctgtgaaacggacatttgttctcaacatccattcatgctagttacgtccataacaataaaaatgaatttctaggtccttaagcttgttaagtagcgcatcacagtggtcggtatagtcccaaaaataggcttgcagtgcaccatttttataagtttagaggatgtggtacatcacttaacaagttgaagtgtctagaaatgtattttcaaagtttgtggacctaagtatcatcctttgacgactttaaagggccactgatgcaactaactctttttaatacgcgtatgtttaaaacatacatttatatatgtatatacattttagggatcattaaaaattaccgttcttttaatcacttgttcattcacttttcacttcaacacattatca

SEQ ID NO: 215337 - DNA, 898 bp, Zea Mays
tcaccctagcagctaggtgctcgtcgattcgattgcaaggacaagaaaaagaccctgctactttgttcgcacaagcctcagggatgatggacctgaggaagtatgatggggcgcttggcctgctaaatgctgtgttggaaattgacccaaatcattctgaggcttataggcagcgtgcatccgtgcttcggcataaatgcagatacgaggaagctgagagggactataacaaacacctggagctaagtcctgggtctgcttcagtggtgaaggaattatcccagcttctgcaggctcaaaattcattacaatctgcttatggccaattcgattctggagacttctcaaaagtcgtggaatacatcaacaaaattgtgctggttttttctccaggttgcttaaaggcaaagcttctcaaggctaaagcattgctagcactgaaagactactcaagtgttatttcagagaccggattcattctaaaggaagatgaagacaacttggatgcactgctattacgtggtcgtgcctactattaccttgctgatcatgatgtggcctccaggcactaccagaaagggcttcgtcttgatccagagcattccgaattgaagaaagcatatttcgggttaaaaaatcttttgaagaagaccaagagtgcagaagataatgctgccaagggtaagctacgtgtgtctgttgaggactacaaggcagctctagcaatggatccagaccatactgcttataatgtacatctttatcttgggctgtgtaaaactctggttagacttgggagaagtaaggaggcaatcagcacttgtacggaagcactgatcatagacagtgaacttgttgatgcgcttacacaggaggtaacatgatagcaccataattg

SEQ ID NO: 215338 - DNA, 2894 bp, Zea Mays
ggttctttctccaccccgatgcccctccccctcccccgtgtgatcccctctccagatcgatgtctgccccggccgtaacccccgcggctcaccgcacgaaaccgccgcgagatcttggagctcagcctctgacgatggctacgactacctcgccaacctccgcgagctctgtccccctccctctcctccaccggcggcgggggatccttggccatgttcctcccgaggcgccggtccacgcgcttcggcctccgcgtggtcatcaaggtcctaccaccgcctcacctcctccttgccgccgtgcggttgagcgccgacgacgttcgggctccggcggttcctgcatggaccggaagagccatctcatactctttctctacagcctttctgatggctcggaacagagccggagccgacggagatgaccgtcgacgagctgaagctgcaggcaagggccagcggcggccacgacctaaggaccagttccccgtcggcatgcgcgtgctcgccgtcgacgacgacccgacctgcctcaaggtcctcgagaacctcttgttccgctgccagtaccatgtgacaacaatgggccaggcagccactgccctgagctgctgagggagaagaaggaccagtttgaccctgtgatcagcaacgtccacatgccggacatggacggcttcaagctcctcgagcttgtgggcctcgagatggaccttccggggattagtgaagcggcagaagaagagcttttacatacccttacaatgctgattttgatggagatgaaatgaatttgcatgtccctcggacggaggaagctcgcactgaagcgcttaattctcataggggttcaaaataatttatgtactcctaagaatggtgagatactggttgcttccgcgcaagacttcttgacctcatctttcttagatatgttttcgaattagattgggatggaaattcacatttgttatcacattttctgttagcaagcacaaccattgtgacattattttgcatgcactcagcctctcaccatggctatgagaatgaaattcaacttatagatataccaaaatgttatagaatcaatataattagatatgtcaagatgacaacacatatttcattcaactactatggatttttcattgataaaatacatgcttgatggctgcttgtctaaaatttatttgtttaatattctttgtttgtaagcccaagaatttgtaaaccaggaaataattccaatgaaagatcggtgcggggcggaattttcttggctttttgtagtggctaccgtagtacatcaacttgggcacttggcgacatgtccggtgcccagctccatcacatatcaatctgaaattaaacatgtgtctgagttctgaatgaaaaaattcagctaacagctaacactacgcactactaacagacctcaagcataatactgttgatttgatgtccttatatttatcttgaagcattgcattcatgcagtcatgtaaatagtactttatttatcttctgaccaacacactaataaccaacctttgcagtgatgggggatacttcaatgcaataatgagcttcccacaaaattacccaaacagcccaccatcagtcagatttacctctgaaatgtggcatccaaatggtcaactttttattagtgaaaatagtatttatttactccatctacagttatgttttctgacatcatgcataatatttgaggaaacgccagtctaacctgatgggcgggtttgtatctctattcttcatccacccagtgaagatccaaacggttatgagctcgcaagtgagcgatggacacctgtgcacacagtatgtgatgagtcctccaatctgagaagtagagcatggtaaagcactccaagctgctctttcatcgggaaatttataggtgacacttgtgtcatacattgaactatggagtcaaacaaattacatattatccttcaacatttttcaccagtgggaactgtagttattgcgtagaatagatggtatattaatcgttgagagccaatgtttacattaactgttatgcagaagacaatttatgttttattttatatctaactgtactttgttgcagcttgtaggtactgatcacagcacattcaactccacacagattgtccatgtttctttcagtcaccatgatttatcactaggtcattgtgtttgtggccaacgagtattgttctaacagttatgttcccatagctagctagattcattgttgtgttttgttcagggtactttcaccacttctggtatggttctgtctgtaatgtgccagggattattatattgtttttggtttggatttggaatggtttggggtccacaacgatgatgcgtcagagctgttccaaggattggatgatttccattcccctgctgccaattcgactaggctcgccgtctccgctctgcccaactggcaccaagcagccaatggaacttgagcagccaatggatgatttccattcccctgctgccaattctccgaactgctttgacccttcaactcaatccgcatgtacccagtaaatgttcaatctgaatttggatcattgctagcaggattctttgcttgctcttctacttctgaaaattcgcaaaatggatagataattccagttaattttaatccattacagcgactgggtgcggaagccggaagggagaggcgcttggttgacccagaacggacgacaagacaccgccgggggttcgctgcaaccgcacgcgtggtggccggtgtgggaaggagcccactgctcaagcagcgacgacttccgtaacttctcaggccaagggagggagggcagcaaagaaagcaagcaagaaagaagccgatt

SEQ ID NO: 215339 - DNA, 2826 bp, Zea Mays
ggttctttctccaccccgatgcccctccccctcccccgtgtgatcccctctccagatcgatgtctgccccggccgtaacccccgcggctcaccgcacgaaaccgccgcgagatcttggagctcagcctctgacgatggctacgactacctcgccaacctccgcgagctctgtccccctccctctcctccaccggcggcgggggatccttggccatgttcctcccgaggcgccggtccacgcgcttcggcctccgcgtggtcatcaagcctttctgatggctcggaacagaggtcagctatgcgatgtggcgtggcgaggttaccgcgggcgccgcggaggtggagggggaaggggaggacgagggcacgggcaagagagcgcatcgctgtggacggtctcgtgagagggaccttgggtgatccgggtgcttggtttcttggttctacggctttcgctgctgttggatttgccgagccggagccgacggagatgaccgtcgacgagctgaagctgcaggcaagggccagcggcggccacgacctaaggaccagttccccgtcggcatgcgcgtgctcgccgtcgacgacgacccgacctgcctcaaggtcctcgagaacctcttgttccgctgccagtaccatgtgacaacaatgggccaggcagccactgccctgagctgctgagggagaagaaggaccagtttgaccctgtgatcagcaacgtccacatgccggacatggacggcttcaagctcctcgagcttgtgggcctcgagatggaccttccggggattaacagctgaaaacctcgcccgatttgtaaagaagttttcttgttcaatgcggcattgaatttgggaggaatgacaagtctcatgaaaacttctgtatgccctacacgtgaccactaaaagaaagagttagacaggacaaaaggctgcagcggcagaagaagagcttttacatacccttacaatgctgattttgatggagatgaaatgaatttgcatgtccctcggacggaggaagctcgcactgaagcgcttaattctcataggggttcaaaataatttatgtactcctaagaatggtgagatactggttgcttccgcgcaagacttcttgacctcatctttcttagatatgttttcgaattagattgggatggaaattcacatttgttatcacattttctgttagcaagcacaaccattgtgacattattttgcatgcactcagcctctcaccatggctatgagaatgaaattcaacttatagatataccaaaatgttatagaatcaatataattagatatgtcaagatgacaacacatatttcattcaactactatggatttttcattgataaaatacatgcttgatggctgcttgtctaaaatttatttgtttaatattctttgtttgtaagcccaagaatttgtaaaccaggaaataattccaatgaaagatcggtgcggggcggaattttcttggctttttgtagtggctaccgtagtacatcaacttgggcacttggcgacatgtccggtgcccagctccatcacatatcaatctgaaattaaacatgtgtctgagttctgaatgaaaaaattcagctaacagctaacactacgcactactaacagacctcaagcataatactgttgatttgatgtccttatatttatcttgaagcattgcattcatgcagtcatgtaaatagtactttatttatcttctgaccaacacactaataaccaacctttgcagtgatgggggatacttcaatgcaataatgagcttcccacaaaattacccaaacagcccaccatcagtcagatttacctctgaaatgtggcatccaaatgtctaacctgatgggcgggtttgtatctctattcttcatccacccagtgaagatccaaacggttatgagctcgcaagtgagcgatggacacctgtgcacacagtatgtgatgagtcctccaatctgagaagtagagcatggtaaagcactccaagctgctctttcatcgggaaatttatagcttgtaggtactgatcacagcacattcaactccacacagattgtccatgtttctttcagtcaccatgatttatcactaggtcattgtgtttgtggccaacgagtattgttctaacagttatgttcccatagctagctagattcattgttgtgttttgttcagggtactttcaccacttctggtatggttctgtctgtaatgtgccagggattattatattgtttttggtttggatttggaatggtttggggtccacaacgatgatgcgtcagagctgttccaaggattggatgatttccattcccctgctgccaattcgactaggctcgccgtctccgctctgcccaactggcaccaagcagccaatggaacttgagcagccaatggatgatttccattcccctgctgccaattctccgaactgctttgacccttcaactcaatccgcatgtacccagtaaatgttcaatctgaatttggatcattgctagcaggattctttgcttgctcttctacttctgaaaattcgcaaaatggatagataattccagttaattttaatccattacagcgactgggtgcggaagccggaagggagaggcgcttggttgacccagaacggacgacaagacaccgccgggggttcgctgcaaccgcacgcgtggtggccggtgtgggaaggagcccactgctcaagcagcgacgacttccgtaacttctcaggccaagttgtagggagggagggcagcaaagaaagcaagcaagaaagaagccgatt

SEQ ID NO: 215340 - DNA, 2309 bp, Zea Mays
ggttctttctccaccccgatgcccctccccctcccccgtgtgatcccctctccagatcgatgtctgccccggccgtaacccccgcggctcaccgcacgaaaccgccgcgagatcttggagctcagcctctgacgatggctacgactacctcgccaacctccgcgagctctgtccccctccctctcctccaccggcggcgggggatccttggccatgttcctcccgaggcgccggtccacgcgcttcggcctccgcgtggtcatcaagcctttctgatggctcggaacagaggtcagctatgcgatgtggcgtggcgaggttaccgcgggcgccgcggaggtggagggggaaggggaggacgagggcacgggcaagagagcgcatcgctgtggacggtctcgtgagagggaccttgggtgatccgggtgcttggtttcttggttctacggctttcgctgctgttggatttgccgagccggagccgacggagatgaccgtcgacgagctgaagctgcaggcaagggccagcggcggccacgacctaaggaccagttccccgtcggcatgcgcgtgctcgccgtcgacgacgacccgacctgcctcaaggtcctcgagaacctcttgttccgctgccagtaccatgtgacaacaatgggccaggcagccactgccctgagctgctgagggagaagaaggaccagtttgaccctgtgatcagcaacgtccacatgccggacatggacggcttcaagctcctcgagcttgtgggcctcgagatggaccttccggggattagtgaagcggcagaagaagagcttttacatacccttacaatgctgattttgatggagatgaaatgaatttgcatgtccctcggacggaggaagctcgcactgaagcgcttaattctcataggggttcaaaataatttatgtactcctaagaatgtgatgggggatacttcaatgcaataatgagcttcccacaaaattacccaaacagcccaccatcagtcagatttacctctgaaatgtggcatccaaatggtcaactttttattagtgaaaatagtatttatttactccatctacagttatgttttctgacatcatgcataatatttgaggaaacgccagtctaacctgatgggcgggtttgtatctctattcttcatccacccagtgaagatccaaacggttatgagctcgcaagtgagcgatggacacctgtgcacacagtatgtgatgagtcctccaatctgagaagtagagcatggtaaagcactccaagctgctctttcatcgggaaatttataggtgacacttgtgtcatacattgaactatggagtcaaacaaattacatattatccttcaacatttttcaccagtgggaactgtagttattgcgtagaatagatggtatattaatcgttgagagccaatgtttacattaactgttatgcagaagacaatttatgttttattttatatctaactgtactttgttgcagcttgtaggtactgatcacagcacattcaactccacacagattgtccatgtttctttcagtcaccatgatttatcactaggtcattgtgtttgtggccaacgagtattgttctaacagttatgttcccatagctagctagattcattgttgtgttttgttcagggtactttcaccacttctggtatggttctgtctgtaatgtgccagggattattatattgtttttggtttggatttggaatggtttggggtccacaacgatgatgcgtcagagctgttccaaggattggatgatttccattcccctgctgccaattcgactaggctcgccgtctccgctctgcccaactggcaccaagcagccaatggaacttgagcagccaatggatgatttccattcccctgctgccaattctccgaactgctttgacccttcaactcaatccgcatgtacccagtaaatgttcaatctgaatttggatcattgctagcaggattctttgcttgctcttctacttctgaaaattcgcaaaatggatagataattccagttaattttaatccattacagcctattgtggcagcaaacagcgactgggtgcggaagccggaagggagaggcgcttggttgacccagaacggacgacaagacaccgccgggggttcgctgcaaccgcacgcgtggtggccggtgtgggaaggagcccactgctcaagcagcgacgacttccgtaacttctcaggccaagttgtagggagggagggcagcaaagaaagcaagcaagaaagaagccgatt

SEQ ID NO: 215341 - DNA, 2565 bp, Zea Mays
ggttctttctccaccccgatgcccctccccctcccccgtgtgatcccctctccagatcgatgtctgccccggccgtaacccccgcggctcaccgcacgaaaccgccgcgagatcttggagctcagcctctgacgatggctacgactacctcgccaacctccgcgagctctgtccccctccctctcctccaccggcggcgggggatccttggccatgttcctcccgaggcgccggtccacgcgcttcggcctccgcgtggtcatcaagcctttctgatggctcggaacagaggtcagctatgcgatgtggcgtggcgaggttaccgcgggcgccgcggaggtggagggggaaggggaggacgagggcacgggcaagagagcgcatcgctgtggacggtctcgtgagagggaccttgggtgatccgggtgcttggtttcttggttctacggctttcgctgctgttggatttgccgagccggagccgacggagatgaccgtcgacgagctgaagctgcaggcaagggccagcggcggccacgacctaaggaccagttccccgtcggcatgcgcgtgctcgccgtcgacgacgacccgacctgcctcaaggtcctcgagaacctcttgttccgctgccagtaccatgtgacaacaatgggccaggcagccactgccctgagctgctgagggagaagaaggaccagtttgaccctgtgatcagcaacgtccacatgccggacatggacggcttcaagctcctcgagcttgtgggcctcgagatggaccttccggggattaacagctgaaaacctcgcccgatttgtaaagaagttttcttgttcaatgcggcattgaatttgggaggaatgacaagtctcatgaaaacttctgtatgccctacacgtgaccactaaaagaaagagttagacaggacaaaaggctgcagcggcagaagaagagcttttacatacccttacaatgctgattttgatggagatgaaatgaatttgcatgtccctcggacggaggaagctcgcactgaagcgcttaattctcataggggttcaaaataatttatgtactcctaagaatgtgatgggggatacttcaatgcaataatgagcttcccacaaaattacccaaacagcccaccatcagtcagatttacctctgaaatgtggcatccaaatgtctaacctgatgggcgggtttgtatctctattcttcatccacccagtgaagatccaaacggttatgagctcgcaagtgagcgatggacacctgtgcacacagtatggcttcgtatactttgtttacatatcttttccccattgtaatgttactcatctcccttttatgtgtatactttttagagagaaaattaccttgtagtctcattgtttcagtttatggtccaatttacaatggcttcactgtaaatgggaaaacaactcggtaggaatgcttttttgaattataaattatttctatttcatacgatgcttataggtatgtgatgagtcctccaatctgagaagtagagcatggtaaagcactccaagctgctctttcatcgggaaatttataggtgacacttgtgtcatacattgaactatggagtcaaacaaattacatattatccttcaacatttttcaccagtgggaactgtagttattgcgtagaatagatggtatattaatcgttgagagccaatgtttacattaactgttatgcagaagacaatttatgttttattttatatctaactgtactttgttgcagcttgtaggtactgatcacagcacattcaactccacacagattgtccatgtttctttcagtcaccatgatttatcactaggtcattgtgtttgtggccaacgagtattgttctaacagttatgttcccatagctagctagattcattgttgtgttttgttcagggtactttcaccacttctggtatggttctgtctgtaatgtgccagggattattatattgtttttggtttggatttggaatggtttggggtccacaacgatgatgcgtcagagctgttccaaggattggatgatttccattcccctgctgccaattcgactaggctcgccgtctccgctctgcccaactggcaccaagcagccaatggaacttgagcagccaatggatgatttccattcccctgctgccaattctccgaactgctttgacccttcaactcaatccgcatgtacccagtaaatgttcaatctgaatttggatcattgctagcaggattctttgcttgctcttctacttctgaaaattcgcaaaatggatagataattccagttaattttaatccattacagcaaacagcgactgggtgcggaagccggaagggagaggcgcttggttgacccagaacggacgacaagacaccgccgggggttcgctgcaaccgcacgcgtggtggccggtgtgggaaggagcccactgctcaagcagcgacgacttccgtaacttctcaggccaagttgtagggagggagggcagcaaagaaagcaagcaagaaagaagccgatt

SEQ ID NO: 215342 - DNA, 2729 bp, Zea Mays
ggttctttctccaccccgatgcccctccccctcccccgtgtgatcccctctccagatcgatgtctgccccggccgtaacccccgcggctcaccgcacgaaaccgccgcgagatcttggagctcagcctctgacgatggctacgactacctcgccaacctccgcgagctctgtccccctccctctcctccaccggcggcgggggatccttggccatgttcctcccgaggcgccggtccacgcgcttcggcctccgcgtggtcatcaagcctttctgatggctcggaacagaggtcagctatgcgatgtggcgtggcgaggttaccgcgggcgccgcggaggtggagggggaaggggaggacgagggcacgggcaagagagcgcatcgctgtggacggtctcgtgagtgagtgctgctgcctgcccctctctctctgcctgcgttctcctggtgctgctctccctctcctcccctgcttcgacctcccgcctttccccaccgtttcttggatttctaggatccagacaaccgcccttgtgagcctgccttcctgcctactacctgcgtacgtacaggagggaccttgggtgatccgggtgcttggtttcttggttctacggctttcgctgctgttggatttgccgagccggagccgacggagatgaccgtcgacgagctgaagctgcaggcaagggccagcggcggccacgacctaaggaccagttccccgtcggcatgcgcgtgctcgccgtcgacgacgacccgacctgcctcaaggtcctcgagaacctcttgttccgctgccagtaccatgtgacaacaatgggccaggcagccactgccctgagctgctgagggagaagaaggaccagtttgaccctgtgatcagcaacgtccacatgccggacatggacggcttcaagctcctcgagcttgtgggcctcgagatggaccttccggggattaacagctgaaaacctcgcccgatttgtaaagaagttttcttgttcaatgcggcattgaatttgggaggaatgacaagtctcatgaaaacttctgtatgccctacacgtgaccactaaaagaaagagttagacaggacaaaaggctgcagcggcagaagaagagcttttacatacccttacaatgctgattttgatggagatgaaatgaatttgcatgtccctcggacggaggaagctcgcactgaagcgcttaattctcataggggttcaaaataatttatgtactcctaagaatgtgatgggggatacttcaatgcaataatgagcttcccacaaaattacccaaacagcccaccatcagtcagatttacctctgaaatgtggcatccaaatgtctaacctgatgggcgggtttgtatctctattcttcatccacccagtgaagatccaaacggttatgagctcgcaagtgagcgatggacacctgtgcacacagtatggcttcgtatactttgtttacatatcttttccccattgtaatgttactcatctcccttttatgtgtatactttttagagagaaaattaccttgtagtctcattgtttcagtttatggtccaatttacaatggcttcactgtaaatgggaaaacaactcggtaggaatgcttttttgaattataaattatttctatttcatacgatgcttataggtatgtgatgagtcctccaatctgagaagtagagcatggtaaagcactccaagctgctctttcatcgggaaatttataggtgacacttgtgtcatacattgaactatggagtcaaacaaattacatattatccttcaacatttttcaccagtgggaactgtagttattgcgtagaatagatggtatattaatcgttgagagccaatgtttacattaactgttatgcagaagacaatttatgttttattttatatctaactgtactttgttgcagcttgtaggtactgatcacagcacattcaactccacacagattgtccatgtttctttcagtcaccatgatttatcactaggtcattgtgtttgtggccaacgagtattgttctaacagttatgttcccatagctagctagattcattgttgtgttttgttcagggtactttcaccacttctggtatggttctgtctgtaatgtgccagggattattatattgtttttggtttggatttggaatggtttggggtccacaacgatgatgcgtcagagctgttccaaggattggatgatttccattcccctgctgccaattcgactaggctcgccgtctccgctctgcccaactggcaccaagcagccaatggaacttgagcagccaatggatgatttccattcccctgctgccaattctccgaactgctttgacccttcaactcaatccgcatgtacccagtaaatgttcaatctgaatttggatcattgctagcaggattctttgcttgctcttctacttctgaaaattcgcaaaatggatagataattccagttaattttaatccattacagcaaacagcgactgggtgcggaagccggaagggagaggcgcttggttgacccagaacggacgacaagacaccgccgggggttcgctgcaaccgcacgcgtggtggccggtgtgggaaggagcccactgctcaagcagcgacgacttccgtaacttctcaggccaagggagggagggcagcaaagaaagcaagcaagaaagaagccgatt

SEQ ID NO: 215343 - DNA, 2654 bp, Zea Mays
ggttctttctccaccccgatgcccctccccctcccccgtgtgatcccctctccagatcgatgtctgccccggccgtaacccccgcggctcaccgcacgaaaccgccgcgagatcttggagctcagcctctgacgatggctacgactacctcgccaacctccgcgagctctgtccccctccctctcctccaccggcggcgggggatccttggccatgttcctcccgaggcgccggtccacgcgcttcggcctccgcgtggtcatcaagcctttctgatggctcggaacagaggtcagctatgcgatgtggcgtggcgaggttaccgcgggcgccgcggaggtggagggggaaggggaggacgagggcacgggcaagagagcgcatcgctgtggacggtctcgtgagagggaccttgggtgatccgggtgcttggtttcttggttctacggctttcgctgctgttggatttgccgagccggagccgacggagatgaccgtcgacgagctgaagctgcaggcaagggccagcggcggccacgacctaaggaccagttccccgtcggcatgcgcgtgctcgccgtcgacgacgacccgacctgcctcaaggtcctcgagaacctcttgttccgctgccagtaccatgtgacaacaatgggccaggcagccactgccctgagctgctgagggagaagaaggaccagtttgaccctgtgatcagcaacgtccacatgccggacatggacggcttcaagctcctcgagcttgtgggcctcgagatggaccttccggggattaacagctgaaaacctcgcccgatttgtaaagaagttttcttgttcaatgcggcattgaatttgggaggaatgacaagtctcatgaaaacttctgtatgccctacacgtgaccactaaaagaaagagttagacaggacaaaaggctgcagcggcagaagaagagcttttacatacccttacaatgctgattttgatggagatgaaatgaatttgcatgtccctcggacggaggaagctcgcactgaagcgcttaattctcataggggttcaaaataatttatgtactcctaagaatggtgagatactggttgcttccgcgcaagacttcttgacctcatctttcttagatatgttttcgaattagattgggatggaaattcacatttgttatcacattttctgttagcaagcacaaccattgtgacattattttgcatgcactcagcctctcaccatggctatgagaatgaaattcaacttatagatataccaaaatgttatagaatcaatataattagatatgtcaagatgacaacacatatttcattcaactactatggatttttcattgataaaatacatgcttgatggctgcttgtctaaaatttatttgtttaatattctttgtttgtaagcccaagaatttgtaaaccaggaaataattccaatgaaagatcggtgcggggcggaattttcttggctttttgtagtggctaccgtagtacatcaacttgggcacttggcgacatgtccggtgcccagctccatcacatatcaatctgaaattaaacatgtgtctgagttctgaatgaaaaaattcagctaacagctaacactacgcactactaacagacctcaagcataatactgttgatttgatgtccttatatttatcttgaagcattgcattcatgcagtcatgtaaatagtactttatttatcttctgaccaacacactaataaccaacctttgcagtgatgggggatacttcaatgcaataatgagcttcccacaaaattacccaaacagcccaccatcagtcagatttacctctgaaatgtggcatccaaatgtctaacctgatgggcgggtttgtatctctattcttcatccacccagtgaagatccaaacggttatgagctcgcaagtgagcgatggacacctgtgcacacacttgtaggtactgatcacagcacattcaactccacacagattgtccatgtttctttcagtcaccatgatttatcactaggtcattgtgtttgtggccaacgagtattgttctaacagttatgttcccatagctagctagattcattgttgtgttttgttcagggtactttcaccacttctggtatggttctgtctgtaatgtgccagggattattatattgtttttggtttggatttggaatggtttggggtccacaacgatgatgcgtcagagctgttccaaggattggatgatttccattcccctgctgccaattcgactaggctcgccgtctccgctctgcccaactggcaccaagcagccaatggaacttgagcagccaatggatgatttccattcccctgctgccaattctccgaactgctttgacccttcaactcaatccgcatgtacccagcctattgtggcagcaaacagcgactgggtgcggaagccggaagggagaggcgcttggttgacccagaacggacgacaagacaccgccgggggttcgctgcaaccgcacgcgtggtggccggtgtgggaaggagcccactgctcaagcagcgacgacttccgtaacttctcaggccaagttgtagggagggagggcagcaaagaaagcaagcaagaaagaagccgatt

SEQ ID NO: 215344 - DNA, 4064 bp, Zea Mays
ggttctttctccaccccgatgcccctccccctcccccgtgtgatcccctctccagatcgatgtctgccccggccgtaacccccgcggctcaccgcacgaaaccgccgcgagatcttggagctcagcctctgacgatggctacgactacctcgccaacctccgcgagctctgtccccctccctctcctccaccggcggcgggggatccttggccatgttcctcccgaggcgccggtccacgcgcttcggcctccgcgtggtcatcaagcctttctgatggctcggaacagagccggagccgacggagatgaccgtcgacgagctgaagctgcaggcaagggccagcggcggccacgacctaaggaccagttccccgtcggcatgcgcgtgctcgccgtcgacgacgacccgacctgcctcaaggtcctcgagaacctcttgttccgctgccagtaccatgtgacaacaatgggccaggcagccactgccctgagctgctgagggagaagaaggaccagtttgaccctgtgatcagcaacgtccacatgccggacatggacggcttcaagctcctcgagcttgtgggcctcgagatggaccttccggggattaacagctgaaaacctcgcccgatttgtaaagaagttttcttgttcaatgcggcattgaatttgggaggaatgacaagtctcatgaaaacttctgtatgccctacacgtgaccactaaaagaaagagttagacaggacaaaaggctgcagcggcagaagaagagcttttacatacccttacaatgctgattttgatggagatgaaatgaatttgcatgtccctcggacggaggaagctcgcactgaagcgcttaattctcataggggttcaaaataatttatgtactcctaagaatgtgatgggggatacttcaatgcaataatgagcttcccacaaaattacccaaacagcccaccatcagtcagatttacctctgaaatgtggcatccaaatgtctaacctgatgggcgggtttgtatctctattcttcatccacccagtgaagatccaaacggttatgagctcgcaagtgagcgatggacacctgtgcacacagtatggcttcgtatactttgtttacatatcttttccccattgtaatgttactcatctcccttttatgtgtatactttttagagagaaaattaccttgtagtctcattgtttcagtttatggtccaatttacaatggcttcactgtaaatgggaaaacaactcggtaggaatgcttttttgaattataaattatttctatttcatacgatgcttataggtatgtgatgagtcctccaatctgagaagtagagcatggtaaagcactccaagctgctctttcatcgggaaatttataggtgacacttgtgtcatacattgaactatggagtcaaacaaattacatattatccttcaacatttttcaccagtgggaactgtagttattgcgtagaatagatggtatattaatcgttgagagccaatgtttacattaactgttatgcagaagacaatttatgttttattttatatctaactgtactttgttgcagcttgtaggtactgatcacagcacattcaactccacacagattgtccatgtttctttcagtcaccatgatttatcactaggtcattgtgtttgtggccaacgagtattgttctaacagttatgttcccatagctagctagattcattgttgtgttttgttcagggtactttcaccacttctggtatggttctgtctgtaatgtgccagggattattatattgtttttggtttggatttggaatggtttggggtccacaacgatgatgcgtcagagctgttccaaggattggatgatttccattcccctgctgccaattcgactaggctcgccgtctccgctctgcccaactggcaccaagcagccaatggaacttgagcagccaatggatgatttccattcccctgctgccaattctccgaactgctttgacccttcaactcaatccgcatgtacccagcctattgtggcagcaaacagcgactgggtgcggaagccggaagggagaggcgcttggttgacccagaacggacgacaagacaccgccgggggttcgctgcaaccgcacgcgtggtggccggtgtgggaaggagcccactgctcaagcagcgacgacttccgtaacttctcaggccaagggcatgatgaaatcagtgtttgctatttagcctccttcacaactaagatcatcctacataatagatttagacaacaaaaacttatggagtttgctgaaatgccctttcaggcatgctccatctgtgctacaagggtcagaatggacttgataggacatttgactatacaacatggaagttatttcaagatatccttttttaactatgctgtcgttgctgatcatttgcatttttacatttttcacattatactatagttgaagatacattcctgaggacgaatgggtgcagttatgggcttcctgcttgctgccagcagtcttttggtgcttttatattgctattaatttgtttgaaatttattatggtgatgactgggaaggtctttttgaggctattactggttatggccttggtggctctttggccgtgttggtggtggtatttataccaaggctgctgatgttggtgccgaccttgtggggaaggtagaaagaaacattcctgaggacgatccaagaaacccagctgtcattgctgacaatgttggtgataatgttggagatattgttggaatgggatcatatctctttggctcatatgctgaatcgtcatgtgctgctcttgttgtggcctcgatctcgtcttttggaatcaaccatcaatttactccaatggtgtatccccttcttgtcagctctgttggtattatagcatgtctcataacaacgctgtttgcaactgatttcttcgagataaaggctgtgagtgaaatagagcctgctctcaagaaacaacttataatatccactgttgtgatgaccattggcattgcgctcatgttggcttggtcttccatacaccttcaccatttataactttggagcccagaagacagtgcaaagctggcaattgttcttgtgtgtggcggttggtctctgggctggcttagtcattggttttattactgagtactacacaagcaatgcctacagccctgtataagatgttgctgattcctgcagaactggagctgccactaatgtcatttttgggcttgctctgggttacaaatcagtcattatcccaatttttgctattgcgtttagtatcttccttagcttcagccttgctgccatgtatggtgttgttgtggctgctcttggaatgctgagtaccattgccacagaccttgctattgatgcctatggccctatcagtgataatgctggaagcttaagtctgtatgggtgcatcttatcatttatatgtatatctgaaagcttaagtatttttttaaatagaagatgtctggaaactttagtaacgacatgagtttcaggctttcagctatagcagtcttattcgcttttaagacagagaagatttttatttagagtttagaaagagtaggtgctatgggtgcatgttatcatttatgtggggaacatctctggtggaaattaatcagtaacgacatgagttaagacagagaagcttaagtattttttcagctatagcagtcttattcgcttttaagacagagaagcttaagtattttttgaatagaagatgtctggaaactttagtaacgacatgagttaatcagaagagatggaagggtagtttatcaacatgtatttggcacttcgccgaaaatgtcacttggactatcttgcaaactgaattttcagattggcttcttctgtctgaacattcagttcagtcttgcaggatttatttggtgtgcacactccagaggtcagcattgattcgatccaaatcaacttacaacttgttctacattgtttttcatcaacaactgtgttcag

SEQ ID NO: 215345 - DNA, 4958 bp, Zea Mays
ggttctttctccaccccgatgcccctccccctcccccgtgtgatcccctctccagatcgatgtctgccccggccgtaacccccgcggctcaccgcacgaaaccgccgcgagatcttggagctcagcctctgacgatggctacgactacctcgccaacctccgcgagctctgtccccctccctctcctccaccggcggcgggggatccttggccatgttcctcccgaggcgccggtccacgcgcttcggcctccgcgtggtcatcaagcctttctgatggctcggaacagaggtcagctatgcgatgtggcgtggcgaggttaccgcgggcgccgcggaggtggagggggaaggggaggacgagggcacgggcaagagagcgcatcgctgtggacggtctcgtgagagggaccttgggtgatccgggtgcttggtttcttggttctacggctttcgctgctgttggatttgccgagccggagccgacggagatgaccgtcgacgagctgaagctgcaggcaagggccagcggcggccacgacctaaggaccagttccccgtcggcatgcgcgtgctcgccgtcgacgacgacccgacctgcctcaaggtcctcgagaacctcttgttccgctgccagtaccatgtgacaacaatgggccaggcagccactgccctgagctgctgagggagaagaaggaccagtttgaccctgtgatcagcaacgtccacatgccggacatggacggcttcaagctcctcgagcttgtgggcctcgagatggaccttccggggattaacagctgaaaacctcgcccgatttgtaaagaagttttcttgttcaatgcggcattgaatttgggaggaatgacaagtctcatgaaaacttctgtatgccctacacgtgaccactaaaagaaagagttagacaggacaaaaggctgcagcggcagaagaagagcttttacatacccttacaatgctgattttgatggagatgaaatgaatttgcatgtccctcggacggaggaagctcgcactgaagcgcttaattctcataggggttcaaaataatttatgtactcctaagaatggtgagatactggttgcttccgcgcaagacttcttgacctcatctttcttagatatgttttcgaattagattgggatggaaattcacatttgttatcacattttctgttagcaagcacaaccattgtgacattattttgcatgcactcagcctctcaccatggctatgagaatgaaattcaacttatagatataccaaaatgttatagaatcaatataattagatatgtcaagatgacaacacatatttcattcaactactatggatttttcattgataaaatacatgcttgatggctgcttgtctaaaatttatttgtttaatattctttgtttgtaagcccaagaatttgtaaaccaggaaataattccaatgaaagatcggtgcggggcggaattttcttggctttttgtagtggctaccgtagtacatcaacttgggcacttggcgacatgtccggtgcccagctccatcacatatcaatctgaaattaaacatgtgtctgagttctgaatgaaaaaattcagctaacagctaacactacgcactactaacagacctcaagcataatactgttgatttgatgtccttatatttatcttgaagcattgcattcatgcagtcatgtaaatagtactttatttatcttctgaccaacacactaataaccaacctttgcagtgatgggggatacttcaatgcaataatgagcttcccacaaaattacccaaacagcccaccatcagtcagatttacctctgaaatgtggcatccaaatgtctaacctgatgggcgggtttgtatctctattcttcatccacccagtgaagatccaaacggttatgagctcgcaagtgagcgatggacacctgtgcacacagtatgtgatgagtcctccaatctgagaagtagagcatggtaaagcactccaagctgctctttcatcgggaaatttataggtgacacttgtgtcatacattgaactatggagtcaaacaaattacatattatccttcaacatttttcaccagtgggaactgtagttattgcgtagaatagatggtatattaatcgttgagagccaatgtttacattaactgttatgcagaagacaatttatgttttattttatatctaactgtactttgttgcagcttgtaggtactgatcacagcacattcaactccacacagattgtccatgtttctttcagtcaccatgatttatcactaggtcattgtgtttgtggccaacgagtattgttctaacagttatgttcccatagctagctagattcattgttgtgttttgttcagggtactttcaccacttctggtatggttctgtctgtaatgtgccagggattattatattgtttttggtttggatttggaatggtttggggtccacaacgatgatgcgtcagagctgttccaaggattggatgatttccattcccctgctgccaattcgactaggctcgccgtctccgctctgcccaactggcaccaagcagccaatggaacttgagcagccaatggatgatttccattcccctgctgccaattctccgaactgctttgacccttcaactcaatccgcatgtacccagtaaatgttcaatctgaatttggatcattgctagcaggattctttgcttgctcttctacttctgaaaattcgcaaaatggatagataattccagttaattttaatccattacagcctattgtggcagcaaacagcgactgggtgcggaagccggaagggagaggcgcttggttgacccagaacggacgacaagacaccgccgggggttcgctgcaaccgcacgcgtggtggccggtgtgggaaggagcccactgctcaagcagcgacgacttccgtaacttctcaggccaagggagggagggcagcaaagaaagcaagcaagaaagaagccgattccactggtggttaaggttttggattaaaggagagaggtgcagagaaaaaaaggcaatcttactcttaatctctgtgtccacatcacttccgatcatgccgtgatcgacagaagtacgggtgccatgtataagtgccccctccaactcaccaaagtaataaggagcagctgctgcaggttgcaactccctgggccaagcagtagcccagcaagttcagcaccaatggcagccatatgaaatataaggcaaagcagataaaaagcttaatttttttcaataaggtaaaggcaatgacagaaaagtgaggagggtcagaggtgtacagataaggatgagggctgaaaagaggagcaggaaggcatgctccatctgtgctacaaggttatgggcttcctgcttgctgccagcagtcttttggtgcttttatattgctattaatttgtttgaaatttattatggtgatgactgggaaggtctttttgaggctattactggttatggccttggtggctctttggccgtgttggtggtggtatttataccaaggctgctgatgttggtgccgaccttgtggggaaggtagaaagaaacattcctgaggacgatccaagaaacccagctgtcattgctgacaatgttggtgataatgttggagatattgttggaatgggatcatatctctttggctcatatgctgaatcgtcatgtgctgctcttgttgtggcctcgatctcgtcttttggaatcaaccatcaatttactccaatggtgtatccccttcttgtcagctctgttggtattatagcatgtctcataacaacgctgtttgcaactgatttcttcgagataaaggctgtgagtgaaatagagcctgctctcaagaaacaacttataatatccactgttgtgatgaccattggcattgcgctcatgttggcttggtcttccatacaccttcaccatttataactttggagcccagaagacagtgcaaagctggcaattgttcttgtgtgtggcggttggtctctgggctggcttagtcattggttttattactgagtactacacaagcaatgcctacagccctgtataagatgttgctgattcctgcagaactggagctgccactaatgtcatttttgggcttgctctgggttacaaatcagtcattatcccaatttttgctattgcgtttagtatcttccttagcttcagccttgctgccatgtatggtgttgttgtggctgctcttggaatgctgagtaccattgccacagaccttgctattgatgcctatggccctatcagtgataatgctggaagcttaagtctgtatgggtgcatcttatcatttatatgtatatctgaaagcttaagtatttttttaaatagaagatgtctggaaactttagtaacgacatgagtttcaggctttcagctatagcagtcttattcgcttttaagacagagaagatttttatttagagtttagaaagagtaggtgctatgggtgcatgttatcatttatgtggggaacatctctggtggaaattaatcagtaacgacatgagttaagacagagaagcttaagtattttttcagctatagcagtcttattcgcttttaagacagagaagcttaagtattttttgaatagaagatgtctggaaactttagtaacgacatgagttaatcagaagagatggaagggtagtttatcaacatgtatttggcacttcgccgaaaatgtcacttggactatcttgcaaactgaattttcagattggcttcttctgtctgaacattcagttcagtcttgcaggatttatttggtgtgcacactccagaggtcagcattgattcgatccaaatcaacttacaacttgttctacattgtttttcatcaacaactgtgttcag

SEQ ID NO: 215346 - DNA, 4271 bp, Zea Mays
ggttctttctccaccccgatgcccctccccctcccccgtgtgatcccctctccagatcgatgtctgccccggccgtaacccccgcggctcaccgcacgaaaccgccgcgagatcttggagctcagcctctgacgatggctacgactacctcgccaacctccgcgagctctgtccccctccctctcctccaccggcggcgggggatccttggccatgttcctcccgaggcgccggtccacgcgcttcggcctccgcgtggtcatcaagcctttctgatggctcggaacagaggtcagctatgcgatgtggcgtggcgaggttaccgcgggcgccgcggaggtggagggggaaggggaggacgagggcacgggcaagagagcgcatcgctgtggacggtctcgtgagagggaccttgggtgatccgggtgcttggtttcttggttctacggctttcgctgctgttggatttgccgagccggagccgacggagatgaccgtcgacgagctgaagctgcaggcaagggccagcggcggccacgacctaaggaccagttccccgtcggcatgcgcgtgctcgccgtcgacgacgacccgacctgcctcaaggtcctcgagaacctcttgttccgctgccagtaccatgtgacaacaatgggccaggcagccactgccctgagctgctgagggagaagaaggaccagtttgaccctgtgatcagcaacgtccacatgccggacatggacggcttcaagctcctcgagcttgtgggcctcgagatggaccttccggggattaacagctgaaaacctcgcccgatttgtaaagaagttttcttgttcaatgcggcattgaatttgggaggaatgacaagtctcatgaaaacttctgtatgccctacacgtgaccactaaaagaaagagttagacaggacaaaaggctgcagaagaagagcttttacatacccttacaatgctgattttgatggagatgaaatgaatttgcatgtccctcggacggaggaagctcgcactgaagcgcttaattctcataggggttcaaaataatttatgtactcctaagaatgtgatgggggatacttcaatgcaataatgagcttcccacaaaattacccaaacagcccaccatcagtcagatttacctctgaaatgtggcatccaaatgtctaacctgatgggcgggtttgtatctctattcttcatccacccagtgaagatccaaacggttatgagctcgcaagtgagcgatggacacctgtgcacacacttgtaggtactgatcacagcacattcaactccacacagattgtccatgtttctttcagtcaccatgatttatcactaggtcattgtgtttgtggccaacgagtattgttctaacagttatgttcccatagctagctagattcattgttgtgttttgttcagggtactttcaccacttctggtatggttctgtctgtaatgtgccagggattattatattgtttttggtttggatttggaatggtttggggtccacaacgatgatgcgtcagagctgttccaaggattggatgatttccattcccctgctgccaattcgactaggctcgccgtctccgctctgcccaactggcaccaagcagccaatggaacttgagcagccaatggatgatttccattcccctgctgccaattctccgaactgctttgacccttcaactcaatccgcatgtacccagtaaatgttcaatctgaatttggatcattgctagcaggattctttgcttgctcttctacttctgaaaattcgcaaaatggatagataattccagttaattttaatccattacagcctattgtggcagcaaacagcgactgggtgcggaagccggaagggagaggcgcttggttgacccagaacggacgacaagacaccgccgggggttcgctgcaaccgcacgcgtggtggccggtgtgggaaggagcccactgctcaagcagcgacgacttccgtaacttctcaggccaagttgtagggagggagggcagcaaagaaagcaagcaagaaagaagccgattccactggtggttaaggttttggattaaaggagagaggtgcagagaaaaaaaggcaatcttactcttaatctctgtgtccacatcacttccgatcatgccgtgatcgacagaagtacgggtgccatgtataagtgccccctccaactcaccaaagtaataaggagcagctgctgcaggttgcaactccctgggccaagcagtagcccagcaagttcagcaccaatggcagccatatgaaatataaggcaaagcagataaaaagcttaatttttttcaataaggtaaaggcaatgacagaaaagtgaggagggtcagaggtgtacagataaggatgagggctgaaaagaggagcaggaagggcatgatgaaatcagtgtttgctatttagcctccttcacaactaagatcatcctacataatagatttagacaacaaaaacttatggagtttgctgaaatgccctttcaggcatgctccatctgtgctacaagggtcagaatggacttgataggacatttgactatacaacatggaagttatttcaagatatccttttttaactatgctgtcgttgctgatcatttgcatttttacatttttcacattatactatagttgaagatacattcctgaggacgaatgggtgcagttatgggcttcctgcttgctgccagcagtcttttggtgcttttatattgctattaatttgtttgaaatttattatggtgatgactgggaaggtctttttgaggctattactggttatggccttggtggctctttggccgtgttggtggtggtatttataccaaggctgctgatgttggtgccgaccttgtggggaaggtagaaagaaacattcctgaggacgatccaagaaacccagctgtcattgctgacaatgttggtgataatgttggagatattgttggaatgggatcatatctctttggctcatatgctgaatcgtcatgtgctgctcttgttgtggcctcgatctcgtcttttggaatcaaccatcaatttactccaatggtgtatccccttcttgtcagctctgttggtattatagcatgtctcataacaacgctgtttgcaactgatttcttcgagataaaggctgtgagtgaaatagagcctgctctcaagaaacaacttataatatccactgttgtgatgaccattggcattgcgctcatgttggcttggtcttccatacaccttcaccatttataactttggagcccagaagacagtgcaaagctggcaattgttcttgtgtgtggcggttggtctctgggctggcttagtcattggttttattactgagtactacacaagcaatgcctacagccctgtataagatgttgctgattcctgcagaactggagctgccactaatgtcatttttgggcttgctctgggttacaaatcagtcattatcccaatttttgctattgcgtttagtatcttccttagcttcagccttgctgccatgtatggtgttgttgtggctgctcttggaatgctgagtaccattgccacagaccttgctattgatgcctatggccctatcagtgataatgctggaagcttaagtctgtatgggtgcatcttatcatttatatgtatatctgaaagcttaagtatttttttaaatagaagatgtctggaaactttagtaacgacatgagtttcaggctttcagctatagcagtcttattcgcttttaagacagagaagatttttatttagagtttagaaagagtaggtgctatgggtgcatgttatcatttatgtggggaacatctctggtggaaattaatcagtaacgacatgagttaagacagagaagcttaagtattttttcagctatagcagtcttattcgcttttaagacagagaagcttaagtattttttgaatagaagatgtctggaaactttagtaacgacatgagttaatcagaagagatggaagggtagtttatcaacatgtatttggcacttcgccgaaaatgtcacttggactatcttgcaaactgaattttcagattggcttcttctgtctgaacattcagttcagtcttgcaggatttatttggtgtgcacactccagaggtcagcattgattcgatccaaatcaacttacaacttgttctacattgtttttcatcaacaactgtgttcag

SEQ ID NO: 215347 - DNA, 4304 bp, Zea Mays
ggttctttctccaccccgatgcccctccccctcccccgtgtgatcccctctccagatcgatgtctgccccggccgtaacccccgcggctcaccgcacgaaaccgccgcgagatcttggagctcagcctctgacgatggctacgactacctcgccaacctccgcgagctctgtccccctccctctcctccaccggcggcgggggatccttggccatgttcctcccgaggcgccggtccacgcgcttcggcctccgcgtggtcatcaagcctttctgatggctcggaacagaggtcagctatgcgatgtggcgtggcgaggttaccgcgggcgccgcggaggtggagggggaaggggaggacgagggcacgggcaagagagcgcatcgctgtggacggtctcgtgagtgagtgctgctgcctgcccctctctctctgcctgcgttctcctggtgctgctctccctctcctcccctgcttcgacctcccgcctttccccaccgtttcttggatttctaggatccagacaaccgcccttgtgagcctgccttcctgcctactacctgcgtacgtacaggagggaccttgggtgatccgggtgcttggtttcttggttctacggctttcgctgctgttggatttgccgagccggagccgacggagatgaccgtcgacgagctgaagctgcaggcaagggccagcggcggccacgacctaaggaccagttccccgtcggcatgcgcgtgctcgccgtcgacgacgacccgacctgcctcaaggtcctcgagaacctcttgttccgctgccagtaccatgtgacaacaatgggccaggcagccactgccctgagctgctgagggagaagaaggaccagtttgaccctgtgatcagcaacgtccacatgccggacatggacggcttcaagctcctcgagcttgtgggcctcgagatggaccttccggggattaacagctgaaaacctcgcccgatttgtaaagaagttttcttgttcaatgcggcattgaatttgggaggaatgacaagtctcatgaaaacttctgtatgccctacacgtgaccactaaaagaaagagttagacaggacaaaaggctgcagcggcagaagaagagcttttacatacccttacaatgctgattttgatggagatgaaatgaatttgcatgtccctcggacggaggaagctcgcactgaagcgcttaattctcataggggttcaaaataatttatgtactcctaagaatgtgatgggggatacttcaatgcaataatgagcttcccacaaaattacccaaacagcccaccatcagtcagatttacctctgaaatgtggcatccaaatgtctaacctgatgggcgggtttgtatctctattcttcatccacccagtgaagatccaaacggttatgagctcgcaagtgagcgatggacacctgtgcacacacttgtaggtactgatcacagcacattcaactccacacagattgtccatgtttctttcagtcaccatgatttatcactaggtcattgtgtttgtggccaacgagtattgttctaacagttatgttcccatagctagctagattcattgttgtgttttgttcagggtactttcaccacttctggtatggttctgtctgtaatgtgccagggattattatattgtttttggtttggatttggaatggtttggggtccacaacgatgatgcgtcagagctgttccaaggattggatgatttccattcccctgctgccaattcgactaggctcgccgtctccgctctgcccaactggcaccaagcagccaatggaacttgagcagccaatggatgatttccattcccctgctgccaattctccgaactgctttgacccttcaactcaatccgcatgtacccagtaaatgttcaatctgaatttggatcattgctagcaggattctttgcttgctcttctacttctgaaaattcgcaaaatggatagataattccagttaattttaatccattacagcaaacagcgactgggtgcggaagccggaagggagaggcgcttggttgacccagaacggacgacaagacaccgccgggggttcgctgcaaccgcacgcgtggtggccggtgtgggaaggagcccactgctcaagcagcgacgacttccgtaacttctcaggccaagggagggagggcagcaaagaaagcaagcaagaaagaagccgattccactggtggttaaggttttggattaaaggagagaggtgcagagaaaaaaaggttgcaactccctgggccaagcagtagcccagcaagttcagcaccaatggcagccatatgaaatataaggcaaagcagataaaaagcttaatttttttcaataaggtaaaggcaatgacagaaaagtgaggagggtcagaggtgtacagataaggatgagggctgaaaagaggagcaggaagggcatgatgaaatcagtgtttgctatttagcctccttcacaactaagatcatcctacataatagatttagacaacaaaaacttatggagtttgctgaaatgccctttcaggcatgctccatctgtgctacaagggtcagaatggacttgataggacatttgactatacaacatggaagttatttcaagatatccttttttaactatgctgtcgttgctgatcatttgcatttttacatttttcacattatactatagttgaagatacattcctgaggacgaatgggtgcagttatgggcttcctgcttgctgccagcagtcttttggtgcttttatattgctattaatttgtttgaaatttattatggtgatgactgggaaggtctttttgaggctattactggttatggccttggtggctctttggccgtgttggtggtggtatttataccaaggctgctgatgttggtgccgaccttgtggggaaggtagaaagaaacattcctgaggacgatccaagaaacccagctgtcattgctgacaatgttggtgataatgttggagatattgttggaatgggatcatatctctttggctcatatgctgaatcgtcatgtgctgctcttgttgtggcctcgatctcgtcttttggaatcaaccatcaatttactccaatggtgtatccccttcttgtcagctctgttggtattatagcatgtctcataacaacgctgtttgcaactgatttcttcgagataaaggctgtgagtgaaatagagcctgctctcaagaaacaacttataatatccactgttgtgatgaccattggcattgcgctcatgttggcttggtcttccatacaccttcaccatttataactttggagcccagaagacagtgcaaagctggcaattgttcttgtgtgtggcggttggtctctgggctggcttagtcattggttttattactgagtactacacaagcaatgcctacagccctgtataagatgttgctgattcctgcagaactggagctgccactaatgtcatttttgggcttgctctgggttacaaatcagtcattatcccaatttttgctattgcgtttagtatcttccttagcttcagccttgctgccatgtatggtgttgttgtggctgctcttggaatgctgagtaccattgccacagaccttgctattgatgcctatggccctatcagtgataatgctggaagcttaagtctgtatgggtgcatcttatcatttatatgtatatctgaaagcttaagtatttttttaaatagaagatgtctggaaactttagtaacgacatgagtttcaggctttcagctatagcagtcttattcgcttttaagacagagaagatttttatttagagtttagaaagagtaggtgctatgggtgcatgttatcatttatgtggggaacatctctggtggaaattaatcagtaacgacatgagttaagacagagaagcttaagtattttttcagctatagcagtcttattcgcttttaagacagagaagcttaagtattttttgaatagaagatgtctggaaactttagtaacgacatgagttaatcagaagagatggaagggtagtttatcaacatgtatttggcacttcgccgaaaatgtcacttggactatcttgcaaactgaattttcagattggcttcttctgtctgaacattcagttcagtcttgcaggatttatttggtgtgcacactccagaggtcagcattgattcgatccaaatcaacttacaacttgttctacattgtttttcatcaacaactgtgttcag

SEQ ID NO: 215348 - DNA, 4306 bp, Zea Mays
ggttctttctccaccccgatgcccctccccctcccccgtgtgatcccctctccagatcgatgtctgccccggccgtaacccccgcggctcaccgcacgaaaccgccgcgagatcttggagctcagcctctgacgatggctacgactacctcgccaacctccgcgagctctgtccccctccctctcctccaccggcggcgggggatccttggccatgttcctcccgaggcgccggtccacgcgcttcggcctccgcgtggtcatcaagcctttctgatggctcggaacagaggtcagctatgcgatgtggcgtggcgaggttaccgcgggcgccgcggaggtggagggggaaggggaggacgagggcacgggcaagagagcgcatcgctgtggacggtctcgtgagatccagacaaccgcccttgtgagcctgccttcctgcctactacctgcgtacgtacaggagggaccttgggtgatccgggtgcttggtttcttggttctacggctttcgctgctgttggatttgccgagccggagccgacggagatgaccgtcgacgagctgaagctgcaggcaagggccagcggcggccacgacctaaggaccagttccccgtcggcatgcgcgtgctcgccgtcgacgacgacccgacctgcctcaaggtcctcgagaacctcttgttccgctgccagtaccatgtgacaacaatgggccaggcagccactgccctgagctgctgagggagaagaaggaccagtttgaccctgtgatcagcaacgtccacatgccggacatggacggcttcaagctcctcgagcttgtgggcctcgagatggaccttccggggattaacagctgaaaacctcgcccgatttgtaaagaagttttcttgttcaatgcggcattgaatttgggaggaatgacaagtctcatgaaaacttctgtatgccctacacgtgaccactaaaagaaagagttagacaggacaaaaggctgcagcggcagaagaagagcttttacatacccttacaatgctgattttgatggagatgaaatgaatttgcatgtccctcggacggaggaagctcgcactgaagcgcttaattctcataggggttcaaaataatttatgtactcctaagaatgtgatgggggatacttcaatgcaataatgagcttcccacaaaattacccaaacagcccaccatcagtcagatttacctctgaaatgtggcatccaaatgtctaacctgatgggcgggtttgtatctctattcttcatccacccagtgaagatccaaacggttatgagctcgcaagtgagcgatggacacctgtgcacacagtatggcttcgtatactttgtttacatatcttttccccattgtaatgttactcatctcccttttatgtgtatactttttagagagaaaattaccttgtagtctcattgtttcagtttatggtccaatttacaatggcttcactgtaaatgggaaaacaactcggtaggaatgcttttttgaattataaattatttctatttcatacgatgcttataggtatgtgatgagtcctccaatctgagaagtagagcatggtaaagcactccaagctgctctttcatcgggaaatttataggtgacacttgtgtcatacattgaactatggagtcaaacaaattacatattatccttcaacatttttcaccagtgggaactgtagttattgcgtagaatagatggtatattaatcgttgagagccaatgtttacattaactgttatgcagaagacaatttatgttttattttatatctaactgtactttgttgcagcttgtaggtactgatcacagcacattcaactccacacagattgtccatgtttctttcagtcaccatgatttatcactaggtcattgtgtttgtggccaacgagtattgttctaacagttatgttcccatagctagctagattcattgttgtgttttgttcagggtactttcaccacttctggtatggttctgtctgtaatgtgccagggattattatattgtttttggtttggatttggaatggtttggggtccacaacgatgatgcgtcagagctgttccaaggattggatgatttccattcccctgctgccaattcgactaggctcgccgtctccgctctgcccaactggcaccaagcagccaatggaacttgagcagccaatggatgatttccattcccctgctgccaattctccgaactgctttgacccttcaactcaatccgcatgtacccagcctattgtggcagcaaacagcgactgggtgcggaagccggaagggagaggcgcttggttgacccagaacggacgacaagacaccgccgggggttcgctgcaaccgcacgcgtggtggccggtgtgggaaggagcccactgctcaagcagcgacgacttccgtaacttctcaggccaagggcatgatgaaatcagtgtttgctatttagcctccttcacaactaagatcatcctacataatagatttagacaacaaaaacttatggagtttgctgaaatgccctttcaggcatgctccatctgtgctacaagggtcagaatggacttgataggacatttgactatacaacatggaagttatttcaagatatccttttttaactatgctgtcgttgctgatcatttgcatttttacatttttcacattatactatagttgaagatacattcctgaggacgaatgggtgcagttatgggcttcctgcttgctgccagcagtcttttggtgcttttatattgctattaatttgtttgaaatttattatggtgatgactgggaaggtctttttgaggctattactggttatggccttggtggctctttggccgtgttggtggtggtatttataccaaggctgctgatgttggtgccgaccttgtggggaaggtagaaagaaacattcctgaggacgatccaagaaacccagctgtcattgctgacaatgttggtgataatgttggagatattgttggaatgggatcatatctctttggctcatatgctgaatcgtcatgtgctgctcttgttgtggcctcgatctcgtcttttggaatcaaccatcaatttactccaatggtgtatccccttcttgtcagctctgttggtattatagcatgtctcataacaacgctgtttgcaactgatttcttcgagataaaggctgtgagtgaaatagagcctgctctcaagaaacaacttataatatccactgttgtgatgaccattggcattgcgctcatgttggcttggtcttccatacaccttcaccatttataactttggagcccagaagacagtgcaaagctggcaattgttcttgtgtgtggcggttggtctctgggctggcttagtcattggttttattactgagtactacacaagcaatgcctacagccctgtataagatgttgctgattcctgcagaactggagctgccactaatgtcatttttgggcttgctctgggttacaaatcagtcattatcccaatttttgctattgcgtttagtatcttccttagcttcagccttgctgccatgtatggtgttgttgtggctgctcttggaatgctgagtaccattgccacagaccttgctattgatgcctatggccctatcagtgataatgctggaagcttaagtctgtatgggtgcatcttatcatttatatgtatatctgaaagcttaagtatttttttaaatagaagatgtctggaaactttagtaacgacatgagtttcaggctttcagctatagcagtcttattcgcttttaagacagagaagatttttatttagagtttagaaagagtaggtgctatgggtgcatgttatcatttatgtggggaacatctctggtggaaattaatcagtaacgacatgagttaagacagagaagcttaagtattttttcagctatagcagtcttattcgcttttaagacagagaagcttaagtattttttgaatagaagatgtctggaaactttagtaacgacatgagttaatcagaagagatggaagggtagtttatcaacatgtatttggcacttcgccgaaaatgtcacttggactatcttgcaaactgaattttcagattggcttcttctgtctgaacattcagttcagtcttgcaggatttatttggtgtgcacactccagaggtcagcattgattcgatccaaatcaacttacaacttgttctacattgtttttcatcaacaactgtgttcag

SEQ ID NO: 215349 - DNA, 4608 bp, Zea Mays
ggttctttctccaccccgatgcccctccccctcccccgtgtgatcccctctccagatcgatgtctgccccggccgtaacccccgcggctcaccgcacgaaaccgccgcgagatcttggagctcagcctctgacgatggctacgactacctcgccaacctccgcgagctctgtccccctccctctcctccaccggcggcgggggatccttggccatgttcctcccgaggcgccggtccacgcgcttcggcctccgcgtggtcatcaagcctttctgatggctcggaacagaggtcagctatgcgatgtggcgtggcgaggttaccgcgggcgccgcggaggtggagggggaaggggaggacgagggcacgggcaagagagcgcatcgctgtggacggtctcgtgagagggaccttgggtgatccgggtgcttggtttcttggttctacggctttcgctgctgttggatttgccgagccggagccgacggagatgaccgtcgacgagctgaagctgcaggcaagggccagcggcggccacgacctaaggaccagttccccgtcggcatgcgcgtgctcgccgtcgacgacgacccgacctgcctcaaggtcctcgagaacctcttgttccgctgccagtaccatgtgacaacaatgggccaggcagccactgccctgagctgctgagggagaagaaggaccagtttgaccctgtgatcagcaacgtccacatgccggacatggacggcttcaagctcctcgagcttgtgggcctcgagatggaccttccggggattaacagctgaaaacctcgcccgatttgtaaagaagttttcttgttcaatgcggcattgaatttgggaggaatgacaagtctcatgaaaacttctgtatgccctacacgtgaccactaaaagaaagagttagacaggacaaaaggctgcagcggcagaagaagagcttttacatacccttacaatgctgattttgatggagatgaaatgaatttgcatgtccctcggacggaggaagctcgcactgaagcgcttaattctcataggggttcaaaataatttatgtactcctaagaatgtgatgggggatacttcaatgcaataatgagcttcccacaaaattacccaaacagcccaccatcagtcagatttacctctgaaatgtggcatccaaatgtctaacctgatgggcgggtttgtatctctattcttcatccacccagtgaagatccaaacggttatgagctcgcaagtgagcgatggacacctgtgcacacagtatggcttcgtatactttgtttacatatcttttccccattgtaatgttactcatctcccttttatgtgtatactttttagagagaaaattaccttgtagtctcattgtttcagtttatggtccaatttacaatggcttcactgtaaatgggaaaacaactcggtaggaatgcttttttgaattataaattatttctatttcatacgatgcttataggtatgtgatgagtcctccaatctgagaagtagagcatggtaaagcactccaagctgctctttcatcgggaaatttataggtgacacttgtgtcatacattgaactatggagtcaaacaaattacatattatccttcaacatttttcaccagtgggaactgtagttattgcgtagaatagatggtatattaatcgttgagagccaatgtttacattaactgttatgcagaagacaatttatgttttattttatatctaactgtactttgttgcagcttgtaggtactgatcacagcacattcaactccacacagattgtccatgtttctttcagtcaccatgatttatcactaggtcattgtgtttgtggccaacgagtattgttctaacagttatgttcccatagctagctagattcattgttgtgttttgttcagggtactttcaccacttctggtatggttctgtctgtaatgtgccagggattattatattgtttttggtttggatttggaatggtttggggtccacaacgatgatgcgtcagagctgttccaaggattggatgatttccattcccctgctgccaattcgactaggctcgccgtctccgctctgcccaactggcaccaagcagccaatggaacttgagcagccaatggatgatttccattcccctgctgccaattctccgaactgctttgacccttcaactcaatccgcatgtacccagtaaatgttcaatctgaatttggatcattgctagcaggattctttgcttgctcttctacttctgaaaattcgcaaaatggatagataattccagttaattttaatccattacagcgactgggtgcggaagccggaagggagaggcgcttggttgacccagaacggacgacaagacaccgccgggggttcgctgcaaccgcacgcgtggtggccggtgtgggaaggagcccactgctcaagcagcgacgacttccgtaacttctcaggccaagttgtagggagggagggcagcaaagaaagcaagcaagaaagaagccgattccactggtggttaaggttttggattaaaggagagaggttgcaactccctgggccaagcagtagcccagcaagttcagcaccaatggcagccatatgaaatataaggcaaagcagataaaaagcttaatttttttcaataaggtaaaggcaatgacagaaaagtgaggagggtcagaggtgtacagataaggatgagggctgaaaagaggagcaggaagggcatgatgaaatcagtgtttgctatttagcctccttcacaactaagatcatcctacataatagatttagacaacaaaaacttatggagtttgctgaaatgccctttcaggcatgctccatctgtgctacaagggtcagaatggacttgataggacatttgactatacaacatggaagttatttcaagatatccttttttaactatgctgtcgttgctgatcatttgcatttttacatttttcacattatactatagttgaagatacattcctgaggacgaatgggtgcagttatgggcttcctgcttgctgccagcagtcttttggtgcttttatattgctattaatttgtttgaaatttattatggtgatgactgggaaggtctttttgaggctattactggttatggccttggtggctctttggccgtgttggtggtggtatttataccaaggctgctgatgttggtgccgaccttgtggggaaggtagaaagaaacattcctgaggacgatccaagaaacccagctgtcattgctgacaatgttggtgataatgttggagatattgttggaatgggatcatatctctttggctcatatgctgaatcgtcatgtgctgctcttgttgtggcctcgatctcgtcttttggaatcaaccatcaatttactccaatggtgtatccccttcttgtcagctctgttggtattatagcatgtctcataacaacgctgtttgcaactgatttcttcgagataaaggctgtgagtgaaatagagcctgctctcaagaaacaacttataatatccactgttgtgatgaccattggcattgcgctcatgttggcttggtcttccatacaccttcaccatttataactttggagcccagaagacagtgcaaagctggcaattgttcttgtgtgtggcggttggtctctgggctggcttagtcattggttttattactgagtactacacaagcaatgcctacagccctgtataagatgttgctgattcctgcagaactggagctgccactaatgtcatttttgggcttgctctgggttacaaatcagtcattatcccaatttttgctattgcgtttagtatcttccttagcttcagccttgctgccatgtatggtgttgttgtggctgctcttggaatgctgagtaccattgccacagaccttgctattgatgcctatggccctatcagtgataatgctggaagcttaagtctgtatgggtgcatcttatcatttatatgtatatctgaaagcttaagtatttttttaaatagaagatgtctggaaactttagtaacgacatgagtttcaggctttcagctatagcagtcttattcgcttttaagacagagaagatttttatttagagtttagaaagagtaggtgctatgggtgcatgttatcatttatgtggggaacatctctggtggaaattaatcagtaacgacatgagttaagacagagaagcttaagtattttttcagctatagcagtcttattcgcttttaagacagagaagcttaagtattttttgaatagaagatgtctggaaactttagtaacgacatgagttaatcagaagagatggaagggtagtttatcaacatgtatttggcacttcgccgaaaatgtcacttggactatcttgcaaactgaattttcagattggcttcttctgtctgaacattcagttcagtcttgcaggatttatttggtgtgcacactccagaggtcagcattgattcgatccaaatcaacttacaacttgttctacattgtttttcatcaacaactgtgttcag

SEQ ID NO: 215350 - DNA, 5345 bp, Zea Mays
ggttctttctccaccccgatgcccctccccctcccccgtgtgatcccctctccagatcgatgtctgccccggccgtaacccccgcggctcaccgcacgaaaccgccgcgagatcttggagctcagcctctgacgatggctacgactacctcgccaacctccgcgagctctgtccccctccctctcctccaccggcggcgggggatccttggccatgttcctcccgaggcgccggtccacgcgcttcggcctccgcgtggtcatcaagcctttctgatggctcggaacagaggtcagctatgcgatgtggcgtggcgaggttaccgcgggcgccgcggaggtggagggggaaggggaggacgagggcacgggcaagagagcgcatcgctgtggacggtctcgtgagagggaccttgggtgatccgggtgcttggtttcttggttctacggctttcgctgctgttggatttgccgagccggagccgacggagatgaccgtcgacgagctgaagctgcaggcaagggccagcggcggccacgacctaaggaccagttccccgtcggcatgcgcgtgctcgccgtcgacgacgacccgacctgcctcaaggtcctcgagaacctcttgttccgctgccagtaccatgtgacaacaatgggccaggcagccactgccctgagctgctgagggagaagaaggaccagtttgaccctgtgatcagcaacgtccacatgccggacatggacggcttcaagctcctcgagcttgtgggcctcgagatggaccttccggggattaacagctgaaaacctcgcccgatttgtaaagaagttttcttgttcaatgcggcattgaatttgggaggaatgacaagtctcatgaaaacttctgtatgccctacacgtgaccactaaaagaaagagttagacaggacaaaaggctgcagcggcagaagaagagcttttacatacccttacaatgctgattttgatggagatgaaatgaatttgcatgtccctcggacggaggaagctcgcactgaagcgcttaattctcataggggttcaaaataatttatgtactcctaagaatggtgagatactggttgcttccgcgcaagacttcttgacctcatctttcttagatatgttttcgaattagattgggatggaaattcacatttgttatcacattttctgttagcaagcacaaccattgtgacattattttgcatgcactcagcctctcaccatggctatgagaatgaaattcaacttatagatataccaaaatgttatagaatcaatataattagatatgtcaagatgacaacacatatttcattcaactactatggatttttcattgataaaatacatgcttgatggctgcttgtctaaaatttatttgtttaatattctttgtttgtaagcccaagaatttgtaaaccaggaaataattccaatgaaagatcggtgcggggcggaattttcttggctttttgtagtggctaccgtagtacatcaacttgggcacttggcgacatgtccggtgcccagctccatcacatatcaatctgaaattaaacatgtgtctgagttctgaatgaaaaaattcagctaacagctaacactacgcactactaacagacctcaagcataatactgttgatttgatgtccttatatttatcttgaagcattgcattcatgcagtcatgtaaatagtactttatttatcttctgaccaacacactaataaccaacctttgcagtgatgggggatacttcaatgcaataatgagcttcccacaaaattacccaaacagcccaccatcagtcagatttacctctgaaatgtggcatccaaatggtcaactttttattagtgaaaatagtatttatttactccatctacagttatgttttctgacatcatgcataatatttgaggaaacgccagtctaacctgatgggcgggtttgtatctctattcttcatccacccagtgaagatccaaacggttatgagctcgcaagtgagcgatggacacctgtgcacacagtatggcttcgtatactttgtttacatatcttttccccattgtaatgttactcatctcccttttatgtgtatactttttagagagaaaattaccttgtagtctcattgtttcagtttatggtccaatttacaatggcttcactgtaaatgggaaaacaactcggtaggaatgcttttttgaattataaattatttctatttcatacgatgcttataggtatgtgatgagtcctccaatctgagaagtagagcatggtaaagcactccaagctgctctttcatcgggaaatttataggtgacacttgtgtcatacattgaactatggagtcaaacaaattacatattatccttcaacatttttcaccagtgggaactgtagttattgcgtagaatagatggtatattaatcgttgagagccaatgtttacattaactgttatgcagaagacaatttatgttttattttatatctaactgtactttgttgcagcttgtaggtactgatcacagcacattcaactccacacagattgtccatgtttctttcagtcaccatgatttatcactaggtcattgtgtttgtggccaacgagtattgttctaacagttatgttcccatagctagctagattcattgttgtgttttgttcagggtactttcaccacttctggtatggttctgtctgtaatgtgccagggattattatattgtttttggtttggatttggaatggtttggggtccacaacgatgatgcgtcagagctgttccaaggattggatgatttccattcccctgctgccaattcgactaggctcgccgtctccgctctgcccaactggcaccaagcagccaatggaacttgagcagccaatggatgatttccattcccctgctgccaattctccgaactgctttgacccttcaactcaatccgcatgtacccaggattctttgcttgctcttctacttctgaaaattcgcaaaatggatagataattccagttaattttaatccattacagcctattgtggcagcaaacagcgactgggtgcggaagccggaagggagaggcgcttggttgacccagaacggacgacaagacaccgccgggggttcgctgcaaccgcacgcgtggtggccggtgtgggaaggagcccactgctcaagcagcgacgacttccgtaacttctcaggccaagttgtagggagggagggcagcaaagaaagcaagcaagaaagaagccgattccactggtggttaaggttttggattaaaggagagaggtgcagagaaaaaaaggcaatcttactcttaatctctgtgtccacatcacttccgatcatgccgtgatcgacagaagtacgggtgccatgtataagtgccccctccaactcaccaaagtaataaggagcagctgctgcaggttgcaactccctgggccaagcagtagcccagcaagttcagcaccaatggcagccatatgaaatataaggcaaagcagataaaaagcttaatttttttcaataaggtaaaggcaatgacagaaaagtgaggagggtcagaggtgtacagataaggatgagggctgaaaagaggagcaggaagggcatgatgaaatcagtgtttgctatttagcctccttcacaactaagatcatcctacataatagatttagacaacaaaaacttatggagtttgctgaaatgccctttcaggcatgctccatctgtgctacaaggttatgggcttcctgcttgctgccagcagtcttttggtgcttttatattgctattaatttgtttgaaatttattatggtgatgactgggaaggtctttttgaggctattactggttatggccttggtggctctttggccgtgttggtggtggtatttataccaaggctgctgatgttggtgccgaccttgtggggaaggtagaaagaaacattcctgaggacgatccaagaaacccagctgtcattgctgacaatgttggtgataatgttggagatattgttggaatgggatcatatctctttggctcatatgctgaatcgtcatgtgctgctcttgttgtggcctcgatctcgtcttttggaatcaaccatcaatttactccaatggtgtatccccttcttgtcagctctgttggtattatagcatgtctcataacaacgctgtttgcaactgatttcttcgagataaaggctgtgagtgaaatagagcctgctctcaagaaacaacttataatatccactgttgtgatgaccattggcattgcgctcatgttggcttggtcttccatacaccttcaccatttataactttggagcccagaagacagtgcaaagctggcaattgttcttgtgtgtggcggttggtctctgggctggcttagtcattggttttattactgagtactacacaagcaatgcctacagccctgtataagatgttgctgattcctgcagaactggagctgccactaatgtcatttttgggcttgctctgggttacaaatcagtcattatcccaatttttgctattgcgtttagtatcttccttagcttcagccttgctgccatgtatggtgttgttgtggctgctcttggaatgctgagtaccattgccacagaccttgctattgatgcctatggccctatcagtgataatgctggaagcttaagtctgtatgggtgcatcttatcatttatatgtatatctgaaagcttaagtatttttttaaatagaagatgtctggaaactttagtaacgacatgagtttcaggctttcagctatagcagtcttattcgcttttaagacagagaagatttttatttagagtttagaaagagtaggtgctatgggtgcatgttatcatttatgtggggaacatctctggtggaaattaatcagtaacgacatgagttaagacagagaagcttaagtattttttcagctatagcagtcttattcgcttttaagacagagaagcttaagtattttttgaatagaagatgtctggaaactttagtaacgacatgagttaatcagaagagatggaagggtagtttatcaacatgtatttggcacttcgccgaaaatgtcacttggactatcttgcaaactgaattttcagattggcttcttctgtctgaacattcagttcagtcttgcaggatttatttggtgtgcacactccagaggtcagcattgattcgatccaaatcaacttacaacttgttctacattgtttttcatcaacaactgtgttcag

SEQ ID NO: 215351 - DNA, 5054 bp, Zea Mays
ggttctttctccaccccgatgcccctccccctcccccgtgtgatcccctctccagatcgatgtctgccccggccgtaacccccgcggctcaccgcacgaaaccgccgcgagatcttggagctcagcctctgacgatggctacgactacctcgccaacctccgcgagctctgtccccctccctctcctccaccggcggcgggggatccttggccatgttcctcccgaggcgccggtccacgcgcttcggcctccgcgtggtcatcaagcctttctgatggctcggaacagaggtcagctatgcgatgtggcgtggcgaggttaccgcgggcgccgcggaggtggagggggaaggggaggacgagggcacgggcaagagagcgcatcgctgtggacggtctcgtgagagggaccttgggtgatccgggtgcttggtttcttggttctacggctttcgctgctgttggatttgccgagccggagccgacggagatgaccgtcgacgagctgaagctgcaggcaagggccagcggcggccacgacctaaggaccagttccccgtcggcatgcgcgtgctcgccgtcgacgacgacccgacctgcctcaaggtcctcgagaacctcttgttccgctgccagtaccatgtgacaacaatgggccaggcagccactgccctgagctgctgagggagaagaaggaccagtttgaccctgtgatcagcaacgtccacatgccggacatggacggcttcaagctcctcgagcttgtgggcctcgagatggaccttccggggattaacagctgaaaacctcgcccgatttgtaaagaagttttcttgttcaatgcggcattgaatttgggaggaatgacaagtctcatgaaaacttctgtatgccctacacgtgaccactaaaagaaagagttagacaggacaaaaggctgcagaagaagagcttttacatacccttacaatgctgattttgatggagatgaaatgaatttgcatgtccctcggacggaggaagctcgcactgaagcgcttaattctcataggggttcaaaataatttatgtactcctaagaatggtgagatactggttgcttccgcgcaagacttcttgacctcatctttcttagatatgttttcgaattagattgggatggaaattcacatttgttatcacattttctgttagcaagcacaaccattgtgacattattttgcatgcactcagcctctcaccatggctatgagaatgaaattcaacttatagatataccaaaatgttatagaatcaatataattagatatgtcaagatgacaacacatatttcattcaactactatggatttttcattgataaaatacatgcttgatggctgcttgtctaaaatttatttgtttaatattctttgtttgtaagcccaagaatttgtaaaccaggaaataattccaatgaaagatcggtgcggggcggaattttcttggctttttgtagtggctaccgtagtacatcaacttgggcacttggcgacatgtccggtgcccagctccatcacatatcaatctgaaattaaacatgtgtctgagttctgaatgaaaaaattcagctaacagctaacactacgcactactaacagacctcaagcataatactgttgatttgatgtccttatatttatcttgaagcattgcattcatgcagtcatgtaaatagtactttatttatcttctgaccaacacactaataaccaacctttgcagtgatgggggatacttcaatgcaataatgagcttcccacaaaattacccaaacagcccaccatcagtcagatttacctctgaaatgtggcatccaaatggtcaactttttattagtgaaaatagtatttatttactccatctacagttatgttttctgacatcatgcataatatttgaggaaacgccagtctaacctgatgggcgggtttgtatctctattcttcatccacccagtgaagatccaaacggttatgagctcgcaagtgagcgatggacacctgtgcacacagtatggcttcgtatactttgtttacatatcttttccccattgtaatgttactcatctcccttttatgtgtatactttttagagagaaaattaccttgtagtctcattgtttcagtttatggtccaatttacaatggcttcactgtaaatgggaaaacaactcggtaggaatgcttttttgaattataaattatttctatttcatacgatgcttataggtatgtgatgagtcctccaatctgagaagtagagcatggtaaagcactccaagctgctctttcatcgggaaatttatagcttgtaggtactgatcacagcacattcaactccacacagattgtccatgtttctttcagtcaccatgatttatcactaggtcattgtgtttgtggccaacgagtattgttctaacagttatgttcccatagctagctagattcattgttgtgttttgttcagggtactttcaccacttctggtatggttctgtctgtaatgtgccagggattattatattgtttttggtttggatttggaatggtttggggtccacaacgatgatgcgtcagagctgttccaaggattggatgatttccattcccctgctgccaattcgactaggctcgccgtctccgctctgcccaactggcaccaagcagccaatggaacttgagcagccaatggatgatttccattcccctgctgccaattctccgaactgctttgacccttcaactcaatccgcatgtacccaggattctttgcttgctcttctacttctgaaaattcgcaaaatggatagataattccagttaattttaatccattacagcaaacagcgactgggtgcggaagccggaagggagaggcgcttggttgacccagaacggacgacaagacaccgccgggggttcgctgcaaccgcacgcgtggtggccggtgtgggaaggagcccactgctcaagcagcgacgacttccgtaacttctcaggccaagttgtagggagggagggcagcaaagaaagcaagcaagaaagaagccgattccactggtggttaaggttttggattaaaggagagaggtgcagagaaaaaaaggttgcaactccctgggccaagcagtagcccagcaagttcagcaccaatggcagccatatgaaatataaggcaaagcagataaaaagcttaatttttttcaataaggtaaaggcaatgacagaaaagtgaggagggtcagaggtgtacagataaggatgagggctgaaaagaggagcaggaaggcatgctccatctgtgctacaagggtcagaatggacttgataggacatttgactatacaacatggaagttatttcaagatatccttttttaactatgctgtcgttgctgatcatttgcatttttacatttttcacattatactatagttgaagatacattcctgaggacgaatgggtgcagttatgggcttcctgcttgctgccagcagtcttttggtgcttttatattgctattaatttgtttgaaatttattatggtgatgactgggaaggtctttttgaggctattactggttatggccttggtggctctttggccgtgttggtggtggtatttataccaaggctgctgatgttggtgccgaccttgtggggaaggtagaaagaaacattcctgaggacgatccaagaaacccagctgtcattgctgacaatgttggtgataatgttggagatattgttggaatgggatcatatctctttggctcatatgctgaatcgtcatgtgctgctcttgttgtggcctcgatctcgtcttttggaatcaaccatcaatttactccaatggtgtatccccttcttgtcagctctgttggtattatagcatgtctcataacaacgctgtttgcaactgatttcttcgagataaaggctgtgagtgaaatagagcctgctctcaagaaacaacttataatatccactgttgtgatgaccattggcattgcgctcatgttggcttggtcttccatacaccttcaccatttataactttggagcccagaagacagtgcaaagctggcaattgttcttgtgtgtggcggttggtctctgggctggcttagtcattggttttattactgagtactacacaagcaatgcctacagccctgtataagatgttgctgattcctgcagaactggagctgccactaatgtcatttttgggcttgctctgggttacaaatcagtcattatcccaatttttgctattgcgtttagtatcttccttagcttcagccttgctgccatgtatggtgttgttgtggctgctcttggaatgctgagtaccattgccacagaccttgctattgatgcctatggccctatcagtgataatgctggaagcttaagtctgtatgggtgcatcttatcatttatatgtatatctgaaagcttaagtatttttttaaatagaagatgtctggaaactttagtaacgacatgagtttcaggctttcagctatagcagtcttattcgcttttaagacagagaagatttttatttagagtttagaaagagtaggtgctatgggtgcatgttatcatttatgtggggaacatctctggtggaaattaatcagtaacgacatgagttaagacagagaagcttaagtattttttcagctatagcagtcttattcgcttttaagacagagaagcttaagtattttttgaatagaagatgtctggaaactttagtaacgacatgagttaatcagaagagatggaagggtagtttatcaacatgtatttggcacttcgccgaaaatgtcacttggactatcttgcaaactgaattttcagattggcttcttctgtctgaacattcagttcagtcttgcaggatttatttggtgtgcacactccagaggtcagcattgattcgatccaaatcaacttacaacttgttctacattgtttttcatcaacaactgtgttcag

SEQ ID NO: 215352 - DNA, 4479 bp, Zea Mays
ggttctttctccaccccgatgcccctccccctcccccgtgtgatcccctctccagatcgatgtctgccccggccgtaacccccgcggctcaccgcacgaaaccgccgcgagatcttggagctcagcctctgacgatggctacgactacctcgccaacctccgcgagctctgtccccctccctctcctccaccggcggcgggggatccttggccatgttcctcccgaggcgccggtccacgcgcttcggcctccgcgtggtcatcaagcctttctgatggctcggaacagaggtcagctatgcgatgtggcgtggcgaggttaccgcgggcgccgcggaggtggagggggaaggggaggacgagggcacgggcaagagagcgcatcgctgtggacggtctcgtgagtgagtgctgctgcctgcccctctctctctgcctgcgttctcctggtgctgctctccctctcctcccctgcttcgacctcccgcctttccccaccgtttcttggatttctaggatccagacaaccgcccttgtgagcctgccttcctgcctactacctgcgtacgtacaggagggaccttgggtgatccgggtgcttggtttcttggttctacggctttcgctgctgttggatttgccgagccggagccgacggagatgaccgtcgacgagctgaagctgcaggcaagggccagcggcggccacgacctaaggaccagttccccgtcggcatgcgcgtgctcgccgtcgacgacgacccgacctgcctcaaggtcctcgagaacctcttgttccgctgccagtaccatgtgacaacaatgggccaggcagccactgccctgagctgctgagggagaagaaggaccagtttgaccctgtgatcagcaacgtccacatgccggacatggacggcttcaagctcctcgagcttgtgggcctcgagatggaccttccggggattaacagctgaaaacctcgcccgatttgtaaagaagttttcttgttcaatgcggcattgaatttgggaggaatgacaagtctcatgaaaacttctgtatgccctacacgtgaccactaaaagaaagagttagacaggacaaaaggctgcagcggcagaagaagagcttttacatacccttacaatgctgattttgatggagatgaaatgaatttgcatgtccctcggacggaggaagctcgcactgaagcgcttaattctcataggggttcaaaataatttatgtactcctaagaatgtgatgggggatacttcaatgcaataatgagcttcccacaaaattacccaaacagcccaccatcagtcagatttacctctgaaatgtggcatccaaatggtcaactttttattagtgaaaatagtatttatttactccatctacagttatgttttctgacatcatgcataatatttgaggaaacgccagtctaacctgatgggcgggtttgtatctctattcttcatccacccagtgaagatccaaacggttatgagctcgcaagtgagcgatggacacctgtgcacacatctcattgtttcagtttatggtccaatttacaatggcttcactgtaaatgggaaaacaactcggtaggaatgcttttttgaattataaattatttctatttcatacgatgcttataggtatgtgatgagtcctccaatctgagaagtagagcatggtaaagcactccaagctgctctttcatcgggaaatttataggtgacacttgtgtcatacattgaactatggagtcaaacaaattacatattatccttcaacatttttcaccagtgggaactgtagttattgcgtagaatagatggtatattaatcgttgagagccaatgtttacattaactgttatgcagaagacaatttatgttttattttatatctaactgtactttgttgcagcttgtaggtactgatcacagcacattcaactccacacagattgtccatgtttctttcagtcaccatgatttatcactaggtcattgtgtttgtggccaacgagtattgttctaacagttatgttcccatagctagctagattcattgttgtgttttgttcagggtactttcaccacttctggtatggttctgtctgtaatgtgccagggattattatattgtttttggtttggatttggaatggtttggggtccacaacgatgatgcgtcagagctgttccaaggattggatgatttccattcccctgctgccaattcgactaggctcgccgtctccgctctgcccaactggcaccaagcagccaatggaacttgagcagccaatggatgatttccattcccctgctgccaattctccgaactgctttgacccttcaactcaatccgcatgtacccaggattctttgcttgctcttctacttctgaaaattcgcaaaatggatagataattccagttaattttaatccattacagcctattgtggcagcaaacagcgactgggtgcggaagccggaagggagaggcgcttggttgacccagaacggacgacaagacaccgccgggggttcgctgcaaccgcacgcgtggtggccggtgtgggaaggagcccactgctcaagcagcgacgacttccgtaacttctcaggccaagggagggagggcagcaaagaaagcaagcaagaaagaagccgattccactggtggttaaggttttggattaaaggagagaggttgcaactccctgggccaagcagtagcccagcaagttcagcaccaatggcagccatatgaaatataaggcaaagcagataaaaagcttaatttttttcaataaggtaaaggcaatgacagaaaagtgaggagggtcagaggtgtacagataaggatgagggctgaaaagaggagcaggaaggcatgctccatctgtgctacaaggttatgggcttcctgcttgctgccagcagtcttttggtgcttttatattgctattaatttgtttgaaatttattatggtgatgactgggaaggtctttttgaggctattactggttatggccttggtggctctttggccgtgttggtggtggtatttataccaaggctgctgatgttggtgccgaccttgtggggaaggtagaaagaaacattcctgaggacgatccaagaaacccagctgtcattgctgacaatgttggtgataatgttggagatattgttggaatgggatcatatctctttggctcatatgctgaatcgtcatgtgctgctcttgttgtggcctcgatctcgtcttttggaatcaaccatcaatttactccaatggtgtatccccttcttgtcagctctgttggtattatagcatgtctcataacaacgctgtttgcaactgatttcttcgagataaaggctgtgagtgaaatagagcctgctctcaagaaacaacttataatatccactgttgtgatgaccattggcattgcgctcatgttggcttggtcttccatacaccttcaccatttataactttggagcccagaagacagtgcaaagctggcaattgttcttgtgtgtggcggttggtctctgggctggcttagtcattggttttattactgagtactacacaagcaatgcctacagccctgtataagatgttgctgattcctgcagaactggagctgccactaatgtcatttttgggcttgctctgggttacaaatcagtcattatcccaatttttgctattgcgtttagtatcttccttagcttcagccttgctgccatgtatggtgttgttgtggctgctcttggaatgctgagtaccattgccacagaccttgctattgatgcctatggccctatcagtgataatgctggaagcttaagtctgtatgggtgcatcttatcatttatatgtatatctgaaagcttaagtatttttttaaatagaagatgtctggaaactttagtaacgacatgagtttcaggctttcagctatagcagtcttattcgcttttaagacagagaagatttttatttagagtttagaaagagtaggtgctatgggtgcatgttatcatttatgtggggaacatctctggtggaaattaatcagtaacgacatgagttaagacagagaagcttaagtattttttcagctatagcagtcttattcgcttttaagacagagaagcttaagtattttttgaatagaagatgtctggaaactttagtaacgacatgagttaatcagaagagatggaagggtagtttatcaacatgtatttggcacttcgccgaaaatgtcacttggactatcttgcaaactgaattttcagattggcttcttctgtctgaacattcagttcagtcttgcaggatttatttggtgtgcacactccagaggtcagcattgattcgatccaaatcaacttacaacttgttctacattgtttttcatcaacaactgtgttcag

SEQ ID NO: 215353 - DNA, 4517 bp, Zea Mays
ggttctttctccaccccgatgcccctccccctcccccgtgtgatcccctctccagatcgatgtctgccccggccgtaacccccgcggctcaccgcacgaaaccgccgcgagatcttggagctcagcctctgacgatggctacgactacctcgccaacctccgcgagctctgtccccctccctctcctccaccggcggcgggggatccttggccatgttcctcccgaggcgccggtccacgcgcttcggcctccgcgtggtcatcaagcctttctgatggctcggaacagaggtcagctatgcgatgtggcgtggcgaggttaccgcgggcgccgcggaggtggagggggaaggggaggacgagggcacgggcaagagagcgcatcgctgtggacggtctcgtgagagggaccttgggtgatccgggtgcttggtttcttggttctacggctttcgctgctgttggatttgccgagccggagccgacggagatgaccgtcgacgagctgaagctgcaggcaagggccagcggcggccacgacctaaggaccagttccccgtcggcatgcgcgtgctcgccgtcgacgacgacccgacctgcctcaaggtcctcgagaacctcttgttccgctgccagtaccatgtgacaacaatgggccaggcagccactgccctgagctgctgagggagaagaaggaccagtttgaccctgtgatcagcaacgtccacatgccggacatggacggcttcaagctcctcgagcttgtgggcctcgagatggaccttccggggattaacagctgaaaacctcgcccgatttgtaaagaagttttcttgttcaatgcggcattgaatttgggaggaatgacaagtctcatgaaaacttctgtatgccctacacgtgaccactaaaagaaagagttagacaggacaaaaggctgcaggtgaagcggcagaagaagagcttttacatacccttacaatgctgattttgatggagatgaaatgaatttgcatgtccctcggacggaggaagctcgcactgaagcgcttaattctcataggggttcaaaataatttatgtactcctaagaatgtgatgggggatacttcaatgcaataatgagcttcccacaaaattacccaaacagcccaccatcagtcagatttacctctgaaatgtggcatccaaatggtcaactttttattagtgaaaatagtatttatttactccatctacagttatgttttctgacatcatgcataatatttgaggaaacgccagtctaacctgatgggcgggtttgtatctctattcttcatccacccagtgaagatccaaacggttatgagctcgcaagtgagcgatggacacctgtgcacacagtatggcttcgtatactttgtttacatatcttttccccattgtaatgttactcatctcccttttatgtgtatactttttagagagaaaattaccttgtagtctcattgtttcagtttatggtccaatttacaatggcttcactgtaaatgggaaaacaactcggtaggaatgcttttttgaattataaattatttctatttcatacgatgcttataggtatgtgatgagtcctccaatctgagaagtagagcatggtaaagcactccaagctgctctttcatcgggaaatttataggtgacacttgtgtcatacattgaactatggagtcaaacaaattacatattatccttcaacatttttcaccagtgggaactgtagttattgcgtagaatagatggtatattaatcgttgagagccaatgtttacattaactgttatgcagaagacaatttatgttttattttatatctaactgtactttgttgcagcttgtaggtactgatcacagcacattcaactccacacagattgtccatgtttctttcagtcaccatgatttatcactaggtcattgtgtttgtggccaacgagtattgttctaacagttatgttcccatagctagctagattcattgttgtgttttgttcagggtactttcaccacttctggtatggttctgtctgtaatgtgccagggattattatattgtttttggtttggatttggaatggtttggggtccacaacgatgatgcgtcagagctgttccaaggattggatgatttccattcccctgctgccaattcgactaggctcgccgtctccgctctgcccaactggcaccaagcagccaatggaacttgagcagccaatggatgatttccattcccctgctgccaattctccgaactgctttgacccttcaactcaatccgcatgtacccagcctattgtggcagcaaacagcgactgggtgcggaagccggaagggagaggcgcttggttgacccagaacggacgacaagacaccgccgggggttcgctgcaaccgcacgcgtggtggccggtgtgggaaggagcccactgctcaagcagcgacgacttccgtaacttctcaggccaagttgtagggagggagggcagcaaagaaagcaagcaagaaagaagccgattccactggtggttaaggttttggattaaaggagagaggtgcagagaaaaaaaggttgcaactccctgggccaagcagtagcccagcaagttcagcaccaatggcagccatatgaaatataaggcaaagcagataaaaagcttaatttttttcaataaggtaaaggcaatgacagaaaagtgaggagggtcagaggtgtacagataaggatgagggctgaaaagaggagcaggaaggcatgctccatctgtgctacaagggtcagaatggacttgataggacatttgactatacaacatggaagttatttcaagatatccttttttaactatgctgtcgttgctgatcatttgcatttttacatttttcacattatactatagttgaagatacattcctgaggacgaatgggtgcagttatgggcttcctgcttgctgccagcagtcttttggtgcttttatattgctattaatttgtttgaaatttattatggtgatgactgggaaggtctttttgaggctattactggttatggccttggtggctctttggccgtgttggtggtggtatttataccaaggctgctgatgttggtgccgaccttgtggggaaggtagaaagaaacattcctgaggacgatccaagaaacccagctgtcattgctgacaatgttggtgataatgttggagatattgttggaatgggatcatatctctttggctcatatgctgaatcgtcatgtgctgctcttgttgtggcctcgatctcgtcttttggaatcaaccatcaatttactccaatggtgtatccccttcttgtcagctctgttggtattatagcatgtctcataacaacgctgtttgcaactgatttcttcgagataaaggctgtgagtgaaatagagcctgctctcaagaaacaacttataatatccactgttgtgatgaccattggcattgcgctcatgttggcttggtcttccatacaccttcaccatttataactttggagcccagaagacagtgcaaagctggcaattgttcttgtgtgtggcggttggtctctgggctggcttagtcattggttttattactgagtactacacaagcaatgcctacagccctgtataagatgttgctgattcctgcagaactggagctgccactaatgtcatttttgggcttgctctgggttacaaatcagtcattatcccaatttttgctattgcgtttagtatcttccttagcttcagccttgctgccatgtatggtgttgttgtggctgctcttggaatgctgagtaccattgccacagaccttgctattgatgcctatggccctatcagtgataatgctggaagcttaagtctgtatgggtgcatcttatcatttatatgtatatctgaaagcttaagtatttttttaaatagaagatgtctggaaactttagtaacgacatgagtttcaggctttcagctatagcagtcttattcgcttttaagacagagaagatttttatttagagtttagaaagagtaggtgctatgggtgcatgttatcatttatgtggggaacatctctggtggaaattaatcagtaacgacatgagttaagacagagaagcttaagtattttttcagctatagcagtcttattcgcttttaagacagagaagcttaagtattttttgaatagaagatgtctggaaactttagtaacgacatgagttaatcagaagagatggaagggtagtttatcaacatgtatttggcacttcgccgaaaatgtcacttggactatcttgcaaactgaattttcagattggcttcttctgtctgaacattcagttcagtcttgcaggatttatttggtgtgcacactccagaggtcagcattgattcgatccaaatcaacttacaacttgttctacattgtttttcatcaacaactgtgttcag

SEQ ID NO: 215354 - DNA, 4421 bp, Zea Mays
ggttctttctccaccccgatgcccctccccctcccccgtgtgatcccctctccagatcgatgtctgccccggccgtaacccccgcggctcaccgcacgaaaccgccgcgagatcttggagctcagcctctgacgatggctacgactacctcgccaacctccgcgagctctgtccccctccctctcctccaccggcggcgggggatccttggccatgttcctcccgaggcgccggtccacgcgcttcggcctccgcgtggtcatcaagcctttctgatggctcggaacagaggtcagctatgcgatgtggcgtggcgaggttaccgcgggcgccgcggaggtggagggggaaggggaggacgagggcacgggcaagagagcgcatcgctgtggacggtctcgtgagagggaccttgggtgatccgggtgcttggtttcttggttctacggctttcgctgctgttggatttgccgagccggagccgacggagatgaccgtcgacgagctgaagctgcaggcaagggccagcggcggccacgacctaaggaccagttccccgtcggcatgcgcgtgctcgccgtcgacgacgacccgacctgcctcaaggtcctcgagaacctcttgttccgctgccagtaccatgtgacaacaatgggccaggcagccactgccctgagctgctgagggagaagaaggaccagtttgaccctgtgatcagcaacgtccacatgccggacatggacggcttcaagctcctcgagcttgtgggcctcgagatggaccttccggggattaacagctgaaaacctcgcccgatttgtaaagaagttttcttgttcaatgcggcattgaatttgggaggaatgacaagtctcatgaaaacttctgtatgccctacacgtgaccactaaaagaaagagttagacaggacaaaaggctgcagcggcagaagaagagcttttacatacccttacaatgctgattttgatggagatgaaatgaatttgcatgtccctcggacggaggaagctcgcactgaagcgcttaattctcataggggttcaaaataatttatgtactcctaagaatgtgatgggggatacttcaatgcaataatgagcttcccacaaaattacccaaacagcccaccatcagtcagatttacctctgaaatgtggcatccaaatgtctaacctgatgggcgggtttgtatctctattcttcatccacccagtgaagatccaaacggttatgagctcgcaagtgagcgatggacacctgtgcacacagtatggcttcgtatactttgtttacatatcttttccccattgtaatgttactcatctcccttttatgtgtatactttttagagagaaaattaccttgtagtctcattgtttcagtttatggtccaatttacaatggcttcactgtaaatgggaaaacaactcggtaggaatgcttttttgaattataaattatttctatttcatacgatgcttataggtatgtgatgagtcctccaatctgagaagtagagcatggtaaagcactccaagctgctctttcatcgggaaatttataggtgacacttgtgtcatacattgaactatggagtcaaacaaattacatattatccttcaacatttttcaccagtgggaactgtagttattgcgtagaatagatggtatattaatcgttgagagccaatgtttacattaactgttatgcagaagacaatttatgttttattttatatctaactgtactttgttgcagcttgtaggtactgatcacagcacattcaactccacacagattgtccatgtttctttcagtcaccatgatttatcactaggtcattgtgtttgtggccaacgagtattgttctaacagttatgttcccatagctagctagattcattgttgtgttttgttcagggtactttcaccacttctggtatggttctgtctgtaatgtgccagggattattatattgtttttggtttggatttggaatggtttggggtccacaacgatgatgcgtcagagctgttccaaggattggatgatttccattcccctgctgccaattcgactaggctcgccgtctccgctctgcccaactggcaccaagcagccaatggaacttgagcagccaatggatgatttccattcccctgctgccaattctccgaactgctttgacccttcaactcaatccgcatgtacccagcctattgtggcagcaaacagcgactgggtgcggaagccggaagggagaggcgcttggttgacccagaacggacgacaagacaccgccgggggttcgctgcaaccgcacgcgtggtggccggtgtgggaaggagcccactgctcaagcagcgacgacttccgtaacttctcaggccaagttgtagggagggagggcagcaaagaaagcaagcaagaaagaagccgattccactggtggttaaggttttggattaaaggagagaggtgcagagaaaaaaaggttgcaactccctgggccaagcagtagcccagcaagttcagcaccaatggcagccatatgaaatataaggcaaagcagataaaaagcttaatttttttcaataaggtaaaggcaatgacagaaaagtgaggagggtcagaggtgtacagataaggatgagggctgaaaagaggagcaggaaggcatgctccatctgtgctacaagggtcagaatggacttgataggacatttgactatacaacatggaagttatttcaagatatccttttttaactatgctgtcgttgctgatcatttgcatttttacatttttcacattatactatagttgaagatacattcctgaggacgaatgggtgcagttatgggcttcctgcttgctgccagcagtcttttggtgcttttatattgctattaatttgtttgaaatttattatggtgatgactgggaaggtctttttgaggctattactggttatggccttggtggctctttggccgtgttggtggtggtatttataccaaggctgctgatgttggtgccgaccttgtggggaaggtagaaagaaacattcctgaggacgatccaagaaacccagctgtcattgctgacaatgttggtgataatgttggagatattgttggaatgggatcatatctctttggctcatatgctgaatcgtcatgtgctgctcttgttgtggcctcgatctcgtcttttggaatcaaccatcaatttactccaatggtgtatccccttcttgtcagctctgttggtattatagcatgtctcataacaacgctgtttgcaactgatttcttcgagataaaggctgtgagtgaaatagagcctgctctcaagaaacaacttataatatccactgttgtgatgaccattggcattgcgctcatgttggcttggtcttccatacaccttcaccatttataactttggagcccagaagacagtgcaaagctggcaattgttcttgtgtgtggcggttggtctctgggctggcttagtcattggttttattactgagtactacacaagcaatgcctacagccctgtataagatgttgctgattcctgcagaactggagctgccactaatgtcatttttgggcttgctctgggttacaaatcagtcattatcccaatttttgctattgcgtttagtatcttccttagcttcagccttgctgccatgtatggtgttgttgtggctgctcttggaatgctgagtaccattgccacagaccttgctattgatgcctatggccctatcagtgataatgctggaagcttaagtctgtatgggtgcatcttatcatttatatgtatatctgaaagcttaagtatttttttaaatagaagatgtctggaaactttagtaacgacatgagtttcaggctttcagctatagcagtcttattcgcttttaagacagagaagatttttatttagagtttagaaagagtaggtgctatgggtgcatgttatcatttatgtggggaacatctctggtggaaattaatcagtaacgacatgagttaagacagagaagcttaagtattttttcagctatagcagtcttattcgcttttaagacagagaagcttaagtattttttgaatagaagatgtctggaaactttagtaacgacatgagttaatcagaagagatggaagggtagtttatcaacatgtatttggcacttcgccgaaaatgtcacttggactatcttgcaaactgaattttcagattggcttcttctgtctgaacattcagttcagtcttgcaggatttatttggtgtgcacactccagaggtcagcattgattcgatccaaatcaacttacaacttgttctacattgtttttcatcaacaactgtgttcag

SEQ ID NO: 215355 - DNA, 5107 bp, Zea Mays
ggttctttctccaccccgatgcccctccccctcccccgtgtgatcccctctccagatcgatgtctgccccggccgtaacccccgcggctcaccgcacgaaaccgccgcgagatcttggagctcagcctctgacgatggctacgactacctcgccaacctccgcgagctctgtccccctccctctcctccaccggcggcgggggatccttggccatgttcctcccgaggcgccggtccacgcgcttcggcctccgcgtggtcatcaagcctttctgatggctcggaacagaggtcagctatgcgatgtggcgtggcgaggttaccgcgggcgccgcggaggtggagggggaaggggaggacgagggcacgggcaagagagcgcatcgctgtggacggtctcgtgagagggaccttgggtgatccgggtgcttggtttcttggttctacggctttcgctgctgttggatttgccgagccggagccgacggagatgaccgtcgacgagctgaagctgcaggcaagggccagcggcggccacgacctaaggaccagttccccgtcggcatgcgcgtgctcgccgtcgacgacgacccgacctgcctcaaggtcctcgagaacctcttgttccgctgccagtaccatgtgacaacaatgggccaggcagccactgccctgagctgctgagggagaagaaggaccagtttgaccctgtgatcagcaacgtccacatgccggacatggacggcttcaagctcctcgagcttgtgggcctcgagatggaccttccggggattaacagctgaaaacctcgcccgatttgtaaagaagttttcttgttcaatgcggcattgaatttgggaggaatgacaagtctcatgaaaacttctgtatgccctacacgtgaccactaaaagaaagagttagacaggacaaaaggctgcagcggcagaagaagagcttttacatacccttacaatgctgattttgatggagatgaaatgaatttgcatgtccctcggacggaggaagctcgcactgaagcgcttaattctcataggggttcaaaataatttatgtactcctaagaatggtgagatactggttgcttccgcgcaagacttcttgacctcatctttcttagatatgttttcgaattagattgggatggaaattcacatttgttatcacattttctgttagcaagcacaaccattgtgacattattttgcatgcactcagcctctcaccatggctatgagaatgaaattcaacttatagatataccaaaatgttatagaatcaatataattagatatgtcaagatgacaacacatatttcattcaactactatggatttttcattgataaaatacatgcttgatggctgcttgtctaaaatttatttgtttaatattctttgtttgtaagcccaagaatttgtaaaccaggaaataattccaatgaaagatcggtgcggggcggaattttcttggctttttgtagtggctaccgtagtacatcaacttgggcacttggcgacatgtccggtgcccagctccatcacatatcaatctgaaattaaacatgtgtctgagttctgaatgaaaaaattcagctaacagctaacactacgcactactaacagacctcaagcataatactgttgatttgatgtccttatatttatcttgaagcattgcattcatgcagtcatgtaaatagtactttatttatcttctgaccaacacactaataaccaacctttgcagtgatgggggatacttcaatgcaataatgagcttcccacaaaattacccaaacagcccaccatcagtcagatttacctctgaaatgtggcatccaaatgtctaacctgatgggcgggtttgtatctctattcttcatccacccagtgaagatccaaacggttatgagctcgcaagtgagcgatggacacctgtgcacacagtatgtgatgagtcctccaatctgagaagtagagcatggtaaagcactccaagctgctctttcatcgggaaatttataggtgacacttgtgtcatacattgaactatggagtcaaacaaattacatattatccttcaacatttttcaccagtgggaactgtagttattgcgtagaatagatggtatattaatcgttgagagccaatgtttacattaactgttatgcagaagacaatttatgttttattttatatctaactgtactttgttgcagcttgtaggtactgatcacagcacattcaactccacacagattgtccatgtttctttcagtcaccatgatttatcactaggtcattgtgtttgtggccaacgagtattgttctaacagttatgttcccatagctagctagattcattgttgtgttttgttcagggtactttcaccacttctggtatggttctgtctgtaatgtgccagggattattatattgtttttggtttggatttggaatggtttggggtccacaacgatgatgcgtcagagctgttccaaggattggatgatttccattcccctgctgccaattcgactaggctcgccgtctccgctctgcccaactggcaccaagcagccaatggaacttgagcagccaatggatgatttccattcccctgctgccaattctccgaactgctttgacccttcaactcaatccgcatgtacccagtaaatgttcaatctgaatttggatcattgctagcaggattctttgcttgctcttctacttctgaaaattcgcaaaatggatagataattccagttaattttaatccattacagcctattgtggcagcaaacagcgactgggtgcggaagccggaagggagaggcgcttggttgacccagaacggacgacaagacaccgccgggggttcgctgcaaccgcacgcgtggtggccggtgtgggaaggagcccactgctcaagcagcgacgacttccgtaacttctcaggccaagttgtagggagggagggcagcaaagaaagcaagcaagaaagaagccgattccactggtggttaaggttttggattaaaggagagaggtgcagagaaaaaaaggttgcaactccctgggccaagcagtagcccagcaagttcagcaccaatggcagccatatgaaatataaggcaaagcagataaaaagcttaatttttttcaataaggtaaaggcaatgacagaaaagtgaggagggtcagaggtgtacagataaggatgagggctgaaaagaggagcaggaagggcatgatgaaatcagtgtttgctatttagcctccttcacaactaagatcatcctacataatagatttagacaacaaaaacttatggagtttgctgaaatgccctttcaggcatgctccatctgtgctacaagggtcagaatggacttgataggacatttgactatacaacatggaagttatttcaagatatccttttttaactatgctgtcgttgctgatcatttgcatttttacatttttcacattatactatagttgaagatacattcctgaggacgaatgggtgcagttatgggcttcctgcttgctgccagcagtcttttggtgcttttatattgctattaatttgtttgaaatttattatggtgatgactgggaaggtctttttgaggctattactggttatggccttggtggctctttggccgtgttggtggtggtatttataccaaggctgctgatgttggtgccgaccttgtggggaaggtagaaagaaacattcctgaggacgatccaagaaacccagctgtcattgctgacaatgttggtgataatgttggagatattgttggaatgggatcatatctctttggctcatatgctgaatcgtcatgtgctgctcttgttgtggcctcgatctcgtcttttggaatcaaccatcaatttactccaatggtgtatccccttcttgtcagctctgttggtattatagcatgtctcataacaacgctgtttgcaactgatttcttcgagataaaggctgtgagtgaaatagagcctgctctcaagaaacaacttataatatccactgttgtgatgaccattggcattgcgctcatgttggcttggtcttccatacaccttcaccatttataactttggagcccagaagacagtgcaaagctggcaattgttcttgtgtgtggcggttggtctctgggctggcttagtcattggttttattactgagtactacacaagcaatgcctacagccctgtataagatgttgctgattcctgcagaactggagctgccactaatgtcatttttgggcttgctctgggttacaaatcagtcattatcccaatttttgctattgcgtttagtatcttccttagcttcagccttgctgccatgtatggtgttgttgtggctgctcttggaatgctgagtaccattgccacagaccttgctattgatgcctatggccctatcagtgataatgctggaagcttaagtctgtatgggtgcatcttatcatttatatgtatatctgaaagcttaagtatttttttaaatagaagatgtctggaaactttagtaacgacatgagtttcaggctttcagctatagcagtcttattcgcttttaagacagagaagatttttatttagagtttagaaagagtaggtgctatgggtgcatgttatcatttatgtggggaacatctctggtggaaattaatcagtaacgacatgagttaagacagagaagcttaagtattttttcagctatagcagtcttattcgcttttaagacagagaagcttaagtattttttgaatagaagatgtctggaaactttagtaacgacatgagttaatcagaagagatggaagggtagtttatcaacatgtatttggcacttcgccgaaaatgtcacttggactatcttgcaaactgaattttcagattggcttcttctgtctgaacattcagttcagtcttgcaggatttatttggtgtgcacactccagaggtcagcattgattcgatccaaatcaacttacaacttgttctacattgtttttcatcaacaactgtgttcag

SEQ ID NO: 215356 - DNA, 3823 bp, Zea Mays
ggttctttctccaccccgatgcccctccccctcccccgtgtgatcccctctccagatcgatgtctgccccggccgtaacccccgcggctcaccgcacgaaaccgccgcgagatcttggagctcagcctctgacgatggctacgactacctcgccaacctccgcgagctctgtccccctccctctcctccaccggcggcgggggatccttggccatgttcctcccgaggcgccggtccacgcgcttcggcctccgcgtggtcatcaagcctttctgatggctcggaacagagccggagccgacggagatgaccgtcgacgagctgaagctgcaggcaagggccagcggcggccacgacctaaggaccagttccccgtcggcatgcgcgtgctcgccgtcgacgacgacccgacctgcctcaaggtcctcgagaacctcttgttccgctgccagtaccatgtgacaacaatgggccaggcagccactgccctgagctgctgagggagaagaaggaccagtttgaccctgtgatcagcaacgtccacatgccggacatggacggcttcaagctcctcgagcttgtgggcctcgagatggaccttccggggattaacagctgaaaacctcgcccgatttgtaaagaagttttcttgttcaatgcggcattgaatttgggaggaatgacaagtctcatgaaaacttctgtatgccctacacgtgaccactaaaagaaagagttagacaggacaaaaggctgcagcggcagaagaagagcttttacatacccttacaatgctgattttgatggagatgaaatgaatttgcatgtccctcggacggaggaagctcgcactgaagcgcttaattctcataggggttcaaaataatttatgtactcctaagaatgtgatgggggatacttcaatgcaataatgagcttcccacaaaattacccaaacagcccaccatcagtcagatttacctctgaaatgtggcatccaaatgtctaacctgatgggcgggtttgtatctctattcttcatccacccagtgaagatccaaacggttatgagctcgcaagtgagcgatggacacctgtgcacacacttgtaggtactgatcacagcacattcaactccacacagattgtccatgtttctttcagtcaccatgatttatcactaggtcattgtgtttgtggccaacgagtattgttctaacagttatgttcccatagctagctagattcattgttgtgttttgttcagggtactttcaccacttctggtatggttctgtctgtaatgtgccagggattattatattgtttttggtttggatttggaatggtttggggtccacaacgatgatgcgtcagagctgttccaaggattggatgatttccattcccctgctgccaattcgactaggctcgccgtctccgctctgcccaactggcaccaagcagccaatggaacttgagcagccaatggatgatttccattcccctgctgccaattctccgaactgctttgacccttcaactcaatccgcatgtacccagcctattgtggcagcaaacagcgactgggtgcggaagccggaagggagaggcgcttggttgacccagaacggacgacaagacaccgccgggggttcgctgcaaccgcacgcgtggtggccggtgtgggaaggagcccactgctcaagcagcgacgacttccgtaacttctcaggccaagttgtagggagggagggcagcaaagaaagcaagcaagaaagaagccgattccactggtggttaaggttttggattaaaggagagaggtgcagagaaaaaaaggcaatcttactcttaatctctgtgtccacatcacttccgatcatgccgtgatcgacagaagtacgggtgccatgtataagtgccccctccaactcaccaaagtaataaggagcagctgctgcaggttgcaactccctgggccaagcagtagcccagcaagttcagcaccaatggcagccatatgaaatataaggcaaagcagataaaaagcttaatttttttcaataaggtaaaggcaatgacagaaaagtgaggagggtcagaggtgtacagataaggatgagggctgaaaagaggagcaggaagggcatgatgaaatcagtgtttgctatttagcctccttcacaactaagatcatcctacataatagatttagacaacaaaaacttatggagtttgctgaaatgccctttcaggcatgctccatctgtgctacaaggttatgggcttcctgcttgctgccagcagtcttttggtgcttttatattgctattaatttgtttgaaatttattatggtgatgactgggaaggtctttttgaggctattactggttatggccttggtggctctttggccgtgttggtggtggtatttataccaaggctgctgatgttggtgccgaccttgtggggaaggtagaaagaaacattcctgaggacgatccaagaaacccagctgtcattgctgacaatgttggtgataatgttggagatattgttggaatgggatcatatctctttggctcatatgctgaatcgtcatgtgctgctcttgttgtggcctcgatctcgtcttttggaatcaaccatcaatttactccaatggtgtatccccttcttgtcagctctgttggtattatagcatgtctcataacaacgctgtttgcaactgatttcttcgagataaaggctgtgagtgaaatagagcctgctctcaagaaacaacttataatatccactgttgtgatgaccattggcattgcgctcatgttggcttggtcttccatacaccttcaccatttataactttggagcccagaagacagtgcaaagctggcaattgttcttgtgtgtggcggttggtctctgggctggcttagtcattggttttattactgagtactacacaagcaatgcctacagccctgtataagatgttgctgattcctgcagaactggagctgccactaatgtcatttttgggcttgctctgggttacaaatcagtcattatcccaatttttgctattgcgtttagtatcttccttagcttcagccttgctgccatgtatggtgttgttgtggctgctcttggaatgctgagtaccattgccacagaccttgctattgatgcctatggccctatcagtgataatgctggaagcttaagtctgtatgggtgcatcttatcatttatatgtatatctgaaagcttaagtatttttttaaatagaagatgtctggaaactttagtaacgacatgagtttcaggctttcagctatagcagtcttattcgcttttaagacagagaagatttttatttagagtttagaaagagtaggtgctatgggtgcatgttatcatttatgtggggaacatctctggtggaaattaatcagtaacgacatgagttaagacagagaagcttaagtattttttcagctatagcagtcttattcgcttttaagacagagaagcttaagtattttttgaatagaagatgtctggaaactttagtaacgacatgagttaatcagaagagatggaagggtagtttatcaacatgtatttggcacttcgccgaaaatgtcacttggactatcttgcaaactgaattttcagattggcttcttctgtctgaacattcagttcagtcttgcaggatttatttggtgtgcacactccagaggtcagcattgattcgatccaaatcaacttacaacttgttctacattgtttttcatcaacaactgtgttcag

SEQ ID NO: 215357 - DNA, 6400 bp, Zea Mays
ggttctttctccaccccgatgcccctccccctcccccgtgtgatcccctctccagatcgatgtctgccccggccgtaacccccgcggctcaccgcacgaaaccgccgcgagatcttggagctcagcctctgacgatggctacgactacctcgccaacctccgcgagctctgtccccctccctctcctccaccggcggcgggggatccttggccatgttcctcccgaggcgccggtccacgcgcttcggcctccgcgtggtcatcaaggtcctaccaccgcctcacctcctccttgccgccgtgcggttgagcgccgacgacgttcgggctccggcggttcctgcatggaccggaagagccatctcatactctttctctacagcctttctgatggctcggaacagagccggagccgacggagatgaccgtcgacgagctgaagctgcaggcaagggccagcggcggccacgacctaaggaccagttccccgtcggcatgcgcgtgctcgccgtcgacgacgacccgacctgcctcaaggtcctcgagaacctcttgttccgctgccagtaccatggtacttcccctgacaacaatgggccaggcagccactgccctgagctgctgagggagaagaaggaccagtttgaccctgtgatcagcaacgtccacatgccggacatggacggcttcaagctcctcgagcttgtgggcctcgagatggaccttccggggattagtaagctttcacttgcccactcctgttcgtgcctttattgcagttgcagcaggccaatgatctcaaaattttggcattgcttgaaaaatcatcattgtgaatgaatagatcttgtatggtaccatctggttactttgtttttttacctccattagacagctgaaaacctcgcccgatttgtaaagaagttttcttgttcaatgcggcattgaatttgggaggaatgacaagtctcatgaaaacttctgtatgccctacacgtgaccactaaaagaaagagttagacaggacaaaaggctgcagcggcagaagaagagcttttacatacccttacaatgctgattttgatggagatgaaatgaatttgcatgtccctcggacggaggaagctcgcactgaagcgcttaattctcataggggttcaaaataatttatgtactcctaagaatgtgatgggggatacttcaatgcaataatgagcttcccacaaaattacccaaacagcccaccatcagtcagatttacctctgaaatgtggcatccaaatgtctaacctgatgggcgggtttgtatctctattcttcatccacccagtgaagatccaaacggttatgagctcgcaagtgagcgatggacacctgtgcacacagtatggcttcgtatactttgtttacatatcttttccccattgtaatgttactcatctcccttttatgtgtatactttttagagagaaaattaccttgtagtctcattgtttcagtttatggtccaatttacaatggcttcactgtaaatgggaaaacaactcggtaggaatgcttttttgaattataaattatttctatttcatacgatgcttataggtatgtgatgagtcctccaatctgagaagtagagcatggtaaagcactccaagctgctctttcatcgggaaatttataggtgacacttgtgtcatacattgaactatggagtcaaacaaattacatattatccttcaacatttttcaccagtgggaactgtagttattgcgtagaatagatggtatattaatcgttgagagccaatgtttacattaactgttatgcagaagacaatttatgttttattttatatctaactgtactttgttgcagcttgtaggtactgatcacagcacattcaactccacacagattgtccatgtttctttcagtcaccatgatttatcactaggtcattgtgtttgtggccaacgagtattgttctaacagttatgttcccatagctagctagattcattgttgtgttttgttcagggtactttcaccacttctggtatggttctgtctgtaatgtgccagggattattatattgtttttggtttggatttggaatggtttggggtccacaacgatgatgcgtcagagctgttccaaggattggatgatttccattcccctgctgccaattcgactaggctcgccgtctccgctctgcccaactggcaccaagcagccaatggaacttgagcagccaatggatgatttccattcccctgctgccaattctccgaactgctttgacccttcaactcaatccgcatgtacccagtaaatgttcaatctgaatttggatcattgctagcaggattctttgcttgctcttctacttctgaaaattcgcaaaatggatagataattccagttaattttaatccattacagtagcctattgtggcagcaaacagcgactgggtgcggaagccggaagggagaggcgcttggttgacccagaacggacgacaagacaccgccgggggttcgctgcaaccgcacgcgtggtggccggtgtgggaaggagcccactgctcaagcagcgacgacttccgtaacttctcaggccaagttgtagggagggagggcagcaaagaaagcaagcaagaaagaagccgattccactggtggttaaggttttggattaaaggagagaggtgcagagaaaaaaaggcaatcttactcttaatctctgtgtccacatcacttccgatcatgccgtgatcgacagaagtacgggtgccatgtataagtgccccctccaactcaccaaagtaataaggagcagctgctgcaggttgcaactccctgggccaagcagtagcccagcaagttcagcaccaatggcagccatatgaaatataaggcaaagcagataaaaagcttaatttttttcaataaggtaaaggcaatgacagaaaagtgaggagggtcagaggtgtacagataaggatgagggctgaaaagaggagcaggaagggcatgatgaaatcagtgtttgctatttagcctccttcacaactaagatcatcctacataatagatttagacaacaaaaacttatggagtttgctgaaatgccctttcaggcatgctccatctgtgctacaagggtcagaatggacttgataggacatttgactatacaacatggaagttatttcaagatatccttttttaactatgctgtcgttgctgatcatttgcatttttacatttttcacattatactatagttgaagatacattcctgaggacgaatgggtgcagttatgggcttcctgcttgctgccagcagtcttttggtgcttttatattgctattaatttgtttgaaatttattatggtgatgactgggaaggtctttttgaggctattactggttatggccttggtggctctttggccgtgttggtggtggtatttataccaaggctgctgatgttggtgccgaccttgtggggaaggtagaaagaaacattcctgaggacgatccaagaaacccagctgtcattgctgacaatgttggtgataatgttggagatattgttggaatgggatcatatctctttggctcatatgctgaatcgtcatgtgctgctcttgttgtggcctcgatctcgtcttttggaatcaaccatcaatttactccaatggtgtatccccttcttgtcagctctgttggtattatagcatgtctcataacaacgctgtttgcaactgatttcttcgagataaaggctgtgagtgaaatagagcctgctctcaagaaacaacttataatatccactgttgtgatgaccattggcattgcgctcatgttggcttggtcttccatacaccttcaccatttataactttggagcccagaagacagtgcaaagctggcaattgttcttgtgtgtggcggttggtctctgggctggcttagtcattggttttattactgagtactacacaagcaatgcctacagaactggagctgccactaatgtcatttttgggcttgctctgggttacaaatcagtcattatcccaatttttgctattgcgtttagtatcttccttagcttcagccttgctgccatgtatggtgttgttgtggctgctcttggaatgctgagtaccattgccacagaccttgctattgatgcctatggccctatcagtgataatgctggaagcttaagtctctccaccgccaccaccataggcggcgctccaaacacggtggcgccatgcgcgccggcgtggtgcggggacttggccatctcctacccgttctggctcgcaggcacgcatctgcccaagtgtggctacgaccaagggttcaaggttacctgtgacaaagccaaggtgtacctcaagaactcgacctgcacgtaccaaatccaggccatcttctacgccatgaagctactcagagtcgccatcgtcggcctgtcgtaggacgatggcacttgcaacatcgacaagttcgtcaatgcctccttcgtccccagcccgccgttcgaaatcgagccccaacaaaaccaggagctgttcttcgtctacgactgcaacctgcgagcgccgcagctgcctcggtcttggacacccttgcgctgtggcaataatggctcgttcacctggctttctggggagtacaggcccgaagacagctccatggcgatgccggggaactgcaacgttgcgatgataccggtggtggcgtacgagggggcgaccgcggcagattatcagtggttcgtggagggaggtttttttcttagttactacctcacggacactgaggacgacgactactacgaccagtgccaagcttgctcgtaccgcgctggccacggccaatgccggacaattgtcagtgacaatgggttccagtgctactgctctgacggcgtctactcgacgacggcctgcggaaccaagagggctaactggaagacaacaattgtagttgtagttgaatcgaagcgggaactgaatcaagaatgttctatttatatcggtctcagttgcatggaagcgataactgaatcaagaattctctatttatatcgatctcagccattttgaaggatgaacgagcaccaggagagagtccgggaggaggcatatactgttgggacgtgtccaagccagtggagatgcagtggagatggaggagatcgacattggcatggagaagctgcgaaacccaccgcagcagaaccccacctagaggaagaagtagaaaacttgtgccggtatgagcttcctaatgagagctgggaagtaaatttgcctcctgaaaaggtgtctcctgagctcccagtaccaacattaggcataaactttgcaagagatggaatccagaaaaaagagtggttgtccatggttgctgcacacagtgatgcatggttactttctgttgcattttatcttggtgctcaatttggtttcaataaaaattacaggagccggaagagttctcgttgaggagaagcttgttgcgacccaaagagagaggacacatacatgtggacgcgagacgactagagccagaggaggactgggcacgcagaagagcgaggaggacaacgagtcctcacacctcaccgccaggacgtcgtagataattttggttttcttgtgattctctttatgaagtgggtggtacctcaaaagacatagatgatctgttgacttatggcagtcgggcattacatttttttgcatgaaatcgacatctgaggagtgataattttgttttgatcgcttctctattgcaagatttagatggctactatcctttgcgattgatcaagaatggtgagctattctaaggaagcttctgaacaatatacccgctgtcctagagtgtcatagatcagggttgagatgattccatcatacttatacgaagattttcctagcaaggaatggtttgaacaatgttgtgattaggcaagggataatgggtacttgctctgtgatgactcaaaaagaatgagattgatcgattgtgtagctgttgtagctccaattgagaaatattatcagtattaagctgctttgatggttgcccggtctattgcttgcatgtagcatgcatctccgcggagatccaagttgttatgctttgagctattgcatcaagagtttaagatagtctttatatattttactaaaacttgtgcatgtacatggagtgcgtgaatgaatcatcaaaggctataatgtctacccgtgtgatatatttagaaaccgtagcaacacacgggcatctaactataaaacatatacatcaatattgtttgaattcactaattttctaaaatgattaatattttagaacagag

SEQ ID NO: 215358 - DNA, 7195 bp, Zea Mays
ggttctttctccaccccgatgcccctccccctcccccgtgtgatcccctctccagatcgatgtctgccccggccgtaacccccgcggctcaccgcacgaaaccgccgcgagatcttggagctcagcctctgacgatggctacgactacctcgccaacctccgcgagctctgtccccctccctctcctccaccggcggcgggggatccttggccatgttcctcccgaggcgccggtccacgcgcttcggcctccgcgtggtcatcaagcctttctgatggctcggaacagagccggagccgacggagatgaccgtcgacgagctgaagctgcaggcaagggccagcggcggccacgacctaaggaccagttccccgtcggcatgcgcgtgctcgccgtcgacgacgacccgacctgcctcaaggtcctcgagaacctcttgttccgctgccagtaccatgtgacaacaatgggccaggcagccactgccctgagctgctgagggagaagaaggaccagtttgaccctgtgatcagcaacgtccacatgccggacatggacggcttcaagctcctcgagcttgtgggcctcgagatggaccttccggggattaacagctgaaaacctcgcccgatttgtaaagaagttttcttgttcaatgcggcattgaatttgggaggaatgacaagtctcatgaaaacttctgtatgccctacacgtgaccactaaaagaaagagttagacaggacaaaaggctgcagcggcagaagaagagcttttacatacccttacaatgctgattttgatggagatgaaatgaatttgcatgtccctcggacggaggaagctcgcactgaagcgcttaattctcataggggttcaaaataatttatgtactcctaagaatggtgagatactggttgcttccgcgcaagacttcttgacctcatctttcttagatatgttttcgaattagattgggatggaaattcacatttgttatcacattttctgttagcaagcacaaccattgtgacattattttgcatgcactcagcctctcaccatggctatgagaatgaaattcaacttatagatataccaaaatgttatagaatcaatataattagatatgtcaagatgacaacacatatttcattcaactactatggatttttcattgataaaatacatgcttgatggctgcttgtctaaaatttatttgtttaatattctttgtttgtaagcccaagaatttgtaaaccaggaaataattccaatgaaagatcggtgcggggcggaattttcttggctttttgtagtggctaccgtagtacatcaacttgggcacttggcgacatgtccggtgcccagctccatcacatatcaatctgaaattaaacatgtgtctgagttctgaatgaaaaaattcagctaacagctaacactacgcactactaacagacctcaagcataatactgttgatttgatgtccttatatttatcttgaagcattgcattcatgcagtcatgtaaatagtactttatttatcttctgaccaacacactaataaccaacctttgcagtgatgggggatacttcaatgcaataatgagcttcccacaaaattacccaaacagcccaccatcagtcagatttacctctgaaatgtggcatccaaatggtcaactttttattagtgaaaatagtatttatttactccatctacagttatgttttctgacatcatgcataatatttgaggaaacgccagtctaacctgatgggcgggtttgtatctctattcttcatccacccagtgaagatccaaacggttatgagctcgcaagtgagcgatggacacctgtgcacacacttgtaggtactgatcacagcacattcaactccacacagattgtccatgtttctttcagtcaccatgatttatcactaggtcattgtgtttgtggccaacgagtattgttctaacagttatgttcccatagctagctagattcattgttgtgttttgttcagggtactttcaccacttctggtatggttctgtctgtaatgtgccagggattattatattgtttttggtttggatttggaatggtttggggtccacaacgatgatgcgtcagagctgttccaaggattggatgatttccattcccctgctgccaattcgactaggctcgccgtctccgctctgcccaactggcaccaagcagccaatggaacttgagcagccaatggatgatttccattcccctgctgccaattctccgaactgctttgacccttcaactcaatccgcatgtacccagtaaatgttcaatctgaatttggatcattgctagcaggattctttgcttgctcttctacttctgaaaattcgcaaaatggatagataattccagttaattttaatccattacagcctattgtggcagcaaacagcgactgggtgcggaagccggaagggagaggcgcttggttgacccagaacggacgacaagacaccgccgggggttcgctgcaaccgcacgcgtggtggccggtgtgggaaggagcccactgctcaagcagcgacgacttccgtaacttctcaggccaagttgtagggagggagggcagcaaagaaagcaagcaagaaagaagccgattccactggtggttaaggttttggattaaaggagagaggtgcagagaaaaaaaggcaatcttactcttaatctctgtgtccacatcacttccgatcatgccgtgatcgacagaagtacgggtgccatgtataagtgccccctccaactcaccaaagtaataaggagcagctgctgcaggttgcaactccctgggccaagcagtagcccagcaagttcagcaccaatggcagccatatgaaatataaggcaaagcagataaaaagcttaatttttttcaataaggtaaaggcaatgacagaaaagtgaggagggtcagaggtgtacagataaggatgagggctgaaaagaggagcaggaaggtaagatcacttgcaccaataatagggatcaccgtgaattaaaagatgagtagtgatcatgtcagttaaatgctcatcatgtttcttcttaggctttcttatttatatctacatctgtgtgaattttttgtactataaatttgtgccttctcgctaatataatgttttattactgtcagtatattaagtggtaactggccaatgcaattagaagcaggaaagccttgtgcatttgtttttttatctcgatgctgtttgcgcctctgccgtatctgtgttcaagcctcagtggacatatactcacctatcttggagatatgatatatagtaatatagctcattgggttctttccatttgctgccaagctttagtagggtattgtttactaccctggcttttcttgtcctagcagaagcacaaaactaatcaggatcaaccactgcaaaatgtgattgacatagatctcacacatctcttcaacattgcacaaacatgggtgcctttttcattccttgtgctaagacaataattttagctcattcggggtactgtataatccagagtttctttttcgatgccataccaatcgtttgtctctgcttgctgagacttgaagaaaactttggtgcgttgtctctttttgtttctgtcagattcattgctgccttccagcaatccagctctttaccctttacagtatttcctttccatttgataaatctgtacttttttaggcttgaaatcttctttctctgttctgaggactgctgcaaacttgtaacagatggattaatcgcttcttttcttattttttagggcatgatgaaatcagtgtttgctatttagcctccttcacaactaagatcatcctacataatagatttagacaacaaaaacttatggagtttgctgaaatgccctttcaggcatgctccatctgtgctacaagggtcagaatggacttgataggacatttgactatacaacatggaagttatttcaagatatccttttttaactatgctgtcgttgctgatcatttgcatttttacatttttcacattatactatagttgaagatacattcctgaggacgaatgggtgcagttatgggcttcctgcttgctgccagcagtcttttggtgcttttatattgctattaatttgtttgaaatttattatggtgatgactgggaaggtctttttgaggctattactggttatggccttggtggctctttggccgtgttggtggtggtatttataccaaggctgctgatgttggtgccgaccttgtggggaaggtagaaagaaacattcctgaggacgatccaagaaacccagctgtcattgctgacaatgttggtgataatgttggagatattgttggaatgggatcatatctctttggctcatatgctgaatcgtcatgtgctgctcttgttgtggcctcgatctcgtcttttggaatcaaccatcaatttactccaatggtgtatccccttcttgtcagctctgttggtattatagcatgtctcataacaacgctgtttgcaactgatttcttcgagataaaggctgtgagtgaaatagagcctgctctcaagaaacaacttataatatccactgttgtgatgaccattggcattgcgctcatgttggcttggtcttccatacaccttcaccatttataactttggagcccagaagacagtgcaaagctggcaattgttcttgtgtgtggcggttggtctctgggctggcttagtcattggttttattactgagtactacacaagcaatgcctacagaactggagctgccactaatgtcatttttgggcttgctctgggttacaaatcagtcattatcccaatttttgctattgcgtttagtatcttccttagcttcagccttgctgccatgtatggtgttgttgtggctgctcttggaatgctgagtaccattgccacagaccttgctattgatgcctatggccctatcagtgataatgctggaagcttaagtctctccaccgccaccaccataggcggcgctccaaacacggtggcgccatgcgcgccggcgtggtgcggggacttggccatctcctacccgttctggctcgcaggcacgcatctgcccaagtgtggctacgaccaagggttcaaggttacctgtgacaaagccaaggtgtacctcaagaactcgacctgcacgtaccaaatccaggccatcttctacgccatgaagctactcagagtcgccatcgtcggcctgtcgtaggacgatggcacttgcaacatcgacaagttcgtcaatgcctccttcgtccccagcccgccgttcgaaatcgagccccaacaaaaccaggagctgttcttcgtctacgactgcaacctgcgagcgccgcagctgcctcggtcttggacacccttgcgctgtggcaataatggctcgttcacctggctttctggggagtacaggcccgaagacagctccatggcgatgccggggaactgcaacgttgcgatgataccggtggtggcgtacgagggggcgaccgcggcagattatcagtggttcgtggagggaggtttttttcttagttactacctcacggacactgaggacgacgactactacgaccagtgccaagcttgctcgtaccgcgctggccacggccaatgccggacaattgtcagtgacaatgggttccagtgctactgctctgacggcgtctactcgacgacggcctgcggaaccaagagggctaactggaagacaacaattgtagaaagatatggcaacaaatgtggcaaacacgatctatctaattctaagaccatttttgtagttgaatcgaagcgggaactgaatcaagaatgttctatttatatcggtctcaggatgaacgagcaccaggagagagtccgggaggaggcatatactgttgggacgtgtccaagccagtggagatgcagtggagatggaggagatcgacattggcatggagaagctgcgaaacccaccgcagcagaaccccacctagaggaagaagtagaaaacttgtgccggtatgagcttcctaatgagagctgggaagtaaatttgcctcctgaaaaggtgtctcctgagctcccagtaccaacattaggcataaactttgcaagagatggaatccagaaaaaagagtggttgtccatggttgctgcacacagtgatgcatggttactttctgttgcattttatcttggtgctcaatttggtttcaataaaaattacaggagccggaagagttctcgttgaggagaagcttgttgcgacccaaagagagaggacacatacatgtggacgcgagacgactagagccagaggaggactgggcacgcagaagagcgaggaggacaacgagtcctcacacctcaccgccaggacgtcgtagataattttggttttcttgtgattctctttatgaagtgggtggtacctcaaaagacatagatgatctgttgacttatggcagtcgggcattacatttttttgcatgaaatcgacatctgaggagtgataattttgttttgatcgcttctctattgcaagatttagatggctactatcctttgcgattgatcaagaatggtgagctattctaaggaagcttctgaacaatatacccgctgtcctagagtgtcatagatcaggcaaactgacctcaacagggttgagatgattccatcatacttatacgaagattttcctagcaaggcaagggataatgggtacttgctctgtgatgactcaaaaagaatgagattgatcgattgtgtagctgttgtagctccaattgagaaatattatcagtattaagctgctttgatggttgcccggtctattgcttgcatgtagcatgcatctccgcggagatccaagttgttatgctttgagctattgcatcaagagtttaagatagtctttatatattttactaaaacttgtgcatgtacatggagtgcgtgaatgaatcatcaaaggctataatgtctacccgtgtgatatatttagaaaccgtagcaacacacgggcatctaactataaaacatatacatcaatattgtttgaattcactaattttctaaaatgattaatattttagaacagag

SEQ ID NO: 215359 - DNA, 5689 bp, Zea Mays
ggttctttctccaccccgatgcccctccccctcccccgtgtgatcccctctccagatcgatgtctgccccggccgtaacccccgcggctcaccgcacgaaaccgccgcgagatcttggagctcagcctctgacgatggctacgactacctcgccaacctccgcgagctctgtccccctccctctcctccaccggcggcgggggatccttggccatgttcctcccgaggcgccggtccacgcgcttcggcctccgcgtggtcatcaaggtcctaccaccgcctcacctcctccttgccgccgtgcggttgagcgccgacgacgttcgggctccggcggttcctgcatggaccggaagagccatctcatactctttctctacagcctttctgatggctcggaacagagccggagccgacggagatgaccgtcgacgagctgaagctgcaggcaagggccagcggcggccacgacctaaggaccagttccccgtcggcatgcgcgtgctcgccgtcgacgacgacccgacctgcctcaaggtcctcgagaacctcttgttccgctgccagtaccatggtacttcccctgacaacaatgggccaggcagccactgccctgagctgctgagggagaagaaggaccagtttgaccctgtgatcagcaacgtccacatgccggacatggacggcttcaagctcctcgagcttgtgggcctcgagatggaccttccggggattaacagctgaaaacctcgcccgatttgtaaagaagttttcttgttcaatgcggcattgaatttgggaggaatgacaagtctcatgaaaacttctgtatgccctacacgtgaccactaaaagaaagagttagacaggacaaaaggctgcaggtataatgaacgccaattagtttcctacaggaacttcaattatttctggtggttcagtgtacaatgtgcacagcctctacacaaaaccccattccaattgatatggttttgttactcgattatgctttggtccgaggtgaagcggcagaagaagagcttttacatacccttacaatgctgattttgatggagatgaaatgaatttgcatgtccctcggacggaggaagctcgcactgaagcgcttaattctcataggggttcaaaataatttatgtactcctaagaatgtgatgggggatacttcaatgcaataatgagcttcccacaaaattacccaaacagcccaccatcagtcagatttacctctgaaatgtggcatccaaatgtctaacctgatgggcgggtttgtatctctattcttcatccacccagtgaagatccaaacggttatgagctcgcaagtgagcgatggacacctgtgcacacacttgtaggtactgatcacagcacattcaactccacacagattgtccatgtttctttcagtcaccatgatttatcactaggtcattgtgtttgtggccaacgagtattgttctaacagttatgttcccatagctagctagattcattgttgtgttttgttcagggtactttcaccacttctggtatggttctgtctgtaatgtgccagggattattatattgtttttggtttggatttggaatggtttggggtccacaacgatgatgcgtcagagctgttccaaggattggatgatttccattcccctgctgccaattcgactaggctcgccgtctccgctctgcccaactggcaccaagcagccaatggaacttgagcagccaatggatgatttccattcccctgctgccaattctccgaactgctttgacccttcaactcaatccgcatgtacccagtaaatgttcaatctgaatttggatcattgctagcaggattctttgcttgctcttctacttctgaaaattcgcaaaatggatagataattccagttaattttaatccattacagcaaacagcgactgggtgcggaagccggaagggagaggcgcttggttgacccagaacggacgacaagacaccgccgggggttcgctgcaaccgcacgcgtggtggccggtgtgggaaggagcccactgctcaagcagcgacgacttccgtaacttctcaggccaagttgtagggagggagggcagcaaagaaagcaagcaagaaagaagccgattccactggtggttaaggttttggattaaaggagagaggtgcagagaaaaaaaggcaatcttactcttaatctctgtgtccacatcacttccgatcatgccgtgatcgacagaagtacgggtgccatgtataagtgccccctccaactcaccaaagtaataaggagcagctgctgcaggttgcaactccctgggccaagcagtagcccagcaagttcagcaccaatggcagccatatgaaatataaggcaaagcagataaaaagcttaatttttttcaataaggtaaaggcaatgacagaaaagtgaggagggtcagaggtgtacagataaggatgagggctgaaaagaggagcaggaaggcatgctccatctgtgctacaagggtcagaatggacttgataggacatttgactatacaacatggaagttatttcaagatatccttttttaactatgctgtcgttgctgatcatttgcatttttacatttttcacattatactatagttgaagatacattcctgaggacgaatgggtgcagttatgggcttcctgcttgctgccagcagtcttttggtgcttttatattgctattaatttgtttgaaatttattatggtgatgactgggaaggtctttttgaggctattactggttatggccttggtggctctttggccgtgttggtggtggtatttataccaaggctgctgatgttggtgccgaccttgtggggaaggtagaaagaaacattcctgaggacgatccaagaaacccagctgtcattgctgacaatgttggtgataatgttggagatattgttggaatgggatcatatctctttggctcatatgctgaatcgtcatgtgctgctcttgttgtggcctcgatctcgtcttttggaatcaaccatcaatttactccaatggtgtatccccttcttgtcagctctgttggtattatagcatgtctcataacaacgctgtttgcaactgatttcttcgagataaaggctgtgagtgaaatagagcctgctctcaagaaacaacttataatatccactgttgtgatgaccattggcattgcgctcatgttggcttggtcttccatacaccttcaccatttataactttggagcccagaagacagtgcaaagctggcaattgttcttgtgtgtggcggttggtctctgggctggcttagtcattggttttattactgagtactacacaagcaatgcctacagccctgtataagatgttgctgattcctgcagaactggagctgccactaatgtcatttttgggcttgctctgggttacaaatcagtcattatcccaatttttgctattgcgtttagtatcttccttagcttcagccttgctgccatgtatggtgttgttgtggctgctcttggaatgctgagtaccattgccacagaccttgctattgatgcctatggccctatcagtgataatgctggaagcttaagtctctccaccgccaccaccataggcggcgctccaaacacggtggcgccatgcgcgccggcgtggtgcggggacttggccatctcctacccgttctggctcgcaggcacgcatctgcccaagtgtggctacgaccaagggttcaaggttacctgtgacaaagccaaggacgatggcacttgcaacatcgacaagttcgtcaatgcctccttcgtccccagcccgccgttcgaaatcgagccccaacaaaaccaggagctgttcttcgtctacgactgcaacctgcgagcgccgcagctgcctcggtcttggacacccttgcgctgtggcaataatggctcgttcacctggctttctggggagtacaggcccgaagacagctccatggcgatgccggggaactgcaacgttgcgatgataccggtggtggcgtacgagggggcgaccgcggcagattatcagtggttcgtggagggaggtttttttcttagttactacctcacggacactgaggacgacgactactacgaccagtgccaagcttgctcgtaccgcgctggccacggccaatgccggacaattgtcagtgacaatgggttccagtgctactgctctgacggcgtctactcgacgacggcctgcggaaccaagagggctaactggaagacaacaattgtagaaagatatggcaacaaatgtggcaaacacgatctatctaattctaagaccatttttgtagttgaatcgaagcgggaactgaatcaagaatgttctatttatatcggtctcaggatgaacgagcaccaggagagagtccgggaggaggcatatactgttgggacgtgtccaagccagtggagatgcagtggagatggaggagatcgacattggcatggagaagctgcgaaacccaccgcagcagaaccccacctagaggaagaagtagaaaacttgtgccggtatgagcttcctaatgagagctgggaagtaaatttgcctcctgaaaaggtgtctcctgagctcccagtaccaacattaggcataaactttgcaagagatggaatccagaaaaaagagtggttgtccatggttgctgcacacagtgatgcatggttactttctgttgcattttatcttggtgctcaatttggtttcaataaaaattacaggagccggaagagttctcgttgaggagaagcttgttgcgacccaaagagagaggacacatacatgtggacgcgagacgactagagccagaggaggactgggcacgcagaagagcgaggaggacaacgagtcctcacacctcaccgccaggacgtcgtagataattttggttttcttgtgattctctttatgaagtgggtggtacctcaaaagacatagatgatctgttgacttatggcagtcgggcattacatttttttgcatgaaatcgacatctgaggagtgataattttgttttgatcgcttctctattgcaagatttagatggctactatcctttgcgattgatcaagaatggtgagctattctaaggaagcttctgaacaatatacccgctgtcctagagtgtcatagatcaggcaaactgacctcaacagggttgagatgattccatcatacttatacgaagattttcctagcaaggcaagggataatgggtacttgctctgtgatgactcaaaaagaatgagattgatcgattgtgtagctgttgtagctccaattgagaaatattatcagtattaagctgctttgatggttgcccggtctattgcttgcatgtagcatgcatctccgcggagatccaagttgttatgctttgagctattgcatcaagagtttaagatagtctttatatattttactaaaacttgtgcatgtacatggagtgcgtgaatgaatcatcaaaggctataatgtctacccgtgtgatatatttagaaaccgtagcaacacacgggcatctaactataaaacatatacatcaatattgtttgaattcactaattttctaaaatgattaatattttagaacagag

SEQ ID NO: 215360 - DNA, 1956 bp, Zea Mays
cttactcttaatctctgtgtccacatcacttccgatcatgccgtgatcgacagaagtacgggtgccatgtataagtgccccctccaactcaccaaagtaataaggagcagctgctgcaggttgcaactccctgggccaagcagtagcccagcaagttcagcaccaatggcagccatatgaaatataaggcaaagcagataaaaagcttaatttttttcaataaggtaaaggcaatgacagaaaagtgaggagggtcagaggtgtacagataaggatgagggctgaaaagaggagcaggaagggcatgatgaaatcagtgtttgctatttagcctccttcacaactaagatcatcctacataatagatttagacaacaaaaacttatggagtttgctgaaatgccctttcaggcatgctccatctgtgctacaagggtcagaatggacttgataggacatttgactatacaacatggaagttatttcaagatatccttttttaactatgctgtcgttgctgatcatttgcatttttacatttttcacattatactatagttgaagatacattcctgaggacgaatgggtgcagttatgggcttcctgcttgctgccagcagtcttttggtgcttttatattgctattaatttgtttgaaatttattatggtgatgactgggaaggtctttttgaggctattactggttatggccttggtggctctttggccgtgttggtggtggtcattgctgacaatgttggtgataatgttggagatattgttggaatgggatcatatctctttggctcatatgctgaatcgtcatgtgctgctcttgttgtggcctcgatctcgtcttttggaatcaaccatcaatttactccaatggtgtatccccttcttgtcagctctgttggtattatagcatgtctcataacaacgctgtttgcaactgatttcttcgagataaaggctgtgagtgaaatagagcctgctctcaagaaacaacttataatatccactgttgtgatgaccattggcattgcgctcatgttggcttggcaattgttcttgtgtgtggcggttggtctctgggctggcttagtcattggttttattactgagtactacacaagcaatgcctacagaactggagctgccactaatgtcatttttgggcttgctctgggttacaaatcagtcattatcccaatttttgctattgcgtttagtatcttccttagcttcagccttgctgccatgtatggtgttgttgtggctgctcttggaatgctgagtaccattgccacagaccttgctattgatgcctatggccctatcagtgataatgctggaagcttaagtctgtatgggtgcatcttatcatttatatgtatatctgaaagcttaagtatttttttaaatagaagatgtctggaaactttagtaacgacatgagtttcaggctttcagctatagcagtcttattcgcttttaagacagagaagatttttatttagagtttagaaagagtaggtgctatgggtgcatgttatcatttatgtggggaacatctctggtggaaattaatcagtaacgacatgagttaagacagagaagcttaagtattttttcagctatagcagtcttattcgcttttaagacagagaagcttaagtattttttgaatagaagatgtctggaaactttagtaacgacatgagttaatcagaagagatggaagggtagtttatcaacatgtatttggcacttcgccgaaaatgtcacttggactatcttgcaaactgaattttcagattggcttcttctgtctgaacattcagttcagtcttgcaggatttatttggtgtgcacactccagaggtcagcattgattcgatccaaatcaacttacaacttgttctacattgtttttcatcaacaactgtgttcag

SEQ ID NO: 215361 - DNA, 1887 bp, Zea Mays
gatctcacacatctcttcaacattgcacaaacatgggtgcctttttcattccttgtgctaagacaataattttagctcattcggggtactgtataatccagagtttctttttcgatgccataccaatcgtttgtctctgcttgctgagacttgaagaaaactttggcatgctccatctgtgctacaagggtcagaatggacttgataggacatttgactatacaacatggaagttatttcaagatatccttttttaactatgctgtcgttgctgatcatttgcatttttacatttttcacattatactatagttgaagatacattcctgaggacgaatgggtgcagttatgggcttcctgcttgctgccagcagtcttttggtgcttttatattgctattaatttgtttgaaatttattatggtgatgactgggaaggtctttttgaggctattactggttatggccttggtggctctttggccgtgttggtggtggtatttataccaaggctgctgatgttggtgccgaccttgtggggaaggtagaaagaaacattcctgaggacgatccaagaaacccagctgtcattgctgacaatgttggtgataatgttggagatattgttggaatgggatcatatctctttggctcatatgctgaatcgtcatgtgctgctcttgttgtggcctcgatctcgtcttttggaatcaaccatcaatttactccaatggtgtatccccttcttgtcagctctgttggtattatagcatgtctcataacaacgctgtttgcaactgatttcttcgagataaaggctgtgagtgaaatagagcctgctctcaagaaacaacttataatatccactgttgtgatgaccattggcattgcgctcatgttggcttggtcttccatacaccttcaccatttataactttggagcccagaagacagtgcaaagctggcaattgttcttgtgtgtggcggttggtctctgggctggcttagtcattggttttattactgagtactacacaagcaatgcctacagccctgtataagatgttgctgattcctgcagaactggagctgccactaatgtcatttttgggcttgctctgggttacaaatcagtcattatcccaatttttgctattgcgtttagtatcttccttagcttcagccttgctgccatgtatggtgttgttgtggctgctcttggaatgctgagtaccattgccacagaccttgctattgatgcctatggccctatcagtgataatgctggaagcttaagtctgtatgggtgcatcttatcatttatatgtatatctgaaagcttaagtatttttttaaatagaagatgtctggaaactttagtaacgacatgagtttcaggctttcagctatagcagtcttattcgcttttaagacagagaagatttttatttagagtttagaaagagtaggtgctatgggtgcatgttatcatttatgtggggaacatctctggtggaaattaatcagtaacgacatgagttaagacagagaagcttaagtattttttcagctatagcagtcttattcgcttttaagacagagaagcttaagtattttttgaatagaagatgtctggaaactttagtaacgacatgagttaatcagaagagatggaagggtagtttatcaacatgtatttggcacttcgccgaaaatgtcacttggactatcttgcaaactgaattttcagattggcttcttctgtctgaacattcagttcagtcttgcaggatttatttggtgtgcacactccagaggtcagcattgattcgatccaaatcaacttacaacttgttctacattgtttttcatcaacaactgtgttcag

SEQ ID NO: 215362 - DNA, 2512 bp, Zea Mays
ggctaacccatgtcccagttcccactgtcatcgcctctctcctttccctccctatatatatataaaccaacccccctgcaggttggatggagtcttcattttctccattacgtgttcccagctgcatgccgcaagtgtcaaactccaattagtcaccagccttgcttgcttgcttgtcccagctaagccgaggacaggacacgcgaagaagaggaacgatcagtcaccagccttgtttgacatcctgagcagcttcatctcctcctcctggcaagtttcttggcaagctggtgctcaaacaatggcgtgttaattaggaataggatagaacaggatcgttgcatcacgcagccaaggagacatggctaggagcagagaggtggcgggctggggcacggtggccggaggaggcggcgcggcggccgtggagaaggcggtgcggtgcctcggcaggggcgtcgacatgacgggcgacctgaggctgaagcactgcaaggacgcggggggctgcctggtcgtccggagcgccgggaggaaggcggcggagaaggccgtcgtgccgggcttcggcgtcgtcgccgacctgcccgccgacgtcaggtgcggcaagggcgaccggatcaggttcaggtccgacgtgctcgagttcaacaagatgtcggaggcgttcaaccaccggaattcgctggcggggaagatcccgtcggggctcttcaactcctgcttcgacctggagagcggctcgtgggcggaggacgccgccgccaccaagtgcctcgccttcgacggctacttcatctcgctcctggacctccgcctcgactgccggccgctcgccctcgccgaccacgtcgtcggcgacgtgccggcggcatgggacccggcagccatagcaagtttcatcgagaggtacgggacccacatcgttgtcgggctgggcttgggtgggcaggacgtggtgtacgtgaagcaggacaggtcgtctccgctgtccccgtccgagatcaaggagcacctcgacaggctcggtgaccagctcttcaccgggacctgcaccctgcccccttccaaccgcaaactcagggaacacaaatctaaggtccctgaggcgttcaatgtgttcgatgcccaagtgacacagcaagggctccaaggaataatggctactccagtgtcctgcaaagagggcgtgacggtgatacactccaagaggggagggaacgcggcggcgagcgaccactcggagtggctgctcaccgtgcccgcgacgccggacgcgataagcttcaagctcgtgcccatcacgtccctcctcaagggcgtgagcggcgtcggcttcctctcccacgccatcaacctgtatctcagatacaaacctccgacaggcgagctgaggtacttcctggacttccagcaccacagactgtgggctccagtgctcggtgacctgccacttgggccctgctccaaccggcaggctcctagtccggccttgaacttcagcctcgtcggttccaagctctacgtcagctcgagcgaggtggttgttccaagactacccgtcaccgggatgagactacatctggagggcaagaaaaataaccggcatccacctgcagcatctgtccaacaccccagcgttcatcggcggaacaccggccaatgagcagccgccggcggcggtgtggcgcgggtcggagacgatctccgacgcgcggtactacgagccggtccagtggaggatgttcgcgcacgtgtgcacggtgccggtgaagtacgaccctcgctgggccggcgccggcgccggcccgccgtcggcgtacgtcgtctccggcgcgcagctccacgtcaaggcccacgactcgaccaacatcctgcacctcaggctcctgtacgcccggctgccgggccacgccgtggtgcagtccaggtgggcgcacggcgccgccaccaggctgtcatcgggcagagggagcttcttcctgtccaagtcgctggcctcgggctccggcggcgtcgacaaggagcagcagcacccggggagggttcacgtcgactccggcgtgttcgccggagggccgcccgtgcctgtcgggacccagaggctgctcaggtttgtggacacgtctcaggtcaccatggggccgcaggacagtcctgggtactggctggtcactggcgccaagctggacgttgagaaggggaagatctcactccgcgtcaagttctcgctgctcgctccagtttcttgacacgctagtcttctttctgctaggagaacaccgctgtgcagaaggccgaaattaggggggactccttgcgcagtgatgagtgattgtatcaaggtcatatttgattttacacagccttccgtacatatttttgctactactttcttgtacaatatattcttaaaatccttcagatttttcatgcaattatacacatttgcaaactaaataacttatatcacaaatcccaaaacattaaaatcataatatgaacacatcgg

SEQ ID NO: 215363 - DNA, 3584 bp, Zea Mays
ctctccagtaccattcgggcggctaagctctgagctaaaccccgacggagtgagcgaggaaacgttctccgtttcactttcccaacacccagaatcctgcagaaatcaccctttccacccccacccagcgctgctcggatccccgggcgagcacatcctccggtcctcgcttgtcggcctctcctccccggggccggtccagcgggttgcatggtgcgcggccgctggttgtgagcccaatcgatggcctcggcggaggcgcgccgcctcgcggtcgtgccgcagctagatatcgagcagatactgaaggaagctcaacaccgatggttacgccctgctgaaatatgtgaaatactgaaaaactacaggaacttccgtattgctccagaaccaccaaacagaccaccaatgttgagatacttcaggaaggatggtcataattggaggaagaaaaatgatcagaagactgtcaaggaagcccatgaaaggttgaagtctggaagtattgatgtacttcactgttactatgcccatggggaagagaatataaacttccaaaggaggacttactggatgctggaagaggactatatgcacattgtacttgtgcattatcttgagactaagggtggcaagtcgtctcgtgctagaggaaacaacatgattcaagaagctgctgtggatagtcctttaagtcaattaccttcacagactatggagggagagagctcacttagtggacaggcctccgaatatgaagaggcggaatcagatatttattcaggaggagccggacacgactctttcacttgggtgcagcagcatgaaaatggaactggacccatgatagcttcttctgttttcagctcgtacacacctgctttgtccataggtaattaccatgggctgcatgccacacaaaacacaagcttctatcctgttaaccagcttaattctcctgtcattcttaatggatcaagtgccatgcttggaacaaatggctgtgcaaatcaaactgatcttccatcgtggaattctgtgatagaactggatcatgagcctgttcaaatgcctgatctccagtttcctgttcctcctgatcaaggtacttccacagaaggcctgggagttgattacttaacatttgatgaagtatattctgatggcctcagtctccaagatattggtgccacaggaactcatggagagtcatatttgcagttctctagtggtactggtgatttggctgcaacagtgaacagcttcccacaagaaaatgatggttctctggaggcagccattggctatccatttttgaagacacagtcatccaatctatctgatatcttaaaagacagctttaagaaaactgacagttttacaagatggatgagcaaagagcttcctgaagtggaagattctcaaattcaatctagttctggggcgttctggagcagtgaagaagcaaataatatcatcgaagcatcaaaccatgaggcactggatcagttcactgtttccccgatgctctcgcaggaccagctctttagtatagttgacttttctccaaactggacatatgtaggttcaaagactaagattttagttgctggtaacatcctgaatgacagtcaaatcaccgagagatccaagtggtcatgtatgtttggagaagttgaagttccagcaaatattttagcagatggtactctcatctgttactcaccgcagcataaacctggtcgagtacctttttatatcacctgctccaacaggttggcctgcagtgaagtgcgagagtttgaatttcgaccaactgtctcccagtacatggatgctcctagtccacatggtgaaacaaacaaagtttatttccagatacgccttgacaagttgttatcccttggaccggatgagtaccaggcaactgtatctaatcctactctggagatggttgacttaagcaggaagataagttcactgatggcgagcaacgatgagtggtccaacttgctaaagttggctgttgataatgagccttctactgctgatcagcaggatcagtttgctgaaaacttgataaagggaaaattgcatatctggcttctaaataaagttggtatgggtggcaagggacccagtgtgttagatgatgaagggcagggcgtgcttcacttagcagctgcacttggatatgattgggctataaggccaacacttgctgctggcgtgaatattaatttcagagatattcatggctggactgcactccattgggctgccttttgtggccgagagagtactgtagttgcgcttattgcactgggagcagctcctggagctttgacagacccaactcccgatttccctggaagtacaccagcagatcttgcatcttctaatggtcaaaagggaatatctggtttcttggcagagtgttctctgaccagtcatcttcaggtccttaatctgaaggaagctaatatggctcaaatatctggtctacctggtattggagatgttaccgagagagattcactgcagcctccaagtggagattcattgggtcctgttcgaaatgctactcaagctgctgcgcggatatatcaagttttcagggtgcaatccttccagagaaagcaagcggctcaatatgaggataaaggtggcatgtctgatgagcgtgctctctcactcctttctgtcaagccacccaagtcagggcagcttgatcctctgcactctgctgcaactcgcatacaaaataagttcagaggatggaaggggagaaaggaatttcttcttattaggcagcgaattgtgaagatccaggctcatgtgcgaggtcaccaagtgaggaagcattatcggaaaatagtttggtctgttgggatcgtggagaaagttatattgcgttggaggcgtagaggggctgggttacgtgggtttcggtctcaagaaggatcagtggagagcagtagtggcggaacaagtagcagttcgatccaaaataagtcttctggagatgattacgattttctgcaagaaggacgaaaacagactgaagaacggctccagaaagctcttgcaagagtgaagtccatggctcagtacccggaagcaagagatcagtaccagaggattttcactgtcgtgtcaaaaatgcaggagtctcaggctatgcaagaaaagatgccggaggagtcagcagagatggacatgagtgaattcaaggaactgtgggatgacgatgcacctatcccgggttatttttagtgtggaaacctgttttgttggatttatttctctgtagattgctccgtttgtcttgagtgctactgaattgatggcacaaatggctgataacccaaagtagcgttgctggtgcatgatctgacatgtttggatttggacttaggtgtggtatttcttttgccttatgtacagtagaatattatctacatttgaaggagccttgtatttactgtgtgaaatcggtgtaaagagtttgatatcagagatcttacccagacttaacggttgcatgttactgcagtgcagcagttaggagtttgaggcttttt

SEQ ID NO: 215364 - DNA, 3603 bp, Zea Mays
ttccaggcctctccagtaccattcgggcggctaagctctgagctaaaccccgacggagtgagcgaggaaacgttctccgtttcactttcccaacacccagaatcctgcagaaatcaccctttccacccccacccagcgctgctcggatccccgggcgagcacatcctccggtcctcgcttgtcggcctctcctccccggggccggtccagcgggttgcatggtgcgcggccgctggttgtgagcccaatcgatggcctcggcggaggcgcgccgcctcgcggtcgtgccgcagctagatatcgagcagatactgaaggaagctcaacaccgatggttacgccctgctgaaatatgtgaaatactgaaaaactacaggaacttccgtattgctccagaaccaccaaacagaccaccaagtggctcactttttttatttgatcggaaagtgttgagatacttcaggaaggatggtcataattggaggaagaaaaatgatcagaagactgtcaaggaagcccatgaaaggttgaagtctggaagtattgatgtacttcactgttactatgcccatggggaagagaatataaacttccaaaggaggacttactggatgctattgtacttgtgcattatcttgagactaagggtggcaagtcgtctcgtgctagaggaaacaacatgattcaagaagctgctgtggatagtcctttaagtcaattaccttcacagactatggagggagagagctcacttagtggacaggcctccgaatatgaagaggcggaatcagatatttattcaggaggagccggacacgactctttcacttgggtgcagcagcatgaaaatggaactggacccatgatagcttcttctgttttcagctcgtacacacctgctttgtccataggtaattaccatgggctgcatgccacacaaaacacaagcttctatcctgttaaccagcttaattctcctgtcattcttaatggatcaagtgccatgcttggaacaaatggctgtgcaaatcaaactgatcttccatcgtggaattctgtgatagaactggatcatgagcctgttcaaatgcctgatctccagtttcctgttcctcctgatcaaggtacttccacagaaggcctgggagttgattacttaacatttgatgaagtatattctgatggcctcagtctccaagatattggtgccacaggaactcatggagagtcatatttgcagttctctagtggtactggtgatttggctgcaacagtgaacagcttcccacaagaaaatgatggttctctggaggcagccattggctatccatttttgaagacacagtcatccaatctatctgatatcttaaaagacagctttaagaaaactgacagttttacaagatggatgagcaaagagcttcctgaagtggaagattctcaaattcaatctagttctggggcgttctggagcagtgaagaagcaaataatatcatcgaagcatcaaaccatgaggcactggatcagttcactgtttccccgatgctctcgcaggaccagctctttagtatagttgacttttctccaaactggacatatgtaggttcaaagactaagattttagttgctggtaacatcctgaatgacagtcaaatcaccgagagatccaagtggtcatgtatgtttggagaagttgaagttccagcaaatattttagcagatggtactctcatctgttactcaccgcagcataaacctggtcgagtacctttttatatcacctgctccaacaggttggcctgcagtgaagtgcgagagtttgaatttcgaccaactgtctcccagtacatggatgctcctagtccacatggtgaaacaaacaaagtttatttccagatacgccttgacaagttgttatcccttggaccggatgagtaccaggcaactgtatctaatcctactctggagatggttgacttaagcaggaagataagttcactgatggcgagcaacgatgagtggtccaacttgctaaagttggctgttgataatgagccttctactgctgatcagcaggatcagtttgctgaaaacttgataaagggaaaattgcatatctggcttctaaataaagttggtatgggtggcaagggacccagtgtgttagatgatgaagggcagggcgtgcttcacttagcagctgcacttggatatgattgggctataaggccaacacttgctgctggcgtgaatattaatttcagagatattcatggctggactgcactccattgggctgccttttgtggccgagagagtactgtagttgcgcttattgcactgggagcagctcctggagctttgacagacccaactcccgatttccctggaagtacaccagcagatcttgcatcttctaatggtcaaaagggaatatctggtttcttggcagagtgttctctgaccagtcatcttcaggtccttaatctgaaggaagctaatatggctcaaatatctggtctacctggtattggagatgttaccgagagagattcactgcagcctccaagtggagattcattgggtcctgttcgaaatgctactcaagctgctgcgcggatatatcaagttttcagggtgcaatccttccagagaaagcaagcggctcaatatgaggataaaggtggcatgtctgatgagcgtgctctctcactcctttctgtcaagccacccaagtcagggcagcttgatcctctgcactctgctgcaactcgcatacaaaataagttcagaggatggaaggggagaaaggaatttcttcttattaggcagcgaattgtgaagatccaggctcatgtgcgaggtcaccaagtgaggaagcattatcggaaaatagtttggtctgttgggatcgtggagaaagttatattgcgttggaggcgtagaggggctgggttacgtgggtttcggtctcaagaaggatcagtggagagcagtagtggcggaacaagtagcagttcgatccaaaataagtcttctggagatgattacgattttctgcaagaaggacgaaaacagactgaagaacggctccagaaagctcttgcaagagtgaagtccatggctcagtacccggaagcaagagatcagtaccagaggattttcactgtcgtgtcaaaaatgcaggagtctcaggctatgcaagaaaagatgccggaggagtcagcagagatggacatgagtgaattcaaggaactgtgggatgacgatgcacctatcccgggttatttttagtgtggaaacctgttttgttggatttatttctctgtagattgctccgtttgtcttgagtgctactgaattgatggcacaaatggctgataacccaaagtagcgttgctggtgcatgatctgacatgtttggatttggacttaggtgtggtatttcttttgccttatgtacagtagaatattatctacatttgaaggagccttgtatttactgtgtgaaatcggtgtaaagagtttgatatcagagatcttacccagacttaacggttgcatgttactgcagtgcagcagttaggagtttgaggcttttt

SEQ ID NO: 215365 - DNA, 3552 bp, Zea Mays
ttccaggcctctccagtaccattcgggcggctaagctctgagctaaaccccgacggagtgagcgaggaaacgttctccgtttcactttcccaacacccagaatcctgcagaaatcaccctttccacccccacccagcgctgctcggatccccgggcgagcacatcctccggtcctcgcttgtcggcctctcctccccggggccggtccagcgggttgcatggtgcgcggccgctggttgtgagcccaatcgatggcctcggcggaggcgcgccgcctcgcggtcgtgccgcagctagatatcgagcagatactgaaggaagctcaacaccgatggttacgccctgctgaaatatgtgaaatactgaaaaactacaggaacttccgtattgctccagaaccaccaaacagaccaccaagtggctcactttttttatttgatcggaaagtgttgagatacttcaggaaggatggtcataattggaggaagaaaaatgatcagaagactgtcaaggaagcccatgaaaggttgaagtctggaagtattgatgtacttcactgttactatgcccatggggaagagaatataaacttccaaaggaggacttactggatgctggaagaggactatatgcacattgtacttgtgcattatcttgagactaagggtggcaagtcgtctcgtgctagaggaaacaacatgattcaagaagctgctgtggatagtcctttaagtcaattaccttcacagactatggagggagagagctcacttagtggacaggcctccgaatatgaagaggcggaatcagatatttattcaggaggagccggacacgactctttcacttgggtgcagcagcatgaaaatggaactggacccatgatagcttcttctgttttcagctcgtacacacctgctttgtccataggtaattaccatgggctgcatgccacacaaaacacaagcttctatcctgttaaccagcttaattctcctgtcattcttaatggatcaagtgccatgcttggaacaaatggctgtgcaaatcaaactgatcttccatcgtggaattctgtgatagaactggatcatgagcctgttcaaatgcctgatctccagtttcctgttcctcctgatcaaggtacttccacagaaggcctgggagttgattacttaacatttgatgaagtatattctgatggcctcagtctccaagatattggtgccacaggaactcatggagagtcatatttgcagttctctagtggtactggtgatttggctgcaacagtgaacagcttcccacaagaaaatgatggttctctggaggcagccattggctatccatttttgaagacacagtcatccaatctatctgatatcttaaaagacagctttaagaaaactgacagttttacaagatggatgagcaaagagcttcctgaagtggaagattctcaaattcaatctagttctggggcgttctggagcagtgaagaagcaaataatatcatcgaagcatcaaaccatgaggcactggatcagttcactgtttccccgatgctctcgcaggaccagctctttagtatagttgacttttctccaaactggacatatgtaggttcaaagactaagattttagttgctggtaacatcctgaatgacagtcaaatcaccgagagatccaagtggtcatgtatgtttggagaagttgaagttccagcaaatattttagcagatggttggcctgcagtgaagtgcgagagtttgaatttcgaccaactgtctcccagtacatggatgctcctagtccacatggtgaaacaaacaaagtttatttccagatacgccttgacaagttgttatcccttggaccggatgagtaccaggcaactgtatctaatcctactctggagatggttgacttaagcaggaagataagttcactgatggcgagcaacgatgagtggtccaacttgctaaagttggctgttgataatgagccttctactgctgatcagcaggatcagtttgctgaaaacttgataaagggaaaattgcatatctggcttctaaataaagttggtatgggtggcaagggacccagtgtgttagatgatgaagggcagggcgtgcttcacttagcagctgcacttggatatgattgggctataaggccaacacttgctgctggcgtgaatattaatttcagagatattcatggctggactgcactccattgggctgccttttgtggccgagagagtactgtagttgcgcttattgcactgggagcagctcctggagctttgacagacccaactcccgatttccctggaagtacaccagcagatcttgcatcttctaatggtcaaaagggaatatctggtttcttggcagagtgttctctgaccagtcatcttcaggtccttaatctgaaggaagctaatatggctcaaatatctggtctacctggtattggagatgttaccgagagagattcactgcagcctccaagtggagattcattgggtcctgttcgaaatgctactcaagctgctgcgcggatatatcaagttttcagggtgcaatccttccagagaaagcaagcggctcaatatgaggataaaggtggcatgtctgatgagcgtgctctctcactcctttctgtcaagccacccaagtcagggcagcttgatcctctgcactctgctgcaactcgcatacaaaataagttcagaggatggaaggggagaaaggaatttcttcttattaggcagcgaattgtgaagatccaggctcatgtgcgaggtcaccaagtgaggaagcattatcggaaaatagtttggtctgttgggatcgtggagaaagttatattgcgttggaggcgtagaggggctgggttacgtgggtttcggtctcaagaaggatcagtggagagcagtagtggcggaacaagtagcagttcgatccaaaataagtcttctggagatgattacgattttctgcaagaaggacgaaaacagactgaagaacggctccagaaagctcttgcaagagtgaagtccatggctcagtacccggaagcaagagatcagtaccagaggattttcactgtcgtgtcaaaaatgcaggagtctcaggctatgcaagaaaagatgccggaggagtcagcagagatggacatgagtgaattcaaggaactgtgggatgacgatgcacctatcccgggttatttttagtgtggaaacctgttttgttggatttatttctctgtagattgctccgtttgtcttgagtgctactgaattgatggcacaaatggctgataacccaaagtagcgttgctggtgcatgatctgacatgtttggatttggacttaggtgtggtatttcttttgccttatgtacagtagaatattatctacatttgaaggagccttgtatttactgtgtgaaatcggtgtaaagagtttgatatcagagatcttacccagacttaacggttgcatgttactgcagtgcagcagttaggagtttgaggcttttt

SEQ ID NO: 215366 - DNA, 976 bp, Zea Mays
  misc_feature (975)..(976): n is a, c, g, or t
atgtggtgtctagctggggctgcagggctgaaagacagtggcaatcaggcaatcatgaaatttcctgagacagatagtgtttcaaatcagagggaacatttgattttacttcttgctaacatacatatacgaagaaatccgaagactgatcaacaatccaagttggatgacaatgcactgaatgatgtgatgaaaagattgtttaagaattacaagaaatggtgcaaatatcttggtcgcaagagcagcctttggttgccaacaattcagcaggagatgcaacaacgaaaattactgtatatgggcttgtaccttctcatttggggtgaagctgcaaacttgcgttttatgccagagtgcatttgctacatatatcatcatatggcatttgaaatgtatggtatgttagctggaaatgtcagtgccttgacgggtgaatatgtgaagccggcctatggtggtgagaaagaagcctttctgaagaaagttgttacaccgatttaccataccatagcaaaggaagctgaaaggagcaaaagagagaaagggaatcattctgagtggagaaactatgatgatcttaatgagtacttctggtctgctgactgctttcggcttggttggcctatgcgagctgatgctgacttcttttgtcagcctgatgaaagaaatgaaagcacaaggatcagcaaacagaagggaaaggtcaacttcgttgagctacgctcattttggcacatattcagaagttttgacagactctggagcttctttattttagctcttcaggttatgataattctcgcttgggacggaggttcactagccagtatttttgattatgctgttttcaagaaggttttgagtatctttatcacttctgctatactaaatcttggacaagctacacttgatattatctttaattggaaggccagacgaacgatggaatttgcagttaagctgagatatgtnn

SEQ ID NO: 215367 - DNA, 2115 bp, Zea Mays
  misc_feature (2114)..(2115): n is a, c, g, or t
ctctctctctcctccctgcctgccaagtcccaacacaaaaccctctcgtcgtccccaacaccgcttcgcctcgaccgcgatgatcacctcccacgcgcggaggtagccgccgagcagctcgccgccgtccatccagaggctcccgccgagggtttcctcgacgcggctcttgcgcgtctaccgtacgtaagtacgttggtcgcgtggttttcactcgagttcctgcggattggtgcgcgcgctacccgtgtggccgtgtccccgactccacatgagcgagctttcccatgcgcgcgccaccaaaagctcggtgctggatttctgaatcttcaagcttgggctagctgcctagcttcaaaacggggcctctatttccgttggttggttgaattgcctgacgtgattcgtctcagcatcatcaaattgttgtaccgagtgacaaggtttagggtggtgactgcaagtcaccgagatgacgtccttgtcacgcacgctgtctcggggcgggccgatgcagtcgccaggggctcgccgcatccaaaggacgcagactgctgtgaattttggtgagcccatgtttgacagcgaggtggtgccgtcgtcgcttgttgagattgcgcccatcctccgtgttgccaatgaggttgagatggccaaccctcgtgtcgcttatctctgccggttctatgcattcgaaaaggctcacaggttagatccgacttcaagtggtcgtggtgtccgacagttcaagacagctcttctgcagcggcttgaaagggagaacgagcccaccttgatgggaaggggacaaaagagtgatgcacgggaaatacagaccttctatcatagctattacaagaaatatattcaagcactccagaatgcttctgaccaactggatcgcctaccagactgctgctattctgtttgaagttttaaaagcagttacacaacaacatgctgttgaagttgatcatgagatattggaagctgctgataaggttaaagagaaaacgaagatctatctcccttttaatattctccctcttgatccagacagtggcaatcaggcaatcatgaaatttcctgagatccaagctgctgcttccgctcttcgcaatacaaggggtcttccatggcctaaaacttatgagcataaagttaacgaggacctcttggattggctgcaagctatgtttggctttcagacagatagtgtttcaaatcagagggaacatttgattttacttcttgctaacatacatatacgaagaaatccgaagactgatcaacaatccaagttggatgacaatgcactgaatgatgtgatgaaaagattgtttaagaattacaagaaatggtgcaaatatcttggtcgcaagagcagcctttggttgccaacaattcagcaggagatgcaacaacgaaaattactgtatatgggcttgtaccttctcatttggggtgaagctgcaaacttgcgttttatgccagagtgcatttgctacatatatcatcatatggcatttgaaatgtatggtatgttagctggaaatgtcagtgccttgacgggtgaatatgtgaagccggcctatggtggtgagaaagaagcctttctgaagaaagttgttacaccgatttaccataccatagcaaaggaagctgaaaggagcaaaagagagaaagggaatcattctgagtggagaaactatgatgatcttaatgagtacttctggtctgctgactgctttcggcttggttggcctatgcgagctgatgctgacttcttttgtcagcctgatgaaagaaatgaaagcacaaggatcagcaaacagaagggaaaggtcaacttcgttgagctacgctcattttggcacatattcagaagttttgacagactctggagcttctttattttagctcttcaggttatgataattctcgcttgggacggaggttcactagccagtatttttgattatgctgttttcaagaaggttttgagtatctttatcacttctgctatactaaatcttggacaagctacacttgatattatctttaattggaaggccagacgaacgatggaatttgcagttaagctgagatatgtnn

SEQ ID NO: 215368 - DNA, 2015 bp, Zea Mays
  misc_feature (2014)..(2015): n is a, c, g, or t
ctctctctctcctccctgcctgccaagtcccaacacaaaaccctctcgtcgtccccaacaccgcttcgcctcgaccgcgatgatcacctcccacgcgcggaggtagccgccgagcagctcgccgccgtccatccagaggctcccgccgagggtttcctcgacgcggctcttgcgcgtctaccgtacgtaagtacgttggtcgcgtggttttcactcgagttcctgcggattggtgcgcgcgctacccgtgtggccgtgtccccgactccacatgagcgagctttcccatgcgcgcgccaccaaaagctcggtgctggatttctgaatcttcaagcttgggctagctgcctagcttcaaaacggggcctctatttccgttggttggttgaattgcctgacgtgattcgtctcagcatcatcaaattgttgtaccgagtgacaaggtttagggtggtgactgcaagtcaccgagatgacgtccttgtcacgcacgctgtctcggggcgggccgatgcagtcgccaggggctcgccgcatccaaaggacgcagactgctgtgaattttggtgagcccatgtttgacagcgaggtggtgccgtcgtcgcttgttgagattgcgcccatcctccgtgttgccaatgaggttgagatggccaaccctcgtgtcgcttatctctgccggttctatgcattcgaaaaggctcacaggttagatccgacttcaagtggtcgtggtgtccgacagttcaagacagctcttctgcagcggcttgaaagggagaacgagcccaccttgatgggaaggggacaaaagagtgatgcacgggaaatacagaccttctatcatagctattacaagaaatatattcaagcactccagaatgcttctgaccaactggatcgtgctcaactaaccaaagcctaccagactgctgctattctgtttgaagttttaaaagcagttacacaacaacatgctgttgaagttgatcatgagatattggaagctgctgataaggttaaagagaaaacgaagatctatctcccttttaatattctccctcttgatccagacagtggcaatcaggcaatcatgaaatttcctgagacagatagtgtttcaaatcagagggaacatttgattttacttcttgctaacatacatatacgaagaaatccgaagactgatcaacaatccaagttggatgacaatgcactgaatgatgtgatgaaaagattgtttaagaattacaagaaatggtgcaaatatcttggtcgcaagagcagcctttggttgccaacaattcagcaggagatgcaacaacgaaaattactgtatatgggcttgtaccttctcatttggggtgaagctgcaaacttgcgttttatgccagagtgcatttgctacatatatcatcatatggcatttgaaatgtatggtatgttagctggaaatgtcagtgccttgacgggtgaatatgtgaagccggcctatggtggtgagaaagaagcctttctgaagaaagttgttacaccgatttaccataccatagcaaaggaagctgaaaggagcaaaagagagaaagggaatcattctgagtggagaaactatgatgatcttaatgagtacttctggtctgctgactgctttcggcttggttggcctatgcgagctgatgctgacttcttttgtcagcctgatgaaagaaatgaaagcacaaggatcagcaaacagaagggaaaggtcaacttcgttgagctacgctcattttggcacatattcagaagttttgacagactctggagcttctttattttagctcttcaggttatgataattctcgcttgggacggaggttcactagccagtatttttgattatgctgttttcaagaaggttttgagtatctttatcacttctgctatactaaatcttggacaagctacacttgatattatctttaattggaaggccagacgaacgatggaatttgcagttaagctgagatatgtnn

SEQ ID NO: 215369 - DNA, 2134 bp, Zea Mays
  misc_feature (2133)..(2134): n is a, c, g, or t
ctctctctctctcctccctgcctgccaagtcccaacacaaaaccctctcgtcgtccccaacaccgcttcgcctcgaccgcgatgatcacctcccacgcgcggaggtagccgccgagcagctcgccgccgtccatccagaggctcccgccgagggtttcctcgacgcggctcttgcgcgtctaccgtacgtaagtacgttggtcgcgtggttttcactcgagttcctgcggattggtgcgcgcgctacccgtgtggccgtgtccccgactccacatgagcgagctttcccatgcgcgcgccaccaaaagctcggtgctggatttctgaatcttcaagcttgggctagctgcctagcttcaaaacggggcctctatttccgttggttggttgaattgcctgacgtgattcgtctcagcatcatcaaattgttgtaccgagtgacaaggtttagggtggtgactgcaagtcaccgagatgacgtccttgtcacgcacgctgtctcggggcgggccgatgcagtcgccaggggctcgccgcatccaaaggacgcagactgctgtgaattttggtgagcccatgtttgacagcgaggtggtgccgtcgtcgcttgttgagattgcgcccatcctccgtgttgccaatgaggttgagatggccaaccctcgtgtcgcttatctctgccggttctatgcattcgaaaaggctcacaggttagatccgacttcaagtggtcgtggtgtccgacagttcaagacagctcttctgcagcggcttgaaagggagaacgagcccaccttgatgggaaggggacaaaagagtgatgcacgggaaatacagaccttctatcatagctattacaagaaatatattcaagcactccagaatgcttctgaccaactggatcgtgctcaactaaccaaagcctaccagactgctgctattctgtttgaagttttaaaagcagttacacaacaacatgctgttgaagttgatcatgagatattggaagctgctgataaggttaaagagaaaacgaagatctatctcccttttaatattctccctcttgatccagacagtggcaatcaggcaatcatgaaatttcctgagatccaagctgctgcttccgctcttcgcaatacaaggggtcttccatggcctaaaacttatgagcataaagttaacgaggacctcttggattggctgcaagctatgtttggctttcagacagatagtgtttcaaatcagagggaacatttgattttacttcttgctaacatacatatacgaagaaatccgaagactgatcaacaatccaagttggatgacaatgcactgaatgatgtgatgaaaagattgtttaagaattacaagaaatggtgcaaatatcttggtcgcaagagcagcctttggttgccaacaattcagcaggagatgcaacaacgaaaattactgtatatgggcttgtaccttctcatttggggtgaagctgcaaacttgcgttttatgccagagtgcatttgctacatatatcatcatatggcatttgaaatgtatggtatgttagctggaaatgtcagtgccttgacgggtgaatatgtgaagccggcctatggtggtgagaaagaagcctttctgaagaaagttgttacaccgatttaccataccatagcaaaggaagctgaaaggagcaaaagagagaaagggaatcattctgagtggagaaactatgatgatcttaatgagtacttctggtctgctgactgctttcggcttggttggcctatgcgagctgatgctgacttcttttgtcagcctgatgaaagaaatgaaagcacaaggatcagcaaacagaagggaaaggtcaacttcgttgagctacgctcattttggcacatattcagaagttttgacagactctggagcttctttattttagctcttcaggttatgataattctcgcttgggacggaggttcactagccagtatttttgattatgctgttttcaagaaggttttgagtatctttatcacttctgctatactaaatcttggacaagctacacttgatattatctttaattggaaggccagacgaacgatggaatttgcagttaagctgagatatgtnn

SEQ ID NO: 215370 - DNA, 2087 bp, Zea Mays
  misc_feature (2086)..(2087): n is a, c, g, or t
cagcagtaccccacatctctctctctctctcctccctgcctgccaagtcccaacacaaaaccctctcgtcgtccccaacaccgcttcgcctcgaccgcgatgatcacctcccacgcgcggaggtagccgccgagcagctcgccgccgtccatccagaggctcccgccgagggtttcctcgacgcggctcttgcgcgtctaccgtacctttcccatgcgcgcgccaccaaaagctcggtgctggatttctgaatcttcaagcttgggctagctgcctagcttcaaaacggggcctctatttccgttggttggttgaattgcctgacgtgattcgtctcagcatcatcaaattgttgtaccgagtgacaaggtttagggtggtgactgcaagtcaccgagatgacgtccttgtcacgcacgctgtctcggggcgggccgatgcagtcgccaggggctcgccgcatccaaaggacgcagactgctgtgaattttggtgagcccatgtttgacagcgaggtggtgccgtcgtcgcttgttgagattgcgcccatcctccgtgttgccaatgaggttgagatggccaaccctcgtgtcgcttatctctgccggttctatgcattcgaaaaggctcacaggttagatccgacttcaagtggtcgtggtgtccgacagttcaagacagctcttctgcagcggcttgaaagggagaacgagcccaccttgatgggaaggggacaaaagagtgatgcacgggaaatacagaccttctatcatagctattacaagaaatatattcaagcactccagaatgcttctgaccaactggatcgtgctcaactaaccaaagcctaccagactgctgctattctgtttgaagttttaaaagcagttacacaacaacatgctgttgaagttgatcatgagatattggaagctgctgataaggttaaagagaaaacgaagatctatctcccttttaatattctccctcttgatccagacagtggcaatcaggcaatcatgaaatttcctgagatccaagctgctgcttccgctcttcgcaatacaaggggtcttccatggcctaaaacttatgagcataaagttaacgaggacctcttggattggctgcaagctatgtttggctttcagacagatagtgtttcaaatcagagggaacatttgattttacttcttgctaacatacatatacgaagaaatccgaagactgatcaacaatccaaggttttcttctgtaaatattcaaccactagttggatgacaatgcactgaatgatgtgatgaaaagattgtttaagaattacaagaaatggtgcaaatatcttggtcgcaagagcagcctttggttgccaacaattcagcaggagatgcaacaacgaaaattactgtatatgggcttgtaccttctcatttggggtgaagctgcaaacttgcgttttatgccagagtgcatttgctacatatatcatcatatggcatttgaaatgtatggtatgttagctggaaatgtcagtgccttgacgggtgaatatgtgaagccggcctatggtggtgagaaagaagcctttctgaagaaagttgttacaccgatttaccataccatagcaaaggaagctgaaaggagcaaaagagagaaagggaatcattctgagtggagaaactatgatgatcttaatgagtacttctggtctgctgactgctttcggcttggttggcctatgcgagctgatgctgacttcttttgtcagcctgatgaaagaaatgaaagcacaaggatcagcaaacagaagggaaaggtcaacttcgttgagctacgctcattttggcacatattcagaagttttgacagactctggagcttctttattttagctcttcaggttatgataattctcgcttgggacggaggttcactagccagtatttttgattatgctgttttcaagaaggttttgagtatctttatcacttctgctatactaaatcttggacaagctacacttgatattatctttaattggaaggccagacgaacgatggaatttgcagttaagctgagatatgtnn

SEQ ID NO: 215371 - DNA, 928 bp, Zea Mays
gccgtcgcggtctcgcccgccccaccggacgttccgggtcgggggcgacgcgtaccaggtgccggcggggcggagggacggcaacgtctcctcggcgcaggaggcgggcgcgaacctgccgccgccgacggcgagcgcgagccagctgacgcaggcgttcggcgccaaggggctgagccaggccgagatggtggcgctgtcgggggcgcacacggtgggcgcggcgcgctgcagctccttcgcgccccgcctctactcgtacgggcccagcggcgcggggcaggacccgtccatggaccccgcgtacctggcggcgctggcgcagcagtgcccgccgcaggggaccggcgccgccgacccgcccctccccatggaccccgtcacgcccaccgccttcgacaccaactactacgccaacctggtcgccaggcgcggcctgctcgcctccgaccaggcgctgctcgccgacccggccaccgccgcgcaggtgctcgcctacaccaacagccccgccaccttccagaccgacttcgtcgccgccatgatcaagatgggtgccatacaggtgctcaccggcacagccggcaccgtccggaccaactgcagggtggctagctagctagctcatccatgagaatgtacctgtagactcatgtgcttaaaatcatacgacgaaactgtacgtacggcgtagagtggtgtggcggggtccaatgattcagattgtacgtacgtgtccatcgatccaactgtagttgtgtacgcagtacagtacgtgctagctacggatcagttgcttatatatagcttgtgcgtttttttacactttcttttgtccttttggtttataatttttattaagatatacaaatatttctcttcagattcggatcgaatacaaatattaaaaatggttcgttctttttca

SEQ ID NO: 215372 - DNA, 2511 bp, Zea Mays
aaggaagccggcctcttccaaaaatcgagcgtgtcgagattcgtgtccgcctgctgacgcgggcacgactcgccgccgccgcagtcgcaaagcggaagcgcggaccatcttctcccgggtcgaatctctccaccgtgtaacacacagccttgacggccggcccgccaccgcgagatgcctcggaagtcgcacaaggcgaggggcgcggccgcgcacgccgccgttggtctcacggccgggccgaggcctcccctgaaggccacggccccaaaccctagcgccgccgccgagcttccccaggtcgtcgttgccgaggcagagggcctcaaggtacctgacgccggggcgtccgccgccgctgacgccctggagcgcctccacgtcgcccctgctcccgacggtgatccgccgcctcccgagcccgtgcacgagcccgccgcgccgcctcagcccccgccggccgaggcgtcgtcttctgggaggtctgcggcgggcgggagttgggaggaggaggctgtaaggaagctgcgggagctggcggaggttagtcgggatgagacggagttgaccgaggaggaggtgcgcgccaatgatcagaggcaggaggacgagatctgtgccctcgaagcaatttttggagatgctgtagtgattttggacagaaagggaggccagcggtctttccaggttcttgtgcatattgaggttccagattatatagatgtatcaacaaagctcagttatggtgatggaacattaaattatgcggcaacacatgatgatgatgaccttttctacaagttcagagttgagcatttgcctccgatcctgctaacatgtctcctgcctacatcatacccaagtcaccgtcctccctttttcactatatccacatattggcttgataaaggcatgatttcaccattatgtcgcatgcttgacatgctttgggaagagcaacaagggatggaaatggtgaagataagcgtgcttgtccagattatgcttcaccagatgttataattccaaggatgatgagatacaatgacaataagcatcatgaagctttcttacatgctatccatgattgcatgatttgtttaagcgagtgtcctggtgttgatttcatcaaacttccgtgtcaccatttcttttgctggaaatgcatgcaaacttactgcaaaatgaatgtcaaggaaggaaatgtagtgaagttgctatgtcctgatacaaaatgtgaaggtgctgttcctccgaatgtattgaaaaggctgcttggagaggatgaatatgaacgttgggagggattattgcttcagaaaacccttgatgccatgaaagatgttgtctactgtccaagatgtcaaactgcttgcttggaggacgtaggtaatgaagcagtatgttcaagttgtttgttcagcttttgcactctctgtagaaatcgccgccatattggagagcaatgtatgtctccagaagagagacttatgatcttggagaaacgccaagaatctgggaatgtgcaaggagatcagatgaaagttctacaggaactacgcagcctgaaggaaattatgaaggattcaaaacagtgcccaaaatgcaggatggccatatctaagacagaaggatgcaataagatgcattgtgagaactgtggggagtacttctgctatcaatgcaaccgtgcgatcactggatatgagcatttcaggggttcgtgtgtgcttttccctcaagaggaattggacagatgggaaatgcaaatgaatcaaagggtcggacgccaaattgttgcacatgctcatgctgcaatacatgggcagaatggtcaagctcatccttgccctacatgtcggcaaccgtctccaaagatcggaaacaacaaccacctcttctgttgggcatgccagaagcatttttgtgccctgtgccataaggctgtccaaaagcccgcacagcattatggccccaaaggatgcaagcaacatacggcagatccctgaatgaggttttcccatatgtgcatcaacaccgtggtgccagtgcagtttcgaagtgttctgtgcaagtacagataaatacttgtcctgggacgtacttcactcctggattccattattgttattattttttttgctgcaagcatgttttgaagtttccgtcgtcgttgtacctacagtaacagttgtgcagtttacattcgggaacatgaacaggaactgttcattcattcgttcagtaccagatggattgttgagaatactcgggtgttgaagttgagaatactcgcgtattaaagatgcgattgaacacaagtccaaaaccgatagaaccttgtaaaattctaaaagggaagattatttgttgtactgttggattgatcttatgccaatacaaaggaagctgtcattgtttggttatatggtttcaaattttaacttggcgttcccgatggtcggacctgtggtttgagtgactgttgtcattggaatattgaatgttctt

SEQ ID NO: 215373 - DNA, 2205 bp, Zea Mays
gcatacatgtaacctaaccactcccatggactataaaaggatgatgtagagcagcatttaaggggatccccattcggttccactcaggttctattcagactttagtcttcaccaaacatcaaccaagtatgatcaattcgatccggtcaagataactacaattagagtcggtctggctttccacaatactctcatcttgtaggtggtcttggagtctcctggtgctagagtttgtactctttttgtatcatctacacacatcaatacatgatcagcaagagaacgtagggtattgcactcactgtggccttaacttctatgaaaattcatgtattagactcttaatgccatgacctcacagacatactctacggtgttaggactcgctccctgctcttctagttattgtttatctggtattcttagtaccctggtgtctttgctacgacactagtaattagtagaaataccaaaacaactggttttagattgaaatattagtttatgcatataaggtgtttgaggaaaagcatattcatataagcatggttagttagaactatgaattctaatgctttgtcatttttttattttaattattaaccagataccgggcatcatttagatgaagatgaacagattgcacaggctctgcaagaaaatattggtcataacctagctgaagacgaacagcttgcacgggctctgcaagaaagtatgaatgatggacctcctcgtcagcacattccagttgaagatgttaactcagaaagtactccagcaagcatcttgccctcaaatattttccgcacaagtggcttgagggtttgtgctggatgcagaagtccaattggccgcggtcggtttctcagttgtatggactctgtttggcatcccgagtgcttcaggtgttatgcttgtgatagaccaatatcagagtatgagtttgctgttcatgaaaaccatgcctaccacaggccctgctacaaggagcgtttccatcctaaatgtgatgtttgcagtagctttattcccacagataaaaatggcctcattgaataccgggcccatcctttttggatgcagaagtattgtccttcccatgaaaatgatggtacacctaggtgctgcagttgtgaacgaatggagccaaaggacagtcaatacataacattagatgatggccggagactctgcttggagtgtctgcatactgctattatggagaccaatgaatgccagccactgtacattgatattcaagaattttatgagggtatgaacatgaaagtagagcaacaagttcccttgcttttggttgagcgacaagctttaaatgaagccatggaagcagagaaatctgtgcaccaccttcctgaaacaagaggcctctgcctatctgaggagcagattgtcagaactatattgaaaggaccaattggaccaggcaacagaatcatagatatggtcacaggaccatacaaactcattagacggtgtgaagtgactgcaattcttatactgtacgggctgccaaggctgctaactggctcgattctggctcatgagatgatgcatgcttacctccgacttaaaggataccgaaccctgagtccagaggttgaagaaggcatctgtcaggttctagctcatctttggcttgagtcagaaatcacatcaggttctggtagcatgtcaaccacctcagatgcgtcatcgtcatcttcaacatcttcatcatcgaaaaagggcgcaaagacggaatttgaaaaaagactcggggagttcttcaagtaccaaattgaaacagattcttctgtcgcttatggagatgggtttcgagcaggcatgcgagccattgagcggtacggcttgagaagcacccttgatcatatcaagatgacggggtcttttccatgctgaagctggtttttttttacctcggcttggatatgggtatacatattttttttggagaacttttggttcaggttatacatacgaaaagccgaacttctgtgtcgagaagaggcataaggatttagctatactgtccattgcaggaaaaaaaactgtttcccttttcaattataaaatttcacagtgcagacatgaaggtatgtggtctttagcttggccaaccttgtggaatgctgtcacttgatgcaaaagaaatttcgaatacatatgctttgctgtgcttga

SEQ ID NO: 215374 - DNA, 2254 bp, Zea Mays
gctttgatcgcttcttttttctctccatcatttctccccgtttcgtctcgcttcttttctgtcgcctcccgtttcgtctatctccggccggcctttctgctgcaaggaaaccaatattgtttgctggatctttcaaaaagggaaaccgaattcccgagagcgagcagcagggaatctctgctgaatccgagctggaagtgtagtgatttcctgattggggacataaggtggggtttgtccctactccccagtgagctccacgcggtccctgctgttcttccagtcaaaattctgtacccttcggtgctggggtcaaggaactaggcgtgttgtcctgaactcttgattcctgcttcatggaaattgtatatgtttttctctgaattcaaaatcgtccctattctcccaaagctttctgagcgcaggaagaaggatattgtccctctccaaaactataaacatgggttggttgagtaaaatatttaaaggtccagtaaatagagtttcaagaggacactacaacgggaactcccatgaaggctattcagctcagcacactaaatcatatggtgtgcatggcaatgaggacgaagacatggatcatgctattgcattatccttatcagaggaagatcaaaggaagggaaagaccattgataccgggcatcatttagatgaagatgaacagattgcacaggctctgcaagaaaatattggtcataacctagctgaagacgaacagcttgcacgggctctgcaagaaagtatgaatgatggacctcctcgtcagcacattccagttgaagatgttaactcagaaagtactccagcaagcatcttgccctcaaatattttccgcacaagtggcttgagggtttgtgctggatgcagaagtccaattggccgcggtcggtttctcagttgtatggactctgtttggcatcccgagtgcttcaggtgttatgcttgtgatagaccaatatcagagtatgagtttgctgttcatgaaaaccatgcctaccacaggccctgctacaaggagcgtttccatcctaaatgtgatgtttgcagtagctttattcccacagataaaaatggcctcattgaataccgggcccatcctttttggatgcagaagtattgtccttcccatgaaaatgatggtacacctaggtgctgcagttgtgaacgaatggagccaaaggacagtcaatacataacattagatgatggccggagactctgcttggagtgtctgcatactgctattatggagaccaatgaatgccagccactgtacattgatattcaagaattttatgagggtatgaacatgaaagtagagcaacaagttcccttgcttttggttgagcgacaagctttaaatgaagccatggaagcagagaaatctgtgcaccaccttcctgaaacaagaggcctctgcctatctgaggagcagattgtcagaactatattgaaaggaccaattggaccaggcaacagaatcatagatatggtcacaggaccatacaaactcattagacggtgtgaagtgactgcaattcttatactgtacgggctgccaaggctgctaactggctcgattctggctcatgagatgatgcatgcttacctccgacttaaaggataccgaaccctgagtccagaggttgaagaaggcatctgtcaggttctagctcatctttggcttgagtcagaaatcacatcaggttctggtagcatgtcaaccacctcagatgcgtcatcgtcatcttcaacatcttcatcatcgaaaaagggcgcaaagacggaatttgaaaaaagactcggggagttcttcaagtaccaaattgaaacagattcttctgtcgcttatggagatgggtttcgagcaggcatgcgagccattgagcggtacggcttgagaagcacccttgatcatatcaagatgacggggtcttttccatgctgaagctggtttttttttacctcggcttggatatgggtatacatattttttttggagaacttttggttcaggttatacatacgaaaagccgaacttctgtgtcgagaagaggcataaggatttagctatactgtccattgcaggaaaaaaaactgtttcccttttcaattataaaatttcacagtgcagacatgaaggtatgtggtctttagcttggccaaccttgtggaatgctgtcacttgatgcaaaagaaatttcgaatacatatgctttgctgtgcttga

SEQ ID NO: 215375 - DNA, 2189 bp, Zea Mays
cacgctttgatcgcttcttttttctctccatcatttctccccgtttcgtctcgcttcttttctgtcgcctcccgtttcgtctatctccggccggcctttctgctgcaaggaaaccaatattgtttgctggatctttcaaaaagggaaaccgaattcccgagagcgagcagcagggaatctctgctgaatccgtaggctccgaattggagctggaagtgtagtgatttcctgattggggacataaggtggggtttgtccctactccccagtgagctccacgcggtccctgctgttcttccagtcaaaattctgtacccttcggtgctggggtcaaggaactaggcgtgttgtcctgcgcaggaagaaggatattgtccctctccaaaactataaacatgggttggttgagtaaaatatttaaaggtccagtaaatagagtttcaagaggacactacaacgggaactcccatgaaggctattcagctcagcacactaaatcatatggtgtgcatggcaatgaggacgaagacatggatcatgctattgcattatccttatcagaggaagatcaaaggaagggaaagaccattgataccgggcatcatttagatgaagatgaacagattgcacaggctctgcaagaaaatattggtcataacctagctgaagacgaacagcttgcacgggctctgcaagaaagtatgaatgatggacctcctcgtcagcacattccagttgaagatgttaactcagaaagtactccagcaagcatcttgccctcaaatattttccgcacaagtggcttgagggtttgtgctggatgcagaagtccaattggccgcggtcggtttctcagttgtatggactctgtttggcatcccgagtgcttcaggtgttatgcttgtgatagaccaatatcagagtatgagtttgctgttcatgaaaaccatgcctaccacaggccctgctacaaggagcgtttccatcctaaatgtgatgtttgcagtagctttattcccacagataaaaatggcctcattgaataccgggcccatcctttttggatgcagaagtattgtccttcccatgaaaatgatggtacacctaggtgctgcagttgtgaacgaatggagccaaaggacagtcaatacataacattagatgatggccggagactctgcttggagtgtctgcatactgctattatggagaccaatgaatgccagccactgtacattgatattcaagaattttatgagggtatgaacatgaaagtagagcaacaagttcccttgcttttggttgagcgacaagctttaaatgaagccatggaagcagagaaatctgtgcaccaccttcctgaaacaagaggcctctgcctatctgaggagcagattgtcagaactatattgaaaggaccaattggaccaggcaacagaatcatagatatggtcacaggaccatacaaactcattagacggtgtgaagtgactgcaattcttatactgtacgggctgccaaggctgctaactggctcgattctggctcatgagatgatgcatgcttacctccgacttaaaggataccgaaccctgagtccagaggttgaagaaggcatctgtcaggttctagctcatctttggcttgagtcagaaatcacatcaggttctggtagcatgtcaaccacctcagatgcgtcatcgtcatcttcaacatcttcatcatcgaaaaagggcgcaaagacggaatttgaaaaaagactcggggagttcttcaagtaccaaattgaaacagattcttctgtcgcttatggagatgggtttcgagcaggcatgcgagccattgagcggtacggcttgagaagcacccttgatcatatcaagatgacggggtcttttccatgctgaagctggtttttttttacctcggcttggatatgggtatacatattttttttggagaacttttggttcaggttatacatacgaaaagccgaacttctgtgtcgagaagaggcataaggatttagctatactgtccattgcaggaaaaaaaactgtttcccttttcaattataaaatttcacagtgcagacatgaaggtatgtggtctttagcttggccaaccttgtggaatgctgtcacttgatgcaaaagaaatttcgaatacatatgctttgctgtgcttga

SEQ ID NO: 215376 - DNA, 2267 bp, Zea Mays
cacgctttgatcgcttcttttttctctccatcatttctccccgtttcgtctcgcttcttttctgtcgcctcccgtttcgtctatctccggccggcctttctgctgcaaggaaaccaatattgtttgctggatctttcaaaaagggaaaccgaattcccgagagcgagcagcagggaatctctgctgaatccgtaggctccgaattggagctggaagtgtagtgatttcctgattggggacataaggtggggtttgtccctactccccagtgagctccacgcggtccctgctgttcttccagtcaaaattctgtacccttcggtgctggggtcaaggaactaggcgtgttgtcctgaactcttgattcctgcttcatggaaattgtatatgtttttctctgaattcaaaatcgtccctattctcccaaagctttctgaggaagaaggatattgtccctctccaaaactataaacatgggttggttgagtaaaatatttaaaggtccagtaaatagagtttcaagaggacactacaacgggaactcccatgaaggctattcagctcagcacactaaatcatatggtgtgcatggcaatgaggacgaagacatggatcatgctattgcattatccttatcagaggaagatcaaaggaagggaaagaccattgataccgggcatcatttagatgaagatgaacagattgcacaggctctgcaagaaaatattggtcataacctagctgaagacgaacagcttgcacgggctctgcaagaaagtatgaatgatggacctcctcgtcagcacattccagttgaagatgttaactcagaaagtactccagcaagcatcttgccctcaaatattttccgcacaagtggcttgagggtttgtgctggatgcagaagtccaattggccgcggtcggtttctcagttgtatggactctgtttggcatcccgagtgcttcaggtgttatgcttgtgatagaccaatatcagagtatgagtttgctgttcatgaaaaccatgcctaccacaggccctgctacaaggagcgtttccatcctaaatgtgatgtttgcagtagctttattcccacagataaaaatggcctcattgaataccgggcccatcctttttggatgcagaagtattgtccttcccatgaaaatgatggtacacctaggtgctgcagttgtgaacgaatggagccaaaggacagtcaatacataacattagatgatggccggagactctgcttggagtgtctgcatactgctattatggagaccaatgaatgccagccactgtacattgatattcaagaattttatgagggtatgaacatgaaagtagagcaacaagttcccttgcttttggttgagcgacaagctttaaatgaagccatggaagcagagaaatctgtgcaccaccttcctgaaacaagaggcctctgcctatctgaggagcagattgtcagaactatattgaaaggaccaattggaccaggcaacagaatcatagatatggtcacaggaccatacaaactcattagacggtgtgaagtgactgcaattcttatactgtacgggctgccaaggctgctaactggctcgattctggctcatgagatgatgcatgcttacctccgacttaaaggataccgaaccctgagtccagaggttgaagaaggcatctgtcaggttctagctcatctttggcttgagtcagaaatcacatcaggttctggtagcatgtcaaccacctcagatgcgtcatcgtcatcttcaacatcttcatcatcgaaaaagggcgcaaagacggaatttgaaaaaagactcggggagttcttcaagtaccaaattgaaacagattcttctgtcgcttatggagatgggtttcgagcaggcatgcgagccattgagcggtacggcttgagaagcacccttgatcatatcaagatgacggggtcttttccatgctgaagctggtttttttttacctcggcttggatatgggtatacatattttttttggagaacttttggttcaggttatacatacgaaaagccgaacttctgtgtcgagaagaggcataaggatttagctatactgtccattgcaggaaaaaaaactgtttcccttttcaattataaaatttcacagtgcagacatgaaggtatgtggtctttagcttggccaaccttgtggaatgctgtcacttgatgcaaaagaaatttcgaatacatatgctttgctgtgcttga

SEQ ID NO: 215377 - DNA, 2272 bp, Zea Mays
cacgctttgatcgcttcttttttctctccatcatttctccccgtttcgtctcgcttcttttctgtcgcctcccgtttcgtctatctccggccggcctttctgctgcaaggaaaccaatattgtttgctggatctttcaaaaagggaaaccgaattcccgagagcgagcagcagggaatctctgctgaatccgtaggctccgaattggagctggaagtgtagtgatttcctgattggggacataaggtggggtttgtccctactccccagtgagctccacgcggtccctgctgttcttccagtcaaaattctgtacccttcggtgctggggtcaaggaactaggcgtgttgtcctgaactcttgattcctgcttcatggaaattgtatatgtttttctctgaattcaaaatcgtccctattctcccaaagctttctgagcgcaggaagaaggatattgtccctctccaaaactataaacatgggttggttgagtaaaatatttaaaggtccagtaaatagagtttcaagaggacactacaacgggaactcccatgaaggctattcagctcagcacactaaatcatatggtgtgcatggcaatgaggacgaagacatggatcatgctattgcattatccttatcagaggaagatcaaaggaagggaaagaccattgataccgggcatcatttagatgaagatgaacagattgcacaggctctgcaagaaaatattggtcataacctagctgaagacgaacagcttgcacgggctctgcaagaaagtatgaatgatggacctcctcgtcagcacattccagttgaagatgttaactcagaaagtactccagcaagcatcttgccctcaaatattttccgcacaagtggcttgagggtttgtgctggatgcagaagtccaattggccgcggtcggtttctcagttgtatggactctgtttggcatcccgagtgcttcaggtgttatgcttgtgatagaccaatatcagagtatgagtttgctgttcatgaaaaccatgcctaccacaggccctgctacaaggagcgtttccatcctaaatgtgatgtttgcagtagctttattcccacagataaaaatggcctcattgaataccgggcccatcctttttggatgcagaagtattgtccttcccatgaaaatgatggtacacctaggtgctgcagttgtgaacgaatggagccaaaggacagtcaatacataacattagatgatggccggagactctgcttggagtgtctgcatactgctattatggagaccaatgaatgccagccactgtacattgatattcaagaattttatgagggtatgaacatgaaagtagagcaacaagttcccttgcttttggttgagcgacaagctttaaatgaagccatggaagcagagaaatctgtgcaccaccttcctgaaacaagaggcctctgcctatctgaggagcagattgtcagaactatattgaaaggaccaattggaccaggcaacagaatcatagatatggtcacaggaccatacaaactcattagacggtgtgaagtgactgcaattcttatactgtacgggctgccaaggctgctaactggctcgattctggctcatgagatgatgcatgcttacctccgacttaaaggataccgaaccctgagtccagaggttgaagaaggcatctgtcaggttctagctcatctttggcttgagtcagaaatcacatcaggttctggtagcatgtcaaccacctcagatgcgtcatcgtcatcttcaacatcttcatcatcgaaaaagggcgcaaagacggaatttgaaaaaagactcggggagttcttcaagtaccaaattgaaacagattcttctgtcgcttatggagatgggtttcgagcaggcatgcgagccattgagcggtacggcttgagaagcacccttgatcatatcaagatgacggggtcttttccatgctgaagctggtttttttttacctcggcttggatatgggtatacatattttttttggagaacttttggttcaggttatacatacgaaaagccgaacttctgtgtcgagaagaggcataaggatttagctatactgtccattgcaggaaaaaaaactgtttcccttttcaattataaaatttcacagtgcagacatgaaggtatgtggtctttagcttggccaaccttgtggaatgctgtcacttgatgcaaaagaaatttcgaatacatatgctttgctgtgcttga

SEQ ID NO: 215378 - DNA, 2214 bp, Zea Mays
cactattgcgctcacatgtgtggtttgtgatcggcgattttgacatgaaaaaagattagcaagagagtattcaatgtgatgaagagtgaattcttggccacatcaaagtcagatggggcaaccaaacaagaaaattatcctgcctttggccttggagatggtacagatactccaaaaatgttggagagaagcaatagcagcgtaccatttgaattatacaagaaccagactaccgttgttgtttcaagagaggagtttgtaagtgttgtatgtgatgccctctctttgtacaagtatgttggacccaaccagaaagctgacctgcttcttgcttgcagaattaaagagagaaaggaatcggtggcaatactcttgtgtgggacaagtggatgtggcaagtccactttatcatctttgctgggtagtaggttgggtatcacgacagtagtttctactgattccatacgacatatgatgagaagctttgcagatgaaaaacaaagtcctcttctctatgcatcaacctaccatgcagtggagacaaagatgtgacttcaggtgacaaatctcagcatggatcttcagaattacctcctagagctgaattgattggcaacaagcaaatggcagtagaaggctacaaggcgcaaagtgagatggtgatcgacagcctggacaggttaattacatcctgggaagagcagaaagaatctgtgattgttgaaggagtgcatctaagccttaactttgtgatgggattaatgaagaaacatccttccataataccatttatggtatacattacaaatgaggataaacacatggaacgatttgctgtacgtgcaaagtacatgactctagacccagcaaagaacagatacatcaaatacattcgaaatattagagctatccaggaatacctatgcaaccgagctgacaagcatcttgtgccgaagatcaacaataccaatgttgaccagagtgtggctgctatacatgcaacagtcttcagctgtcttcgcaggcgagcagccggggagcaactgtatgacctcaacacaaacactgttgctgtagtggatgaggaatacaggaaccagcgtgcagctaacaccttgggttctaagggcatgtttcagttgatccaaaggaaggggtcttcaaggaatctgatggcacttcttaacaccgacggttcagtcaccaaagcttggcatgtaagtgcaagtgatggcaatgggaatcttaatggtatcacaaacaacaagaagtctcctgaaaatcctatgctggatccctcacaaatcgggaaggcagaagccgtcaatctccagtttggtccttttgggatcagtgcctggatgagtgacacgggtggaaccagccatactgggagtgtggaagacctgaggcctgatagtgtggagactggtggtagaaattattcgtcgtgctgcagttcgccaaagatgtcagattccacctcgaaggagcttatggaggactactcagtctatggcagtgacgaagaagctgacgaccctcgtgatgctgaaactgatgatgacctaactgatgaagaaagagacatgcacgagatagatgcaggctctgtagacgagcactcaaccaagtcggatgaggaatacgaggacttagccatgcgtgatgtgatggagaatggtgactggtctgacgacgaccaagctgtgggcaaaaccaagaactcaccagccctggagagcatccatgggagtggggcagctgaagatgatggcataaagagccggtaccaccacaacctggacctgttcctgaaaatgtccaaggaggtagctggcaccagaatgccttgcgcgtcatagtgccaccagggtggagagaaggccggcgacacgctgctctggtcccagtgggtggtatgtttcttgggcacctgcttttgtgatgctgtgagcttgtgctgttgagtgtacaccggtggctgtggctttgtagcatgtacctgtccaaactacaaaatgctctcacctggttgtaaagagaggacctgatgctttgtcatatcatgtagtaggagtattatgtttgacaataatgtcctggccctgctgctgatgaagtcacctcacgtgaactatgtgccatatcatgcatgtcctttggttgatcaatgtttacaaagatgtgtcgtaagactgtcttcagcagttc

SEQ ID NO: 215379 - DNA, 2184 bp, Zea Mays
ccactattgcgctcacatgtgtggtttgtgatcggcgattttgacatgaaaaaagattagcaagagagtattcaatgtgatgaagagtgaattcttggccacatcaaagtcagatggggcaaccaaacaagaaaattatcctgcctttggccttggagatggtacagatactccaaaaatgttggagagaagcaatagcagcgtaccatttgaattatacaagaaccagactaccgttgttgtttcaagagaggagtttgtaagtgttgtatgtgatgccctctctttgtacaagtatgttggacccaaccagaaagctgacctgcttcttgcttgcagaattaaagagagaaaggaatcggtggcaatactcttgtgtgggacaagtggatgtggcaagtccactttatcatctttgctggtgaatatttggatcctattgcagttgctcaggcaaaggcaaagcgcaatgcaaataaacccacagttgtttctcatccaaataccagtggagacaaagatgtgacttcaggtgacaaatctcagcatggatcttcagaattacctcctagagctgaattgattggcaacaagcaaatggcagtagaaggctacaaggcgcaaagtgagatggtgatcgacagcctggacaggttaattacatcctgggaagagcagaaagaatctgtgattgttgaaggagtgcatctaagccttaactttgtgatgggattaatgaagaaacatccttccataataccatttatggtatacattacaaatgaggataaacacatggaacgatttgctgtacgtgcaaagtacatgactctagacccagcaaagaacagatacatcaaatacattcgaaatattagagctatccaggaatacctatgcaaccgagctgacaagcatcttgtgccgaagatcaacaataccaatgttgaccagagtgtggctgctatacatgcaacagtcttcagctgtcttcgcaggcgagcagccggggagcaactgtatgacctcaacacaaacactgttgctgtagtggatgaggaatacaggaaccagcgtgcagctaacaccttgggttctaagggcatgtttcagttgatccaaaggaaggggtcttcaaggaatctgatggcacttcttaacaccgacggttcagtcaccaaagcttggcatgtaagtgcaagtgatggcaatgggaatcttaatggtatcacaaacaacaagaagtctcctgaaaatcctatgctggatccctcacaaatcgggaaggcagaagccgtcaatctccagtttggtccttttgggatcagtgcctggatgagtgacacgggtggaaccagccatactgggagtgtggaagacctgaggcctgatagtgtggagactggtggtagaaattattcgtcgtgctgcagttcgccaaagatgtcagattccacctcgaaggagcttatggaggactactcagtctatggcagtgacgaagaagctgacgaccctcgtgatgctgaaactgatgatgacctaactgatgaagaaagagacatgcacgagatgcaggctctgtagacgagcactcaaccaagtcggatgaggaatacgaggacttagccatgcgtgatgtgatggagaatggtgactggtctgacgacgaccaagctgtgggcaaaaccaagaactcaccagccctggagagcatccatgggagtggggcagctgaagatgatggcataaagagccggtaccaccacaacctggacctgttcctgaaaatgtccaaggaggtagctggcaccagaatgccttgcgcgtcatagtgccaccagggtggagagaaggccggcgacacgctgctctggtcccagtgggtggtatgtttcttgggcacctgcttttgtgatgctgtgagcttgtgctgttgagtgtacaccggtggctgtggctttgtagcatgtacctgtccaaactacaaaatgctctcacctggttgtaaagagaggacctgatgctttgtcatatcatgtagtaggagtattatgtttgacaataatgtcctggccctgctgctgatgaagtcacctcacgtgaactatgtgccatatcatgcatgtcctttggttgatcaatgtttacaaagatgtgtcgtaagactgtcttcagcagttc

SEQ ID NO: 215380 - DNA, 2697 bp, Zea Mays
gcgtggcagaaccgccattgaagcgggaagaaattcgaagaaccctcgaaatcaggagaaggaaacaaatcatcctcccatcccgagaagagatggcaacaccaacagccaacagaaggtggggggaaggggacaccgaggcgggcaacgggagcaggtcgggtgggcggtggggggaggaaacgaacaaggccgcgcggtgcgcgggccgccatgtggacgccatgcgcggacgcggcgtggacgtcgtgacgacgcgacacccgccgctcctcccggcccgcaccgccatggccccgccgccgccgcaatgcgcctcaaaacgtccctccgcgcctgcccccgccctccaggtaggggacatggcggaggaggcgtcgccgtcgccgtcgccgcccaagttgctctacattgccatcgccgacggcggggtccgccgggcgttccggtacacgcgccccgtgctgcagagcaccctgcatctcatgggatgcaagcctcgccatgccttcaagattagcaagagagtattcaatgtgatgaagagtgaattcttggccacatcaaagtcagatggggcaaccaaacaagaaaattatcctgcctttggccttggagatggtacagatactccaaaaatgttggagagaagcaatagcagcgtaccatttgaattatacaagaaccagactaccgttgttgtttcaagagaggagtttgtaagtgttgtatgtgatgccctctctttgtacaagtatgttggacccaaccagaaagctgacctgcttcttgcttgcagaattaaagagagaaaggaatcggtggcaatactcttgtgtgggacaagtggatgtggcaagtccactttatcatctttgctgggtagtaggttgggtatcacgacagtagtttctactgattccatacgacatatgatgagaagctttgcagatgaaaaacaaagtcctcttctctatgcatcaacctaccatgcagttgtttctcatccaaataccagtggagacaaagatgtgacttcaggtgacaaatctcagcatggatcttcagaattacctcctagagctgaattgattggcaacaagcaaatggcagtagaaggctacaaggcgcaaagtgagatggtgatcgacagcctggacaggttaattacatcctgggaagagcagaaagaatctgtgattgttgaaggagtgcatctaagccttaactttgtgatgggattaatgaagaaacatccttccataataccatttatggtatacattacaaatgaggataaacacatggaacgatttgctgtacgtgcaaagtacatgactctagacccagcaaagaacagatacatcaaatacattcgaaatattagagctatccaggaatacctatgcaaccgagctgacaagcatcttgtgccgaagatcaacaataccaatgttgaccagagtgtggctgctatacatgcaacagtcttcagctgtcttcgcaggcgagcagccggggagcaactgtatgacctcaacacaaacactgttgctgtagtggatgaggaatacaggaaccagcgtgcagctaacaccttgggttctaagggcatgtttcagttgatccaaaggaaggggtcttcaaggaatctgatggcacttcttaacaccgacggttcagtcaccaaagcttggcatgtaagtgcaagtgatggcaatgggaatcttaatggtatcacaaacaacaagaagtctcctgaaaatcctatgctggatccctcacaaatcgggaaggcagaagccgtcaatctccagtttggtccttttgggatcagtgcctggatgagtgacacgggtggaaccagccatactgggagtgtggaagacctgaggcctgatagtgtggagactggtggtagaaattattcgtcgtgctgcagttcgccaaagatgtcagattccacctcgaaggagcttatggaggactactcagtctatggcagtgacgaagaagctgacgaccctcgtgatgctgaaactgatgatgacctaactgatgaagaaagagacatgcacgagatagatgcaggctctgtagacgagcactcaaccaagtcggatgaggaatacgaggacttagccatgcgtgatgtgatggagaatggtgactggtctgacgacgaccaagctgtgggcaaaaccaagaactcaccagccctggagagcatccatgggagtggggcagctgaagatgatggcataaagagccggtaccaccacaacctggacctgttcctgaaaatgtccaaggaggtagctggcaccagaatgccttgcgcgtcatagtgccaccagggtggagagaaggccggcgacacgctgctctggtcccagtgggtggtatgtttcttgggcacctgcttttgtgatgctgtgagcttgtgctgttgagtgtacaccggtggctgtggctttgtagcatgtacctgtccaaactacaaaatgctctcacctggttgtaaagagaggacctgatgctttgtcatatcatgtagtaggagtattatgtttgacaataatgtcctggccctgctgctgatgaagtcacctcacgtgaactatgtgccatatcatgcatgtcctttggttgatcaatgtttacaaagatgtgtcgtaagactgtcttcagcagttc

SEQ ID NO: 215381 - DNA, 2552 bp, Zea Mays
caaagatctgtcacgcacgcatagcatggcgtggcagaaccgccattgaagcgggaagaaattcgaagaaccctcgaaatcaggagaaggaaacaaatcatcctcccatcccgagaagagatggcaacaccaacagccaacagaaggtaggggacatggcggaggaggcgtcgccgtcgccgtcgccgcccaagttgctctacattgccatcgccgacggcggggtccgccgggcgttccggtacacgcgccccgtgctgcagagcaccctgcatctcatgggatgcaagcctcgccatgccttcaagattagcaagagagtattcaatgtgatgaagagtgaattcttggccacatcaaagtcagatggggcaaccaaacaagaaaattatcctgcctttggccttggagatggtacagatactccaaaaatgttggagagaagcaatagcagcgtaccatttgaattatacaagaaccagactaccgttgttgtttcaagagaggagtttgtaagtgttgtatgtgatgccctctctttgtacaagtatgttggacccaaccagaaagctgacctgcttcttgcttgcagaattaaagagagaaaggaatcggtggcaatactcttgtgtgggacaagtggatgtggcaagtccactttatcatctttgctgggtagtaggttgggtatcacgacagtagtttctactgattccatacgacatatgatgagaagctttgcagatgaaaaacaaagtcctcttctctatgcatcaacctaccatgcaggtgaatatttggatcctattgcagttgctcaggcaaaggcaaagcgcaatgcaaataaacccacagttgtttctcatccaaataccagtggagacaaagatgtgacttcaggtgacaaatctcagcatggatcttcagaattacctcctagagctgaattgattggcaacaagcaaatggcagtagaaggctacaaggcgcaaagtgagatggtgatcgacagcctggacaggttaattacatcctgggaagagcagaaagaatctgtgattgttgaaggagtgcatctaagccttaactttgtgatgggattaatgaagaaacatccttccataataccatttatggtatacattacaaatgaggataaacacatggaacgatttgctgtacgtgcaaagtacatgactctagacccagcaaagaacagatacatcaaatacattcgaaatattagagctatccaggaatacctatgcaaccgagctgacaagcatcttgtgccgaagatcaacaataccaatgttgaccagagtgtggctgctatacatgcaacagtcttcagctgtcttcgcaggcgagcagccggggagcaactgtatgacctcaacacaaacactgttgctgtagtggatgaggaatacaggaaccagcgtgcagctaacaccttgggttctaagggcatgtttcagttgatccaaaggaaggggtcttcaaggaatctgatggcacttcttaacaccgacggttcagtcaccaaagcttggcatgtaagtgcaagtgatggcaatgggaatcttaatggtatcacaaacaacaagaagtctcctgaaaatcctatgctggatccctcacaaatcgggaaggcagaagccgtcaatctccagtttggtccttttgggatcagtgcctggatgagtgacacgggtggaaccagccatactgggagtgtggaagacctgaggcctgatagtgtggagactggtggtagaaattattcgtcgtgctgcagttcgccaaagatgtcagattccacctcgaaggagcttatggaggactactcagtctatggcagtgacgaagaagctgacgaccctcgtgatgctgaaactgatgatgacctaactgatgaagaaagagacatgcacgagatgcaggctctgtagacgagcactcaaccaagtcggatgaggaatacgaggacttagccatgcgtgatgtgatggagaatggtgactggtctgacgacgaccaagctgtgggcaaaaccaagaactcaccagccctggagagcatccatgggagtggggcagctgaagatgatggcataaagagccggtaccaccacaacctggacctgttcctgaaaatgtccaaggaggtagctggcaccagaatgccttgcgcgtcatagtgccaccagggtggagagaaggccggcgacacgctgctctggtcccagtgggtggtatgtttcttgggcacctgcttttgtgatgctgtgagcttgtgctgttgagtgtacaccggtggctgtggctttgtagcatgtacctgtccaaactacaaaatgctctcacctggttgtaaagagaggacctgatgctttgtcatatcatgtagtaggagtattatgtttgacaataatgtcctggccctgctgctgatgaagtcacctcacgtgaactatgtgccatatcatgcatgtcctttggttgatcaatgtttacaaagatgtgtcgtaagactgtcttcagcagttc

SEQ ID NO: 215382 - DNA, 2248 bp, Zea Mays
actaacgacacgagtagtactgatcagggtcagggaccgtccgtagtttcagtcccgctcccgcagtctggttcgtcttctcttctccccacctgtctccacaattccccataggaggagggggaggtagagaagcgcgaatggagagcaggaacgtagtggtgtgcgacaatggtaccgggtatgtgaagtgtggctttgctggtgagaacttccctacatctgtgttcccttgtgttgtcggacgaccgctacttcgctatgaggagtcacttcaggaacaagaattgacggatattgttgttggagcagcttgtgctgacttgagacatcaacttgatgtatcatatcctgttaccaatggcattgttcaaaattgggatgacatgggccatatctgggatcatgccttctacagtgagctcaaggttgatccatctgagtgtaaaatcctactgacagatccaccactcaatcccgtgaaaaaccgagaaaaaatgatcgagacaatgttcgagaaatataactttgctggggtcttcatccagatccaagcagttctttcactgtatgctcaaggcttgctaactggacttgtgatagattctggtgatggtgttactcatgtggtgcctgtagttgatggatactcttatccacatctgacaaagagaatgaatgtagctggaaggcatataacatcttatcttgttgacctactctcaaggagagggtatgctatgaataaatctgctgactttgagactgtcagagaaataaaagagaagctatgttatataagttatgattacaaacgagaataccagctaggacttgagaccacaatccttgtgaaaagttacactcttccagatggaagagttattaaagtaggcactgaacgatttcaagctcctgaagctcttttcactcctgaactgatagatgttgaaggtgatgggatggcggatatggcattccgttgcattcaggaaatggatattgacaacaggatgacgctctatcaacatattgtcttaagtggaggaagtaccatgtaccctggtctgccaagtcgttttgaagggaaacaaagatggcctaaagaaattacggctgaggatagaggatcctcctcggagaaagcacatggtgtatctgggaggtgcagtgcttgctgggatcatgaaggatgcacctgagttctggataaccaggcaggagtaccaggaagaaggtgtagcgtgcctaaggaagtgcgggcagtcataagtcttgccacatatcatccacagaagaaatggaggttgcatgtgtaaagaagagctctgttgttggtgttgtgtattgtagtgagctatagctgtcctgaacatgcttggggataaaccatgtttgtattggcctactcaatttgacctctgttattgatcatcctttttagatatggaacatgacggccacctttatttgtattttttttggttgccccgattgattccacgaacctgattgacggagtctattaggtggtcccaaatcagaaatttggcactgtgctgtagaatcacaagttttaaactgtgtgtgcaacaggagaagtggaggatctgatttggtaaatatatatttacttcatctgatctgatggtgaagcctttggtgcaggtttagattgctccgacaggtttctttatcatggtatgcaccgcataaaaaaagaagtcagaaaattcatttgtggtaatatggccctctttaagaatcttgagcaacagtaggtagtcatgggaatctcatcctctctttggatcagttgactggttctgtcattcagaataaccaatcaatcttgtcttgaaccatatactactatatattatatattctattctcgcaagcagcggaggcgtgcaaatatgcaatgcacgtcgttttcgaggaaccgattccagcaagcatgcatttggagaccttgcacagccacacgacggcggaaattccccatctccaggagagctgcagcttgtgtgatcgtggaagacgtactagctagctcgtgcccgccacaagcctgcacgcaatgtaacagtaagtacaacttggtgagtgggagaaccgtagatttttttatattctattctattctatcaggatacgtatagctatctacgactacgactacgatacccccaataacaataattcaagttccatgtcgtcgtctttctttccttttttatatata

SEQ ID NO: 215383 - DNA, 1502 bp, Zea Mays
actaacgacacgagtagtactgatcagggtcagggaccgtccgtagtttcagtcccgctcccgcagtctggttcgtcttctcttctccccacctgtctccacaattccccataggaggagggggaggtagagaagcgcgaatggagagcaggaacgtagtggtgtgcgacaatggtaccgggtatgtgaagtgtggctttgctggtgagaacttccctacatctgtgttcccttgtgttgtcggacgaccgctacttcgctatgaggagtcacttcaggaacaagaattgacggatattgttgttggagcagcttgtgctgacttgagacatcaacttgatgtatcatatcctgttaccaatggcattgttcaaaattgggatgacatgggccatatctgggatcatgccttctacagtgagctcaaggttgatccatctgagtgtaaaatcctactgacagatccaccactcaatcccgtgaaaaaccgagaaaaaatgatcgagacaatgttcgagaaatataactttgctggggtcttcatccagatccaagcagttctttcactgtatgctcaaggcttgctaactggacttgtgatagattctggtgatggtgttactcatgtggtgcctgtagttgatggatactcttatccacatctgacaaagagaatgaatgtagctggaaggcatataacatcttatcttgttgacctactctcaaggagagggtatgctatgaataaatctgctgactttgagactgtcagagaaataaaagagaagctatgttatataagttatgattacaaacgagaataccagctaggacttgagaccacaatccttgtgaaaagttacactatggaagagttattaaagtaggcactgaacgatttcaagctcctgaagctcttttcactcctgaactgatagatgttgaaggtgatgggatggcggatatggcattccgttgcattcaggaaatggatattgacaacaggatgacgctctatcaacatattgtcttaagtggaggaagtaccatgtaccctggtctgccaagtcggttggagaaagaaattcttgaccgttatcttgatgtagttttgaagggaaacaaagatggcctaaagaaattacggctgaggatagaggatcctcctcggagaaagcacatggtgtatctgggaggtgcagtgcttgctgggatcatgaaggatgcacctgagttctggataaccaggcaggagtaccaggaagaaggtgtagcgtgcctaaggaagtgcgggcagtcataagtcttgccacatatcatccacagaagaaatggaggttgcatgtgtaaagaagagctctgttgttggtgttgtgtattgtagtgagctatagctgtcctgaacatgcttggggataaaccatgtttgtattggcctactcaatttgacctctgttattgatcatcctttttagatatggaacatgacggccacctttatt

SEQ ID NO: 215384 - DNA, 1229 bp, Zea Mays
actaacgacacgagtagtactgatcagggtcagggaccgtccgtagtttcagtcccgctcccgcagtctggttcgtcttctcttctccccacctgtctccacaattccccataggaggagggggaggtagagaagcgcgaatggagagcaggaacgtagtggtgtgcgacaatggtaccgggtatgtgaagtgtggctttgctggtgagaacttccctacatctgtgttcccttgtgttgtcggacgaccgctacttcgctatgaggagtcacttcaggaacaagaattgacggatattgttgttggagcagcttgtgctgacttgagacatcaacttgatgtatcatatcctgttaccaatggcattgttcaaaattgggatgacatgggccatatctgggatcatgccttctacagtgagctcaaggtgcctgtagttgatggatactcttatccacatctgacaaagagaatgaatgtagctggaaggcatataacatcttatcttgttgacctactctcaaggagagggtatgctatgaataaatctgctgactttgagactgtcagagaaataaaagagaagctatgttatataagttatgattacaaacgagaataccagctaggacttgagaccacaatccttgtgaaaagttacactatgttgaaggtgatgggatggcggatatggcattccgttgcattcaggaaatggatattgacaacaggatgacgctctatcaacatattgtcttaagtggaggaagtaccatgtaccctggtctgccaagtcggttggagaaagaaattcttgaccgttatcttgatgtagttttgaagggaaacaaagatggcctaaagaaattacggctgaggatagaggatcctcctcggagaaagcacatggtgtatctgggaggtgcagtgcttgctgggatcatgaaggatgcacctgagttctggataaccaggcaggagtaccaggaagaaggtgtagcgtgcctaaggaagtgcgggcagtcataagtcttgccacatatcatccacagaagaaatggaggttgcatgtgtaaagaagagctctgttgttggtgttgtgtattgtagtgagctatagctgtcctgaacatgcttggggataaaccatgtttgtattggcctactcaatttgacctctgttattgatcatcctttttagatatggaacatgacggccacctttatt

SEQ ID NO: 215385 - DNA, 1447 bp, Zea Mays
actaacgacacgagtagtactgatcagggtcagggaccgtccgtagtttcagtcccgctcccgcagtctggttcgtcttctcttctccccacctgtctccacaattccccataggaggagggggaggtagagaagcgcgaatggagagcaggaacgtagtggtgtgcgacaatggtaccgggtatgtgaagtgtggctttgctggtgagaacttccctacatctgtgttcccttgtgttgtcggacgaccgctacttcgctatgaggagtcacttcaggaacaagaattgacggatattgttgttggagcagcttgtgctgacttgagacatcaacttgatgtatcatatcctgttaccaatggcattgttcaaaattgggatgacatgggccatatctgggatcatgccttctacagtgagctcaaggtatatctatattgctggttgatccatctgagtgtaaaatcctactgacagatccaccactcaatcccgtgaaaaaccgagaaaaaatgatcgagacaatgttcgagaaatataactttgctggggtcttcatccagatccaagcagttctttcactgtatgctcaaggcttgctaactggacttgtgatagattctggtgatggtgttactcatgtggtgcctgtagttgatggatactcttatccacatctgacaaagagaatgaatgtagctggaaggcatataacatcttatcttgttgacctactctcaaggagagggtatgctatgaataaatctgctgactttgagactgtcagagaaataaaagagaagctatgttatataagttatgattacaaacgagaataccagctaggacttgagaccacaatccttgtgaaaagttacactatgttgaaggtgatgggatggcggatatggcattccgttgcattcaggaaatggatattgacaacaggatgacgctctatcaacatattgtcttaagtggaggaagtaccatgtaccctggtctgccaagtcggttggagaaagaaattcttgaccgttatcttgatgtagttttgaagggaaacaaagatggcctaaagaaattacggctgaggatagaggatcctcctcggagaaagcacatggtgtatctgggaggtgcagtgcttgctgggatcatgaaggatgcacctgagttctggataaccaggcaggagtaccaggaagaaggtgtagcgtgcctaaggaagtgcgggcagtcataagtcttgccacatatcatccacagaagaaatggaggttgcatgtgtaaagaagagctctgttgttggtgttgtgtattgtagtgagctatagctgtcctgaacatgcttggggataaaccatgtttgtattggcctactcaatttgacctctgttattgatcatcctttttagatatggaacatgacggccacctttatt

SEQ ID NO: 215386 - DNA, 1498 bp, Zea Mays
actaacgacacgagtagtactgatcagggtcagggaccgtccgtagtttcagtcccgctcccgcagtctggttcgtcttctcttctccccacctgtctccacaattccccataggaggagggggaggtagagaagcgcgaatggagagcaggaacgtagtggtgtgcgacaatggtaccgggtatgtgaagtgtggctttgctggtgagaacttccctacatctgtgttcccttgtgttgtcggacgaccgctacttcgctatgaggagtcacttcaggaacaagaattgacggatattgttgttggagcagcttgtgctgacttgagacatcaacttgatgtatcatatcctgttaccaatggcattgttcaaaattgggatgacatgggccatatctgggatcatgccttctacagtgagctcaaggttgatccatctgagtgtaaaatcctactgacagatccaccactcaatcccgtgaaaaaccgagaaaaaatgatcgagacaatgttcgagaaatataactttgctggggtcttcatccagatccaagcagttctttcactgcttgctaactggacttgtgatagattctggtgatggtgttactcatgtggtgcctgtagttgatggatactcttatccacatctgacaaagagaatgaatgtagctggaaggcatataacatcttatcttgttgacctactctcaaggagagggtatgctatgaataaatctgctgactttgagactgtcagagaaataaaagagaagctatgttatataagttatgattacaaacgagaataccagctaggacttgagaccacaatccttgtgaaaagttacactcttccagatggaagagttattaaagtaggcactgaacgatttcaagctcctgaagctcttttcactcctgaactgatagatgttgaaggtgatgggatggcggatatggcattccgttgcattcaggaaatggatattgacaacaggatgacgctctatcaacatattgtcttaagtggaggaagtaccatgtaccctggtctgccaagtcggttggagaaagaaattcttgaccgttatcttgatgtagttttgaagggaaacaaagatggcctaaagaaattacggctgaggatagaggatcctcctcggagaaagcacatggtgtatctgggaggtgcagtgcttgctgggatcatgaaggatgcacctgagttctggataaccaggcaggagtaccaggaagaaggtgtagcgtgcctaaggaagtgcgggcagtcataagtcttgccacatatcatccacagaagaaatggaggttgcatgtgtaaagaagagctctgttgttggtgttgtgtattgtagtgagctatagctgtcctgaacatgcttggggataaaccatgtttgtattggcctactcaatttgacctctgttattgatcatcctttttagatatggaacatgacggccacctttatt

SEQ ID NO: 215387 - DNA, 2034 bp, Zea Mays
cttctcccccttcccacaccacctccctcccaaatcagcccgtggcccaaatttactcggacttcacctctcccaatcctcctccatctccttcttaaattccacttcttcgatttgatccccacccgtcgccgctcttttttttctgcttatttttttttctgagccgaccagaaagaccagaaactcgagtttgttggctcctgatccaaactattctaatcgcacgaaagaggctgcaaatattgaattttgagtttctttgggagtggtttagtggataaatcggggaaaccataggggaattcctgaccgaaagtggtggaaagtttagtttggtgatggaggaggagaagcagcagatggagccgccggcgccggcgctggtgcgggaagcgggagccgagccaagggcgccacgacaaacgcaacagcagccgaatacggcggtccaggtgcagccttctatgccggtgctgaggccatggccaatggaaatcacgctttctatgaagcctgtggttgaaatgaagagtggcaccccagcaaagaagaagaagcactgtaattgcaaaaactcacaatgtttaaagctgtattgtgagtgttttgcagcaggtgattactgtgacggttgcaattgtaaacaatgtggaaacactgttgagaacgaaaagggtaggcaggaggctattaacaacacaaagctaagaaatccaaacgcctttcaacctaagattgaaaatggtccaattccttctagtgtttggaaggatgctggagcactaccttcacatccaaagcataataaaggttgtcactgcaagaagtcaggttgtctaaagaaatactgtgaatgttttcaagcgaatatcctttgctccaagaattgtaaatgtatggattgcaagaactatgaagggagtgaggagctacgtagtacaactcaaggggataattcatgtgatcgaaataacattcaacaagcagctaatgttgctctgaatggtgccattggatcttcagggtatagattttctccagtacgtagaaaaaggcccccagaagatccccactgtcagacattaaatgttgaaggaagtatgatgcagacacagtttcgagagacaaacaatgtggatgtttcccaaatgacctcatctactggacgtgatggttccactgtaaatttccagggtacatctaaactggtatataggtctccactagcaaatactatccatattactgatgtcaacgacctagccaaccatttggtgattgcatgcagaaaggcagcagagaggttcactacaatagttgataacaaagtggagatggaaatagataaggaaatttgcacaaatactgaccaaaagtttgatgagaacaagaaaggagtccagaaagctgcacttagtcaacttggcaaagtgactgatatagatcaacaaattgttgatgactccagattgcattgctctgatacccaagacgatgctagacctgcctctccaggaacacaagcgctgttgtgtgatgagcaggatctcacatttggtacagttcatagaagttcaattccagtagcaatgcatgatcaggtcatttcagagctacacgctgcacaagaaagtgcagtgttgaaggagttaagaaacaacctccggctaattatcgcacgtggaaaactaaatgaaggaaaatccgcatcagggacacggatggaattggatgctctaaggcatcatgaatcaagcaccagtttagccccagtacgagctgaagagaaatccaacactacagatggccctgaaataacacacgaactaaaatagatttagctcagtttggatttttcatgtcaagataagatatgtattgtaccatagccaatctctgtgtacatacggatagtatagtccttgttgctagaaaaggcaaccggcaatgtagcattaatcattcacgaggtgtaaagtaggaaacagatcacgtatttattttttttatcaataatgagttttaattgag

SEQ ID NO: 215388 - DNA, 1952 bp, Zea Mays
ccaaatcagcccgtggcccaaatttactcggacttcacctctcccaatcctcctccatctccttcttaaattccacttcttcgatttgatccccacccgtcgccgctcttttttttctgcttatttttttttctgagccgaccagaaagaccagaaactcgagtttgttggctcctgatccaaactattctaatcgcacgaaagaggctgcaaatattgaattttgagtttctttgggagtggtttagtggataaatcggggaaaccataggggaattcctgaccgaaagtggtggaaagtttagtttggtgatggaggaggagaagcagcagatggagccgccggcgccggcgctggtgcgggaagcgggagccgagccaagggcgccacgacaaacgcaacagcagccgaatacggcggtccaggaagcctgtggttgaaatgaagagtggcaccccagcaaagaagaagaagcactgtaattgcaaaaactcacaatgtttaaagctgtattgtgagtgttttgcagcaggtgattactgtgacggttgcaattgtaaacaatgtggaaacactgttgagaacgaaaagggtaggcaggaggctattaacaacacaaagctaagaaatccaaacgcctttcaacctaagattgaaaatggtccaattccttctagtgtttggaaggatgctggagcactaccttcacatccaaagcataataaaggttgtcactgcaagaagtcaggttgtctaaagaaatactgtgaatgttttcaagcgaatatcctttgctccaagaattgtaaatgtatggattgcaagaactatgaagggagtgaggagctacgtagtacaactcaaggggataattcatgtgatcgaaataacattcaacaagcagctaatgttgctctgaatggtgccattggatcttcagggtatagattttctccagtacgtagaaaaaggcccccagaagatccccactgtcagacattaaatgttgaaggaagtatgatgcagacacagtttcgagagacaaacaatgtggatgtttcccaaatgacctcatctactggacgtgatggttccactgtaaatttccagggtacatctaaactggtatataggtctccactagcaaatactatccatattactgatgtcaacgacctagccaaccatttggtgattgcatgcagaaaggcagcagagaggttcactacaatagttgataacaaagtggagatggaaatagataaggaaatttgcacaaatactgaccaaaagtttgatgagaacaagaaaggagtccagaaagctgcacttagtcaacttggcaaagtgactgatatagatcaacaaattgttgatgactccagattgcattgctctgatacccaagacgatgctagacctgcctctccaggaacacaagcgctgttgtgtgatgagcaggatctcacatttggtacagttcatagaagttcaattccagtagcaatgcatgatcaggtcatttcagagctacacgctgcacaagaaagtgcagtgttgaaggagttaagaaacaacctccggctaattatcgcacgtggaaaactaaatgcagaaggaaaatccgcatcagggacacggatggaattggatgctctaaggcatcatgaatcaagcaccagtttagccccagtacgagctgaagagaaatccaacactacagatggccctgaaataacacacgaactaaaatagatttagctcagtttggatttttcatgtcaagataagatatgtattgtaccatagccaatctctgtgtacatacggatagtatagtccttgttgctagaaaaggcaaccggcaatgtagcattaatcattcacgaggtgtaaagtaggaaacagatcacgtatttattttttttatcaataatgagttttaattgag

SEQ ID NO: 215389 - DNA, 1180 bp, Zea Mays
ccgccgtcgacgcccgcccgccgtcggccgccggtgtaagaaacggtacaagttgccggacgatggatcatatgatatgaacgctcgttacgtgtttgagtataacgcgaacgatgtcgttgcagatgcaatgtactatgcacgaattcaggctataaaggcatggtacagagcaaatgctgatgatcgaccgatgccaaataccaaggtcgagtggtcatcaatttacttgagggaggagcaatacctagaggtgtcggtgccatggatggccacccgatcagacggttatcgggcattgtgcagatggtgggcttcccctgagtttcgtgccatttccgaaaggaacaggggaaaccgtggaactgagtcgttccacaactacggcggtgatggtcatgtgcgcttggctaagcgaatggaagtcaaatccggtcgtatgcccacggatgtggaggtgtatatgcaagggcataggggttttgatcctcagaatcctgatgtgttatgcactcagacggccaccgaccgtctagcttcgtatgggcaggagatggttcaacgccatggggaggagtacgattggaggagccagccaatcgaccctcaggcagcatatgctagcgcaggaggacaagcccatggacggttgggtatttttgattctacgattgattccagagagctgagacgtcgtggacgacaatccacatcgtcgtcttcacagtcgtcccgttcacgatcagcagcccatgagatagagcttgcggtgttgcgtcaacaggcagagtaccatcaatcagtcttgagggaacaattggagtaccagaggcaacaatctgaataccagagacaacaagccgagtaccagaagaagagggacgagtattatccaagcctccaggcccaaaatcaagctcttctctcgcaactatcccaacaagcgggcgtcccgatgccgacatatgggatgccgcctccggactttgcactgccaatgccaatgttggcgcctccgcctccgcctccgtcacaattccctatgggatttcagacaccacccgcttcagttgccgcacctggagatgggtctggtcaagacgacacaacacattcgtgggtgaataatcttttcagcacgcatagtccagccggaggaggtggcgatggatatgagtga

SEQ ID NO: 215390 - DNA, 1271 bp, Zea Mays
gctcaacctcctctctgtttcagccgtggagcatcagcgcttcacctcatctcccatggccgagcggctccctcgtggtgcccaggatcccctcccgcacatcttcctactggagctcgagctcaacccagaaacggtacaagttgccggacgatggatcatatgatatgaacgctcgttacgtgtttgagtataacgcgaacgatgtcgttgcagatgcaatgtactatgcacgaattcaggctataaaggcatggtacagagcaaatgctgatgatcgaccgatgccaaataccaaggtcgagtggtcatcaatttacttgagggaggagcaatacctagaggtgtcggtgccatggatggccacccgatcagacggttatcgggcattgtgcagatggtgggcttcccctgagtttcgtgccatttccgaaaggaacaggggaaaccgtggaactgagtcgttccacaactacggcggtgatggtcatgtgcgcttggctaagcgaatggaagtcaaatccggtcgtatgcccacggatgtggaggtgtatatgcaagggcataggggttttgatcctcagaatcctgatgtgttatgcactcagacggccaccgaccgtctagcttcgtatgggcaggagatggttcaacgccatggggaggagtacgattggaggagccagccaatcgaccctcaggcagcatatgctagcgcaggaggacaagcccatggacggttgggtatttttgattctacgattgattccagagagctgagacgtcgtggacgacaatccacatcgtcgtcttcacagtcgtcccgttcacgatcagcagcccatgagatagagcttgcggtgttgcgtcaacaggcagagtaccatcaatcagtcttgagggaacaattggagtaccagaggcaacaatctgaataccagagacaacaagccgagtaccagaagaagagggacgagtattatccaagcctccaggcccaaaatcaagctcttctctcgcaactatcccaacaagcgggcgtcccgatgccgacatatgggatgccgcctccggactttgcactgccaatgccaatgttggcgcctccgcctccgcctccgtcacaattccctatgggatttcagacaccacccgcttcagttgccgcacctggagatgggtctggtcaagacgacacaacacattcgtgggtgaataatcttttcagcacgcatagtccagccggaggaggtggcgatggatatgagtga

SEQ ID NO: 215391 - DNA, 1291 bp, Zea Mays
ctcgcagcgcttctcgatcgcgcccgtccgtccacgtgtgcttggccctgtgcgctgttctcctggtggacggaggcgggcggtgcaacgtctgcgccgcgcccgagtgagcggtgcacggtgcttcagttgccgccccgcgaagctttaaaagcaaaccgagagcgcacgtagagacatcccagcagcaggtagcagcagcgcatgactttgtatctgcaactcgtttcgactagcctgcacgccgggagccctcgtctcgcccttctccacctccgaagatcctgcgagttcaacccgcgagtgagcatgtcgtcctactccccgccgccgccgccgccgcgggaccagtccatggacaccgaggcacccaacgcgcccatcaccagggagcggaggctcaaccccgatctgcaggagcagctccccaagccatatctcgcgagagctctcgaggcggtggacccgagccacccgcaggggaccaaggggcgcgacccccgcggcatgagcgtgcttcagcagcacgccgccttcttcgaccgcaatggcgacggcgtcatctacccctgggagacgtttcaaggactgcgagcgataggatgtggactcactgtatcattcgcgttctccatactgatcaacctcttcctcagttatcccactcagccggttggccgctgccggtgaatggctcttactctacagcttggcgaaagacaaggatggcctcttgcagcgcgaaactgtccgtggtctatttgatgggagcctatttgagcgactggaagacgacaacaacaagaagaaatcgtcctgaatgctgagcagccttgtacagctcagggaagtgctgtcagtacaaaactaccagatataccattggtcgtgttcaaataacaaatgcttcggctttgttcatccgtcattaactatgagtgctgggatttgtttgtatgtgtgtcgtgctaccagtttcttctcctgtcgtctcacacaggtactgtattacgcatgtgttttctagtgtccgtgcggaagctgtattataagctgaaatatgtgcgtttgaaatttactagttaggcctagtttgggtactcttgattgaagtggtttggagggattgaagagtgtttaaatcctcaatagatcaaaaactctcccaatacatctcaatccacttcaatctgtctcattcctagagtatccaaaccaagccttaagggtgcgcgccctgcgcgcgtgtattgtatgcttaaaatatattgacagatgtgtgcgtttgaaa

SEQ ID NO: 215392 - DNA, 1372 bp, Zea Mays
cgaagctttaaaagcaaaccgagagcgcacgtagagacatcccagcagcaggtagcagcagcgcatgactttgtatctgcaactcgtttcgactagcctgcacgccgggagccctcgtctcgcccttctccacctccgaagatcctgcgagttcaacccgcgagtgagcatgtcgtcctactccccgccgccgccgccgccgcgggaccagtccatggacaccgaggcacccaacgcgcccatcaccagggagcggaggctcaaccccgatctgcaggagcagctccccaagccatatctcgcgagagctctcgaggcggtggacccgagccacccgcaggggaccaaggggcgcgacccccgcggcatgagcgtgcttcagcagcacgccgccttcttcgaccgcaatggcgacggcgtcatctacccctgggagacgtttcaaggactgcgagcgataggatgtggactcactgtatcattcgcgttctccatactgatcaacctcttcctcagttatcccactcagccgggatggttaccttctcctttgctgtccatccgtatagacaacatccacaagggtaagcacgggagtgattctgaaacttacgacactgaagggaggtttgatccatcaaagttcgatgctgtattcagtaagtatggtcgaacccatcctaatgctctaacaaaagacgagttgagctcaatgcttcaaggaaaccgcaatacgtacgatttccttggctggttggccgctgccggtgaatggctcttactctacagcttggcgaaagacaaggatggcctcttgcagcgcgaaactgtccgtggtctatttgatgggagcctatttgagcgactggaagacgacaacaacaagaagaaatcgtcctgaatgctgagcagccttgtacagctcagggaagtgctgtcagtacaaaactaccagatataccattggtcgtgttcaaataacaaatgcttcggctttgttcatccgtcattaactatgagtgctgggatttgtttgtatgtgtgtcgtgctaccagtttcttctcctgtcgtctcacacaggtactgtattacgcatgtgttttctagtgtccgtgcggaagctgtattataagctgaaatatgtgcgtttgaaatttactagttaggcctagtttgggtactcttgattgaagtggtttggagggattgaagagtgtttaaatcctcaatagatcaaaaactctcccaatacatctcaatccacttcaatctgtctcattcctagagtatccaaaccaagccttaagggtgcgcgccctgcgcgcgtgtattgtatgcttaaaatatattgacagatgtgtgcgtttgaaa

SEQ ID NO: 215393 - DNA, 1286 bp, Zea Mays
acataagggtgcggaaccccacgcttttcggtatttcagttaaaatctagcctagcgttgttgaagccccctctctacgcccgcgctcactgatccaaccgaacccacgagcacccatacaatctaaaagccctcaaccccacctcacggctgtgccaccgtcgtttgcgcagatcgaccgcgggagccacctagccgtgcgtgcggacgacaaacggcgatgcatccggtggctgcgcgtggcgccccgcactggctgcgcggcctgctatcggaggagttcttcgacgcatgcgccgcgcacccgggggagcgcaagaacgacaagaaccacttctgcgtcgactgcgccgcgccgctgtgccgccactgcctcccgcacgaacacgtccacgacgtcctccagatctggaagtacgcgtcctgcttcgtcgtgcgcatcgacgacctgaagctgttcgactgcaccggcatccagtcgcacacggtgagcgaccatgaggtggtgttcctgaacgagcgtacggcgaggaagcggtccacgagcgccgagaacccctgcgccgcgtgcgcgcgaccgctcctccccggccacgactactgttcactcttctgcaaggtgaagcatctgggggagagcgagcacgagctaaggcgcgcgctacgcgtgagccggcaggaggtggctcccacgccggagccacagaccgggaggaagagatcgtcgtcgtcgtcagacgcggggccgagctgcagcggatcgttccggaagcgaagccggaagcaggccgagccggcacaggcaccattccattgacgtttcacctgttctttgtacattttagcaaaatctttagacttttggaagaagggggctaaaattctttagtatctcttaatagttactccctcatagctcgtttggagaaatggattggagttcaatcccttcccatacccttctcccaaccaaacccacgatcttcttactcccaaccaaactcttaaggctagtttgggagccacaaaaccgaaagggattgaaggagataaaatcctctcttattcaaaattaaataagagcactgtaccacaacactaaattagtgtctgacgaccgtcgctataaatagagaattagcatcaaattgttagtcggtatacattgccacagatggtgagtcatcatatgtctatattccaactgagtgttagtcgttatatttatatgtgaatagtgtcgctttgtcagtcggcaattcatacctatagcatctcactgtcag

SEQ ID NO: 215394 - DNA, 2563 bp, Zea Mays
gcggtcgcgggggacgcgtgcagcggagcacgggcgcgaggtggcgagctgcatgtgcccagccacgcgccaacgaataggcgcacagcccgatggaccgcgcagacggaccgacgcaaccaggcaccatccagtgcatgcgcacccgcggcccagccatggacatggggtttgtcgagagccagccggagttgacggccgcgccggcggcgggacccggcacgggaagcaggctgccgggcgggggcggcgggcgcaagcggaagcacctctcctccatcgccaaccacgtgctccggcaatgttctctgacactggacaggagcgtggacgatttggtggcagacttcgagctgggcttaaagactgcagcagtggacagctactcaagaaaactggtcgagttctgcagtctccaggcgctgcagatcatcacgtcacgcgatataggggagaagatcagcgagggctcgctaggtcggttcaccttcgatatgatgctggcctgggagaccccgactccgtcggaccaacagatcaccatggagagcgtagcgaaggagagggaagataggaaggagacccttggagaaggtgaagctgtgatgggtgatgagacgtcactgttctattcagacatcatgcctcttcttgtgaatgaagagccaactgttggggaagaagcgtacgtgtggtttggatctgtgttccctttggcttgtgacgtggtcaatgctcgattcacattcgaagctctcactgccaccacagctaacaggctgcactaccctgcctatgacaggttcctgaaagagatggataagtccttcaagttcttccaagacttgccaactccgactggagttgaattcgctgaggatgagttcattttgcacatggagggcacggcagggacacagagagtggtgaggcacattggaaccactagctggccaggtcgagtgactctgacgaacaaggcactgtattttgaggcttccggaaaattttcatacgaatctgcaatcaaggttgatctctcagacaccggagtagaacaccaaatcagcacggcgtcaacaggccctttcggcgtgcctttgttcgacaaggccatcgtgttcgagtcactaccagagcctgtggtcttggagttcccggagatgaccagctcgacaaggcgcaacacgtggctcgctctgatcagggaagtgctgtccatccaccgtttcatctcagcgtacagcatagtgtcccccgtccacagatgggaggtgcactccagaaccatactaggagtggtacgtctccacgccgcgagggagatgctacggatgtcgccgccgccggcttccagcttcctagtgttctcgctgtacggcgacatgcccaagggcgacttcgtgctcgagcagctggcgagcaacctgaagcggacctccaccatcacccggctgagcgcgtcctacgtgttcaagggtctgagcaggtcttcttctgtcccacctctgagcgcggaggtggccgccgaaggccgtggcgcggacgacgacgccagtggccgcgagcacgagcggcccctggcgtccctggaggacaagatcggccgggtgcgagatgaggccagggaagtcaccgccgccaacgccgccgttgaagggatgaaggacgaaggcatctcggatagtcttctcgtgctggtggggttggtcggtcccgtcggcaagctgcggcccgcgatccagcggataacctcgtgggagcggccgcttgtcactggcagcatccttgccgcagcttcgctgatcatatacaatgaatggttcagttacgtgctagctgcgtccctggtgctggccgccggcgtgatggtctgggcgaggcagaggaagataggggagctatgctcggaggtgatcatcgatgcctcttcgtcgtcgtcgtcggacaagacaacgatggatagcatagtggaggcgcagcgaagcctgcagaaagtgcacaggtacatcgtgaccgcgaacgttgccatcctcaggctgtggtcgattgcgctagcaaggtcgccaaagcacacagagacggtgatctggatgctggccgtgtccgcggcggtggtagccgtggtcccgttcaggtacattctgatcgggctggtggcggggagcttcgcgttgaacacgagggtcgcgagggccgtgatgaacccgcagggcggccggcggtggagggagtggtgggagtccatacccgccgtccccgttcggacggtgcacagttgacaaaagtatattttcctctactacgtgaaatgatcgcagaaggaacccgttatagaagcctgtttgttcaggaagaataatgaagtcaataagaaactgtttgttcgcttgtgtctcttttcacctcagccagcaatttcaccttgtaatgaacaccgccatgcacccctgtttaattagtttcattcactaaattttagtttctgtcgcatcaaatgtttggattttagtttaaaactattaaatacagcgattatagtctaattcaaaattaattatac

SEQ ID NO: 215395 - DNA, 2479 bp, Zea Mays
gacgcgtgcagcggagcacgggcgcgaggtggcgagctgcatgtgcccagccacgcgccaacgaataggcgcacagcccgatggaccgcgcagacggaccgacgcaaccaggcaccatccagtgcatgcgcacccgcggcccagccatggacatggggtttgtcgagagccagccggagttgacggccgcgccggcggcgggacccggcacgggaagcaggctgccgggcgggggcggcgggcgcaagcggaagcacctctcctccatcgccaaccacgtgctccggcaatgttctctgacactggacaggagcgtggacgatttggtggcagacttcgagctgggcttaaagactgcagcagtggacagctactcaagaaaactggtcgagttctgcagtctccaggcgctgcagatcatcacgtcacgcgatataggggagaagatcagcgagggctcgctaggtcggttcaccttcgatatgatgctggcctgggagaccccgactccgtcggaccaacagatcaccatggagagcgtagcgaaggagagggaagataggaaggagacccttggagaaggtgaagctgtgatgggtgatgagacgtcactgttctattcagacatcatgcctcttcttgtgaatgaagagccaactgttggggaagaagcgtacgtgtggtttggatctgtgttccctttggcttgtgacgtggtcaatgctcgattcacattcgaagctctcactgccaccacagctaacaggctgcactaccctgcctatgacaggttcctgaaagagatggataagtccttcaagttcttccaagacttgccaactccgactggagttgaattcgctgaggatgagttcattttgcacatggagggcacggcagggacacagagagtggtgaggcacattggaaccactagctggccaggtcgagtgactctgacgaacaaggcactgtattttgaggcttccggaaaattttcatacgaatctgcaatcaaggttgatctctcagacaccggagtagaacaccaaatcagcacggcgtcaacaggccctttcggcgtgcctttgttcgacaaggccatcgtgttcgagtcactagcctgtggtcttggagttcccggagatgaccagctcgacaaggcgcaacacgtggctcgctctgatcagggaagtgctgtccatccaccgtttcatctcagcgtacagcatagtgtcccccgtccacagatgggaggtgcactccagaaccatactaggagtggtacgtctccacgccgcgagggagatgctacggatgtcgccgccgccggcttccagcttcctagtgttctcgctgtacggcgacatgcccaagggcgacttcgtgctcgagcagctggcgagcaacctgaagcggacctccaccatcacccggctgagcgcgtcctacgtgttcaagggtctgagcaggtcttcttctgtcccacctctgagcgcggaggtggccgccgaaggccgtggcgcggacgacgacgccagtggccgcgagcacgagcggcccctggcgtccctggaggacaagatcggccgggtgcgagatgaggccagggaagtcaccgccgccaacgccgccgttgaagggatgaaggacgaaggcatctcggatagtcttctcgtgctggtggggttggtcggtcccgtcggcaagctgcggcccgcgatccagcggataacctcgtgggagcggccgcttgtcactggcagcatccttgccgcagcttcgctgatcatatacaatgaatggttcagttacgtgctagctgcgtccctggtgctggccgccggcgtgatggtctgggcgaggcagaggaagataggggagctatgctcggaggtgatcatcgatgcctcttcgtcgtcgtcgtcggacaagacaacgatggatagcatagtggaggcgcagcgaagcctgcagaaagtgcacagcacacagagacggtgatctggatgctggccgtgtccgcggcggtggtagccgtggtcccgttcaggtacattctgatcgggctggtggcggggagcttcgcgttgaacacgagggtcgcgagggccgtgatgaacccgcagggcggccggcggtggagggagtggtgggagtccatacccgccgtccccgttcggacggtgcacagttgacaaaagtatattttcctctactacgtgaaatgatcgcagaaggaacccgttatagaagcctgtttgttcaggaagaataatgaagtcaataagaaactgtttgttcgcttgtgtctcttttcacctcagccagcaatttcaccttgtaatgaacaccgccatgcacccctgtttaattagtttcattcactaaattttagtttctgtcgcatcaaatgtttggattttagtttaaaactattaaatacagcgattatagtctaattcaaaattaattatac

SEQ ID NO: 215396 - DNA, 2748 bp, Zea Mays
ttctactttccctttcttgagccaaagcacattatcatcgaggataatgggagcttgtatcatgatttttgcttgaccagataactgatagcaataacttttcttctgtcggctcagcaggttgactgaatgttaatctgacctttttatatcaaccagtattttgatttttcagtcagtttgaattcatgatgagcagcttatgttttggtcaagggattttgattgctgctttaagaggtgatcattttgtccgtttgaggaagagattggatttggtgggccgatgaagctcagctttcccaccagaggcagagtactaaccatgatatcgcttgccttttgaccctgcaaggcagctcaatcaatttggcattgcatcctttgctggcagcgcttctcttcatcccattgaggtccagaggacgattctggctcaaaagacgtttacaaagtgatcattctgtcaaattccagaaggctgttcctcatcattatacttatacagaccaaatggtgactggggtcagatatcaaagagaagcatctcaaagaaaagaatctcacaaaagcggcacacaaaggcacaatatatacgcgataggaagtggaagtaccgccgttgattgggaaacatacaaagaagattgggaagcatacaaagaggatgacgattctgctacatctacatgcatgacttaaggtatggacaccctactagaacggttgctagctagcactgcactgccattaaacagagaaggggaggagaggaaaacaaacaaaaagcacctttttttgggttgcctagatttgttagcttcttgttgcagcggtatctactagggagtactaggatggcatagaatagaagaagtggagctactaataagctagctaggctagggaaggagaagctagcgatggctgcagaggtcggagagcatcttcctgccctcgacgatctcgtcgaagaagtcatcgagctcagcgatgacggcctcggcgcctgatcgcagcatcccaacccagccattgatgatctctgctctctggacaaggctgtcgctgatgtcgtcgcggtagccgcccatggcgactgccctgtcgaagtcctgcttgaggccgtcgatggcggccctggcctggcggaactcgtgcatcatgatcccggccgagtgcgagcggtggtccccagcgatgatgcattcctccatctcctcgacgacgcgctggcgcaggcgggcgatggaggcgacgtagccgccgcccgccgaggcgcggagctggtggtggttggcagacgcagagcagcagccggctgtgaggtcggggaggcaggtgacggtgccggagatgaggaggatcaggaggaaggaggtggcattgcgcagcgcgtagaggacgccgcggaagccgttgaaggcgttgagcttgaactcgagcggggagcggtcgtcgagcaggagcgaggccgggtcgagcctggcgtcggcgagcgcgcggttgtcctggtggagcgcggcggcgtggcgcctgggcgcggtgatggcgcgctggaggtgccgcgcggaggccgcggcgtgggagccgccgctgccgccgtagagccagtcgcggagcgcgggggcgacgcgggcggcggcggcgcagtaggtgtcgagccccgcggcgcccgcgcgggcgagctggcaggcgtcccacaggcgggatgtctcgtccatgtactcgtccagccaactctcgccgggcggcaggtggaggcgctgcaccaggtgcagcagctgcgagtgcagggaccgcagcagcgccgccgcctgctgcaggaaggccgccgacaggcaagcgtgcgggctgcgctggagcgcgtccagcccgtgcgccatggaagagtagaacccgttcatgttgttgctgttgctccgctgtgtgtgtgctcgcatggacagatggacactgctggtgtgcctacctctgccgcctggacgctgggttttataggcagggctggggcaggggagggacggactatggtaacgagtaatgatggggtgtctgttgcgcggggggaacgatgattgattcatttgttggatgctgctgctcctgccgagtactactattcttctgctcgggtcgcctcgcctctcatcctcctactgtactactagtcactagtagtcttcagtcaagaacaagtcatggcatgcaggatgaatcaaggagcagagcagccgcacggcatcggaaaacccaacaacatcctagtccaccgcccttagcctgcctgtgcctgccgtgcctaagagcagagtagcagctcgggtggcttggctgcacctacatgcaactcttctgaatattctagtgcgttgtactacgctctagataccatacgtatcgtaccagagattgatcgagagacctgcagttccctgcatatacgtactgtaccgtatggtctctgagctgtgctgcctctgtggcctgcccttggcccctgccaggctgccatgttggctttagctggagcctctacgtaccatggccttcgtacatacacggccaggtcaccagctgcccaaaaaaaaaactccaacgatcagcaggtaggtgtgcccattaagactgcactatgattgtaatatgcacgctcttcttaggttcgtttcaagagttattgaacatctagttctactgtaaacatacccttttacgtgaggtagtacatgtctagttcatcgcttc

SEQ ID NO: 215397 - DNA, 1051 bp, Zea Mays
gctcaaagcataagtacaagtgcagtgcatccgttgctacggcatcgaagcccatgtcttgtctttgggtagaacatgtcgtgctttgcatgctgtggtgatgaagatacacaagtaccagacaccaggactcaatacccaggacatcatccagcaagagccgacgcataccgccctgctgatcaacctcccaagggttcccaacctgtgaaaatgcaaccgattgcagtccctgccattcctgtggatgagcttagggaggtgactaagggttttggtgatgaagccttgattggtgagggctcctttggtagagtatacttaggtgttctaagaaatggcaggagtgccgcggtcaaaaagttggattctaataagcagccagaccaagaattcttggcgcaggtgtctatggtgtcaaggctgaagcacgaaaatgttgttgagttgcttggttactgtgctgatgggacactccgcgtccttgcctacgagtttgctactatgggttcccttcatgatatgcttcatggaaggaaaggtgttaaaggggctcaacccggcccggtcttatcatggttgcagcgtgtgaagatagctgttggggcagcaaaaggcctcgagtatcttcacgagaaggcgcagcctcatatcatgcaccgagacatcaagtctagcaacgttcttcttttcgatgacgacgtagctaagatcgctgacttcgatttgtcaaaccaagctccggacatggcagcccgacttcactcgactagggttcttggaacgttcggataccatgcgcctgagtatgcaatgaccgggcaactcagctccaagagcgatgtatatagttttggagtcgttcttctcgagctattgaccggaaggaaacctgtggaccatacattaccaaggggacagcagagtcttgtgacttgggctaccccaagacttagcgaagacaaggttagacaatgcgttgactcgaggcttggaggggactaccctcctaaagctgttgcgaagctcacgggatccaaacaaacctgaa

SEQ ID NO: 215398 - DNA, 2845 bp, Zea Mays
attcttagccttctctgtagtcatcaattctagatagggcatctcagtctatgcaggccaggtagcaattaggtcaatagaagctgtatcttacaagcatgtcctcgagacacatggcagcactttttcatttaaagtcatatgttactcatctaaatgcactatagggttgttcttctgcatgccagttgtgtttgaagagattgtgtaaacaaaacttaattattatggttgttagttcttagttcatgtctgtacaacttcctcctgttctttaaagcatatatgttgcaaattttaaggcggttatgttgctgttttgcactttgcccgcatatgacttcacaagctcagacctcaagcactacaacatggttctccaatacaatcctgatgaatcaaacgtgctccgggttccacgcttaatgaatctggcctcaagtgcataccttcggttgaggggtaatgatactaatatgcggtttgtgtttgttaaagacatgcctagagatggtcatcctatgaaggctcctgacatgtcttttatagttgggaagatggtttttgtatggattataatgctccttttcccggtcatcctgagcagtttagtgtatgagaaacaacagaagctaagggcaatgatgaagatgcatggtttaggggatatggcatattggactatatcttattgctacttccttgtcatatcattactttatatgttcttgctggttgtatttggcgccgtcgttgatataaagttatttgcagtgaacagctacgtgctacaattcttactatattttatctacatgaacttgcaaatttcatttgcgttcctcatgacaacgtacttttctacttccgcaacagctaccgtaacaggatacctctatgttattgggtctggcctcataggagaatatctgttcaggccttttgtcgaagacacctccgtctcaagaagcctgattacgctgatggagttcttcccaccaatgtctctgtaccgcataatctacgagctctctccacctccatcgccgtcggggcctttctcggacttctccggcgtacgcgtgggagacctgagcgaccctgagaacgggatcttggtcctcatggtcgtgatggttcttgagtggcctacgtttcttttcctgacattgtatctggatggatttggctggctccaaactagagttagaaagctgccgccggcggcggcggcatcttctcatcagacccttcagaagccgtccaccacacggcctcaagaacgacccgaagcttcgattgaaatagacgggacgacagatatcccgggagaggtagcgcgtgcatgcgcagagagagagatagtcgacaggttcttgcagcaaccggaccagagctacgcagtcatagtcgacaacgtcaggaaagtgtaccctccgagagacggaaacgcagaggtggtcgcagtgaacggcttctcgctctccatcaaacgcgggcagtgtttcggactccttggctcaaacggcgccggaaaaacctctctcattggcatgctgactgggttcactaaacctacatccggcacggcttatattgatgggatggacatacgaacagacatgagcgagatctacacgagaataggcgtttgtccgcaattcaacttgctatgggaaacactgaccggccgtgagcatctgatgttctatggcagactaaagagactgaacggcgctgcattaactgaggctgcagaacaatctatgaaagtactgaagatattcgagggcggtgtcgccgacacgctggtttcacagtacagcggtggcatgaaacgccgcctcagcgtcgctatctctctgatcggggaccctaaggtggtgtacttggacgagccaagcacagggttggatccagcgtcaaggagcgccttgtgggacgctgtgaagcttgccaagaaggacaaagccatcattctcacaacgcattccatggaggaggctgaggctctgtgcgaccggatcggaataaccgcgcatggacgtctccgctgcaccggaacctccaaagagctgaaggccaagtacggcggcacgttcgtgttcacggtgacgacggcggcggcgggcgaggacgaggcggtggagcggctggtccgcggctccatctcgcctgacgccaagcggacgtaccacatcgccgggacgcagaagttcgagctgcccaagcagggggtcaggatcgccgaggtcttccgcgccatggagcaggcgaagcgctcgctgagcatcgccgcctggggccttgtcgacaccacgctcgaggacgtcttcatcaaggttgctgcttgctaaggagagagagagaccgagagagtgcgcgcggaatgccctggatgcgtcgtagtcgtcgtagagccgggatcgccaccaaaagcgtgcagcgcttgcggatacgcccatacgcttctgcaacccaactgaagattgctcccccctctccgttagtaggatatactaacaactctacaatcactatcggaatttggctctttgccgagtgccaaattctttgccgagtgttttttttcgggtactcggcaaagagctctttgccgagtaccacgtaaaaaacactcggtaaaagaaaacactcgtcgaataagctctttgccgagtgccacgtaaaaacactcggtaaaagaaaacactcgtcgaataagctctttaccgagtgtttttttgacactcgacaaaaagctctttgccaagtgtcagaaattgagaaatacaacactcggcaaagagctctttgccgagttttttttccaacactagacaaa

SEQ ID NO: 215399 - DNA, 3156 bp, Zea Mays
tcaagaagaggctatagagaagataaaatctgccaggaataaatcatcgcaaggaagtgcttgtgcaaagcacacatgctgtccacgggaatagtcaccacaaacggttgcaagtggaaaccaaaaccttgttcgtggacggcgcatatgacttcacaagctcagacctcaagcactacaacatggttctccaatacaatcctgatgaatcaaacgtgctccgggttccacgcttaatgaatctggcctcaagtgcataccttcggttgaggggtaatgatactaatatgcggtttgtgtttgttaaagacatgcctagagatggtcatcctatgaaggctcctgacatgtcttttatagttgggaagatggtttttgtatggattataatgctccttttcccggtcatcctgagcagtttagtgtatgagaaacaacagaagctaagggcaatgatgaagatgcatggtttaggggatatggcatattggactatatcttattgctacttccttgtcatatcattactttatatgttcttgctggttgtatttggcgccgtcgttggtaagataataccacctacatttttattaagaaaggttccgtgtatcacaataaataagattagcatgactttctaaggtggttgcggttgcaaaaagtgaaaaaaaattaaactgacttaattttccttttgcttctctcatcaacaataactacattataattactgtaactttttaaattaagggggtgtttggtttccaggactaattttagtccctaaattgctaaatacaggaactaaaactctcgctattttagtttctgtattaggtaatttatgaactaaaatggagggactaaaaatttgttcttaaaaccgaacaccattagtgtatctctgaaaatcccccatcaggaaccttctatgtgcttttaatgatggaaaccatttgttttcttgcagatataaagttatttgcagtgaacagctacgtgctacaattcttactatattttatctacatgaacttgcaaatttcatttgcgttcctcatgacaacgtacttttctacttccgcaacagctaccggtacgtcgtacgtatacgtttctacttgagtattcaccttttttcttgggttcagaaaagatggctgcaggaacattctatctacctcgtgcagtaacaggatacctctatgttattgggtctggcctcataggagaatatctgttcaggccttttgtcgaagacacctccgtctcaagaagcctgattacgctgatggagttcttcccaccaatgtctctgtaccgcataatctacgagctctctccacctccatcgccgtcggggcctttctcggacttctccggcgtacgcgtgggagacctgagcgaccctgagaacgggatcttggtcctcatggtcgtgatggttcttgagtggcctacgtttcttttcctgacattgtatctggatggatttggctggctccaaactagagttagaaagctgccgccggcggcggcggcatcttctcatcagacccttcagaagccgtccaccacacggcctcaagaacgacccgaagcttcgattgaaatagacgggacgacagatatcccgggagaggtagcgcgtgcatgcgcagagagagagatagtcgacaggttcttgcagcaaccggaccagagctacgcagtcatagtcgacaacgtcaggaaagtgtaccctccgagagacggaaacgcagaggtggtcgcagtgaacggcttctcgctctccatcaaacgcgggcagtgtttcggactccttggctcaaacggcgccggaaaaacctctctcattggcatgctgactgggttcactaaacctacatccggcacggcttatattgatgggatggacatacgaacagacatgagcgagatctacacgagaataggcgtttgtccgcaattcaacttgctatgggaaacactgaccggccgtgagcatctgatgttctatggcagactaaagagactgaacggcgctgcattaactgaggctgcagaacaatctatgaaagtactgaagatattcgagggcggtgtcgccgacacgctggtttcacagtacagcggtggcatgaaacgccgcctcagcgtcgctatctctctgatcggggaccctaaggtggtgtacttggacgagccaagcacagggttggatccagcgtcaaggagcgccttgtgggacgctgtgaagcttgccaagaaggacaaagccatcattctcacaacgcattccatggaggaggctgaggctctgtgcgaccggatcggaataaccgcgcatggacgtctccgctgcaccggaacctccaaagagctgaaggccaagtacggcggcacgttcgtgttcacggtgacgacggcggcggcgggcgaggacgaggcggtggagcggctggtccgcggctccatctcgcctgacgccaagcggacgtaccacatcgccgggacgcagaagttcgagctgcccaagcagggggtcaggatcgccgaggtcttccgcgccatggagcaggcgaagcgctcgctgagcatcgccgcctggggccttgtcgacaccacgctcgaggacgtcttcatcaaggttgctgcttgctaaggagagagagagaccgagagagtgcgcgcggaatgccctggatgcgtcgtagtcgtcgtagagccgggatcgccaccaaaagcgtgcagcgcttgcggatacgcccatacgcttctgcaacccaactgaagattgctcccccctctccgttagtaggatatactaacaactctacaatcactatcggaatttggctctttgccgagtgccaaattctttgccgagtgttttttttcgggtactcggcaaagagctctttgccgagtaccacgtaaaaaacactcggtaaaagaaaacactcgtcgaataagctctttgccgagtgccacgtaaaaacactcggtaaaagaaaacactcgtcgaataagctctttaccgagtgtttttttgacactcgacaaaaagctctttgccaagtgtcagaaattgagaaatacaacactcggcaaagagctctttgccgagttttttttccaacactagacaaa

SEQ ID NO: 215400 - DNA, 3865 bp, Zea Mays
caaccttctacagcgccaatggatccattttgatgcatcgagcctgtgctgtgctgtgctgcactgctgcgctgccagatctgaccttgttcgggcggtatctctgatctctctctaagctaggtcgctagctccttgcatcgatcatggcagcggcggccttccaatcccaggcggatgcgctgttcaggaaaaatctcgcgatccagaggcgcgcttacaagacgaactgctgcctgatcctgttcccggtgctcgtctgcggcctgctcggcggcctgcagacgttcatggacacgctgttcaacacggacgacggctacaagcccgactgcaagggctgcgccggcggcggcgtgcgcgtgcgcctcagcgaggacgccgtcgggggcctcgcgtgctcccagagctgcccgctgccggcggcccagcgatggcccgtcgcgctgctgcttcccgccggcggggcggtggacgtcctccctgacctctccgccctggctgggactgggatgaaggaaccgccgccgtgcgtcagccccgagtcgtgcacggcgccagccaaattcctcgtcaccggcggcaacaagtcattcgcagaaagtctcgcggccaacatgttcccgccacacgcatcgccgaagctgacggctgacatttccggcttggctgattatgcgctggcaatagagggatcaagttttggtactaatacttatggcgccgccttcgatatggcgggcctttattttcttcagagaaaatgcactccgaactcaatactttctttcccagttcagtacggtccaaaaatgggcatccaagaagcaagatgtactcaaggattgtttgaatggcgagagaattcagtatccatgaacaatgaactgtatagaggcttcagagctgacaaaaccaaagaaaggatagagaacaagaacgacattgtttcaggatgttgcaactgggggtatcgatacaaatgcagtaatctttgatcggtcatctggtcaaatcttgtgcacgcttactggtcactcaaagaaggatcttggaaatcagaaagtcttgctctcaggcatcaatctcgatgaggatgcaaaaccaagaggggacaactgtgaacagtggtcattgttcgtcggcactgctcaagcatcattgacgttggcgctggcctcctctgtacaaggccaggggtgtactgaccccaaggccggtgctgttgaccccaaggccgagaacaaggctatagagaagataaaatctgccaggaataaatcatcgcaaggaagcatatatgttgcaaattttaaggcggttatgttgctgttttgcactttgcccgcatatgacttcacaagctcagacctcaagcactacaacatggttctccaatacaatcctgatgaatcaaacgtgctccgggttccacgcttaatgaatctggcctcaagtgcataccttcggttgaggggtaatgatactaatatgcggtttgtgtttgttaaagacatgcctagagatggtcatcctatgaaggctcctgacatgtcttttatagttgggaagatggtttttgtatggattataatgctccttttcccggtcatcctgagcagtttagtgtatgagaaacaacagaagctaagggcaatgatgaagatgcatggtttaggggatatggcatattggactatatcttattgctacttccttgtcatatcattactttatatgttcttgctggttgtatttggcgccgtcgttgatataaagttatttgcagtgaacagctacgtgctacaattcttactatattttatctacatgaacttgcaaatttcatttgcgttcctcatgacaacgtacttttctacttccgcaacagctaccgtaacaggatacctctatgttattgggtctggcctcataggagaatatctgttcaggccttttgtcgaagacacctccgtctcaagaagcctgattacgctgatggagttcttcccaccaatgtctctgtaccgcataatctacgagctctctccacctccatcgccgtcggggcctttctcggacttctccggcgtacgcgtgggagacctgagcgaccctgagaacgggatcttggtcctcatggtcgtgatggttcttgagtggcctacgtttcttttcctgacattgtatctggatggatttggctggctccaaactagagttagaaagctgccgccggcggcggcggcatcttctcatcagacccttcagaagccgtccaccacacggcctcaagaacgacccgaagcttcgattgaaatagacgggacgacagatatcccgggagaggtagcgcgtgcatgcgcagagagagagatagtcgacaggttcttgcagcaaccggaccagagctacgcagtcatagtcgacaacgtcaggaaagtgtaccctccgagagacggaaacgcagaggtggtcgcagtgaacggcttctcgctctccatcaaacgcgggcagtgtttcggactccttggctcaaacggcgccggaaaaacctctctcattggcatggtatgctgactgggttcactaaacctacatccggcacggcttatattgatgggatggacatacgaacagacatgagcgagatctacacgagaataggcgtttgtccgcaattcaacttgctatgggaaacactgaccggccgtgagcatctgatgttctatggcagactaaagagactgaacggcgctgcattaactgaggctgcagaacaatctatgaaagtactgaagatattcgagggcggtgtcgccgacacgctggtttcacagtacagcggtggcatgaaacgccgcctcagcgtcgctatctctctgatcggggaccctaaggtggtgtacttggacgagccaagcacagggttggatccagcgtcaaggagcgccttgtgggacgctgtgaagcttgccaagaaggacaaagccatcattctcacaacgcattccatggaggaggctgaggctctgtgcgaccggatcggaataaccgcgcatggacgtctccgctgcaccggaacctccaaagagctgaaggccaagtacggcggcacgttcgtgttcacggtgacgacggcggcggcgggcgaggacgaggcggtggagcggctggtccgcggctccatctcgcctgacgccaagcggacgtaccacatcgccgggacgcagaagttcgagctgcccaagcagggggtcaggatcgccgaggtcttccgcgccatggagcaggcgaagcgctcgctgagcatcgccgcctggggccttgtcgacaccacgctcgaggacgtcttcatcaaggttgctgcttgctaaggagagagagagaccgagagagtgcgcgcggaatgccctggatgcgtcgtagtcgtcgtagagccgggatcgccaccaaaagcgtgcagcgcttgcggatacgcccatacgcttctgcaacccaactgaagattgctcccccctctccgttagtaggatatactaacaactctacaatcactatcggaatttggctctttgccgagtgccaaattctttgccgagtgttttttttcgggtactcggcaaagagctctttgccgagtaccacgtaaaaaacactcggtaaaagaaaacactcgtcgaataagctctttgccgagtgccacgtaaaaacactcggtaaaagaaaacactcgtcgaataagctctttaccgagtgtttttttgacactcgacaaaaagctctttgccaagtgtcagaaattgagaaatacaacactcggcaaagagctctttgccgagttttttttccaacactagacaaa

SEQ ID NO: 215401 - DNA, 5068 bp, Zea Mays
gaagaaccccgccaaagacgcccaaccttctacagcgccaatggatccattttgatgcatcgagcctgtgctgtgctgtgctgcactgctgcgctgccagatctgaccttgttcgggcggtatctctgatctctctctaagctaggtcgctagctccttgcatcgatcatggcagcggcggccttccaatcccaggcggatgcgctgttcaggaaaaatctcgcgatccagaggcgcgcttacaagacgaactgctgcctgatcctgttcccggtgctcgtctgcggcctgctcggcggcctgcagacgttcatggacacgctgttcaacacggacgacggctacaagcccgactgcaagggctgcgccggcggcggcgtgcgcgtgcgcctcagcgaggacgccgtcgggggcctcgcgtgctcccagagctgcccgctgccggcggcccagcgatggcccgtcgcgctgctgcttcccgccggcggggcggtggacgtcctccctgacctctccgccctggctgggactgggatgaaggaaccgccgccgtgcgtcagccccgagtcgtgcacggcgccagccaaattcctcgtcaccggcggcaacaagtcattcgcagaaagtctcgcggccaacatgttcccgccacacgcatcgccgaagctgacggctgacatttccggcttggctgattatgcgctggcaatagagggatcaagttttggtactaatacttatggcgccgccttcgatatggcgggcctttattttcttcagagaaaatgcactccgaactcaatactttctttcccagttcagtacggtccaaaaatgggcatccaagagccgacagtggggtgtgcgagggattgctcgtggttttgctcctgcatctctagcgtagtccgcatctcgtgcttctaccttcctgtttctattgatgcatctgtctcgagagatacactcaaatctccagccatcctcttcataagacaaacaaaccaggcattttgtccatggatgttcatccttcaaagctaccttgtggattcacaggatgttgcaactgggggtatcgatacaaatgcagtaatctttgatcggtcatctggtcaaatcttgtgcacgcttactggtcactcaaagaaggatcttggaaatcagaaagtcttgctctcaggcatcaatctcgatgaggatgcaaaaccaagaggggacaactgtgaacagtggtcattgttcgtcggcactgctcaagcatcattgacgttggcgctggcctcctctgtacaaggccaggggtgtactgaccccaaggccggtgctgttgaccccaaggccgagaacaaggctatagagaagataaaatctgccaggaataaatcatcgcaaggaagcatatatgttgcaaattttaaggcggttatgttgctgttttgcactttgcccggtaatgtgcttgatccaatggtcgagctcagtgcttgtgcaaagcacacatgctgtccacgggaatagtcaccacaaacggttgcaagtggaaaccaaaaccttgttcgtggacggcgcatatgacttcacaagctcagacctcaagcactacaacatggttctccaatacaatcctgatgaatcaaacgtgctccgggttccacgcttaatgaatctggtaatgttcgtttcttaagctgaaagagaataccaggttaacaagataatgctactgttccacgcttaatgaatctggtaatgttcttgtgcatgctattagtaacagtggcgaatctaaatgaaaatattgttgggttgagtaagatcagttttactatatgatataaattttcttaaactttaacggtgttttgctagatgatttataaattttatcagggtcagtttacgccaacaaacaccccctaaatccacccctgattagaaatatccaaagtccaaacaacatttagcgcattgcctttttttaatatctgtttatcattttgtcgatcgccttacagagagtttctagctatatattctgcaggcctcaagtgcataccttcggttgaggggtaatgatactaatatgcggtttgtgtttgttaaagacatgcctagagatggtcatcctatgaaggctcctgacatgtcttttatagttgggaagatggtttttgtatggattataatgctccttttcccggtatgatctgttttagtataaactaattaattaatgaaaattgaaacccttttattttgtaatatataaaccattagtacttggagaaatatattattataataaaataatccattcaaaattgtaagctttgccctatgtcaaatttctctaagttcaatcaaattcttagagaaatgcaccgtcatctacaataccgaacaagattcattagatatacaccataaaatatattttgataaagtatttttttgatattttatatgtaaatataaactaaaataatttataatttaaaatggacaaagacacgaagtatgtgaaataagggcgttgtagcccccatataagtaggccaatacaataaaattgtgactcaatttacactactggagacggcttctttattaattatcaaacactcggtaaaggttttaccttataatacatataaattcgtaagaacactctcaatacatatacactggatatgaacaaagtgccttagcttatacaatgggagaataaaaaaaagaggaaaacaaacaaaccgacatttatcttaaaataacatactaacattgcaggtcatcctgagcagtttagtgtatgagaaacaacagaagctaagggcaatgatgaagatgcatggtttaggggatatggcatattggactatatcttattgctacttccttgtcatatcattactttatatgttcttgctggttgtatttggcgccgtcgttgatataaagttatttgcagtgaacagctacgtgctacaattcttactatattttatctacatgaacttgcaaatttcatttgcgttcctcatgacaacatggctgcaggaacattctatctacctcgtgcagtaacaggatacctctatgttattgggtctggcctcataggagaatatctgttcaggccttttgtcgaagacacctccgtctcaagaagcctgattacgctgatggagttcttcccaccaatgtctctgtaccgcataatctacgagctctctccacctccatcgccgtcggggcctttctcggacttctccggcgtacgcgtgggagacctgagcgaccctgagaacgggatcttggtcctcatggtcgtgatggttcttgagtggcctacgtttcttttcctgacattgtatctggatggatttggctggctccaaactagagttagaaagctgccgccggcggcggcggcatcttctcatcagacccttcagaagccgtccaccacacggcctcaagaacgacccgaagcttcgattgaaatagacgggacgacagatatcccgggagaggtagcgcgtgcatgcgcagagagagagatagtcgacaggttcttgcagcaaccggaccagagctacgcagtcatagtcgacaacgtcaggaaagtgtaccctccgagagacggaaacgcagaggtggtcgcagtgaacggcttctcgctctccatcaaacgcgggcagtgtttcggactccttggctcaaacggcgccggaaaaacctctctcattggcatggtatggtatggtatggtaatgctgactgggttcactaaacctacatccggcacggcttatattgatgggatggacatacgaacagacatgagcgagatctacacgagaataggcgtttgtccgcaattcaacttgctatgggaaacactgaccggccgtgagcatctgatgttctatggcagactaaagagactgaacggcgctgcattaactgaggctgcagaacaatctatgaaagtactgaagatattcgagggcggtgtcgccgacacgctggtttcacagtacagcggtggcatgaaacgccgcctcagcgtcgctatctctctgatcggggaccctaaggtggtgtacttggacgagccaagcacagggttggatccagcgtcaaggagcgccttgtgggacgctgtgaagcttgccaagaaggacaaagccatcattctcacaacgcattccatggaggaggctgaggctctgtgcgaccggatcggaataaccgcgcatggacgtctccgctgcaccggaacctccaaagagctgaaggccaagtacggcggcacgttcgtgttcacggtgacgacggcggcggcgggcgaggacgaggcggtggagcggctggtccgcggctccatctcgcctgacgccaagcggacgtaccacatcgccgggacgcagaagttcgagctgcccaagcagggggtcaggatcgccgaggtcttccgcgccatggagcaggcgaagcgctcgctgagcatcgccgcctggggccttgtcgacaccacgctcgaggacgtcttcatcaaggttgctgcttgctaaggagagagagagaccgagagagtgcgcgcggaatgccctggatgcgtcgtagtcgtcgtagagccgggatcgccaccaaaagcgtgcagcgcttgcggatacgcccatacgcttctgcaacccaactgaagattgctcccccctctccgttagtaggatatactaacaactctacaatcactatcggaatttggctctttgccgagtgccaaattctttgccgagtgttttttttcgggtactcggcaaagagctctttgccgagtaccacgtaaaaaacactcggtaaaagaaaacactcgtcgaataagctctttgccgagtgccacgtaaaaacactcggtaaaagaaaacactcgtcgaataagctctttaccgagtgtttttttgacactcgacaaaaagctctttgccaagtgtcagaaattgagaaatacaacactcggcaaagagctctttgccgagttttttttccaacactagacaaa

SEQ ID NO: 215402 - DNA, 3952 bp, Zea Mays
gctagctctgacagtagacgttgcagttgcagaagaaccccgccaaagacgcccaaccttctacagcgccaatggatccattttgatgcatcgagcctgtgctgtgctgtgctgcactgctgcgctgccagatctgaccttgttcgggcggtatctctgatctctctctaagctaggtcgctagctccttgcatcgatcatggcagcggcggccttccaatcccaggcggatgcgctgttcaggaaaaatctcgcgatccagaggcgcgcttacaagacgaactgctgcctgatcctgttcccggtgctcgtctgcggcctgctcggcggcctgcagacgttcatggacacgctgttcaacacggacgacggctacaagcccgactgcaagggctgcgccggcggcggcgtgcgcgtgcgcctcagcgaggacgccgtcgggggcctcgcgtgctcccagagctgcccgctgccggcggcccagcgatggcccgtcgcgctgctgcttcccgccggcggggcggtggacgtcctccctgacctctccgccctggctgggactgggatgaaggaaccgccgccgtgcgtcagccccgagtcgtgcacggcgccagccaaattcctcgtcaccggcggcaacaagtcattcgcagaaagtctcgcggccaacatgttcccgccacacgcatcgccgaagctgacggctgacatttccggcttggctgattatgcgctggcaatagagggatcaagttttggtactaatacttatggcgccgccttcgatatggcgggcctttattttcttcagagaaaatgcactccgaactcaatactttctttcccagttcagtacggtccaaaaatgggcatccaagaagcaagatgtactcaaggattgtttgaatggcgagagaattcagtatccatgaacaatgaactgtatagaggcttcagagctgacaaaaccaaagaaaggatagagaacaagaacgacattgtttcaggatgttgcaactgggggtatcgatacaaatgcagtaatctttgatcggtcatctggtcaaatcttgtgcacgcttactggtcactcaaagaaggatcttggaaatcagaaagtcttgctctcaggcatcaatctcgatgaggatgcaaaaccaagaggggacaactgtgaacagtggtcattgttcgtcggcactgctcaagcatcattgacgttggcgctggcctcctctgtacaaggccaggggtgtactgaccccaaggccggtgctgttgaccccaaggccgagaacaaggctatagagaagataaaatctgccaggaataaatcatcgcaaggaagcatatatgttgcaaattttaaggcggttatgttgctgttttgcactttgcccgcatatgacttcacaagctcagacctcaagcactacaacatggttctccaatacaatcctgatgaatcaaacgtgctccgggttccacgcttaatgaatctggcctcaagtgcataccttcggttgaggggtaatgatactaatatgcggtttgtgtttgttaaagacatgcctagagatggtcatcctatgaaggctcctgacatgtcttttatagttgggaagatggtttttgtatggattataatgctccttttcccggtcatcctgagcagtttagtgtatgagaaacaacagaagctaagggcaatgatgaagatgcatggtttaggggatatggcatattggactatatcttattgctacttccttgtcatatcattactttatatgttcttgctggttgtatttggcgccgtcgttgatataaagttatttgcagtgaacagctacgtgctacaattcttactatattttatctacatgaacttgcaaatttcatttgcgttcctcatgacaacgtacttttctacttccgcaacagctaccgaaaagatggctgcaggaacattctatctacctcgtgcagtaacaggatacctctatgttattgggtctggcctcataggagaatatctgttcaggccttttgtcgaagacacctccgtctcaagaagcctgattacgctgatggagttcttcccaccaatgtctctgtaccgcataatctacgagctctctccacctccatcgccgtcggggcctttctcggacttctccggcgtacgcgtgggagacctgagcgaccctgagaacgggatcttggtcctcatggtcgtgatggttcttgagtggcctacgtttcttttcctgacattgtatctggatggatttggctggctccaaactagagttagaaagctgccgccggcggcggcggcatcttctcatcagacccttcagaagccgtccaccacacggcctcaagaacgacccgaagcttcgattgaaatagacgggacgacagatatcccgggagaggtagcgcgtgcatgcgcagagagagagatagtcgacaggttcttgcagcaaccggaccagagctacgcagtcatagtcgacaacgtcaggaaagtgtaccctccgagagacggaaacgcagaggtggtcgcagtgaacggcttctcgctctccatcaaacgcgggcagtgtttcggactccttggctcaaacggcgccggaaaaacctctctcattggcatgctgactgggttcactaaacctacatccggcacggcttatattgatgggatggacatacgaacagacatgagcgagatctacacgagaataggcgtttgtccgcaattcaacttgctatgggaaacactgaccggccgtgagcatctgatgttctatggcagactaaagagactgaacggcgctgcattaactgaggctgcagaacaatctatgaaagtactgaagatattcgagggcggtgtcgccgacacgctggtttcacagtacagcggtggcatgaaacgccgcctcagcgtcgctatctctctgatcggggaccctaaggtggtgtacttggacgagccaagcacagggttggatccagcgtcaaggagcgccttgtgggacgctgtgaagcttgccaagaaggacaaagccatcattctcacaacgcattccatggaggaggctgaggctctgtgcgaccggatcggaataaccgcgcatggacgtctccgctgcaccggaacctccaaagagctgaaggccaagtacggcggcacgttcgtgttcacggtgacgacggcggcggcgggcgaggacgaggcggtggagcggctggtccgcggctccatctcgcctgacgccaagcggacgtaccacatcgccgggacgcagaagttcgagctgcccaagcagggggtcaggatcgccgaggtcttccgcgccatggagcaggcgaagcgctcgctgagcatcgccgcctggggccttgtcgacaccacgctcgaggacgtcttcatcaaggttgctgcttgctaaggagagagagagaccgagagagtgcgcgcggaatgccctggatgcgtcgtagtcgtcgtagagccgggatcgccaccaaaagcgtgcagcgcttgcggatacgcccatacgcttctgcaacccaactgaagattgctcccccctctccgttagtaggatatactaacaactctacaatcactatcggaatttggctctttgccgagtgccaaattctttgccgagtgttttttttcgggtactcggcaaagagctctttgccgagtaccacgtaaaaaacactcggtaaaagaaaacactcgtcgaataagctctttgccgagtgccacgtaaaaacactcggtaaaagaaaacactcgtcgaataagctctttaccgagtgtttttttgacactcgacaaaaagctctttgccaagtgtcagaaattgagaaatacaacactcggcaaagagctctttgccgagttttttttccaacactagacaaa

SEQ ID NO: 215403 - DNA, 5804 bp, Zea Mays
cctatatttagctgtttccgtccccattcctcctctcttcttcccgtttcaaaatcgcgtccaatttaaacagcaaaatcccacacatcaagccatcgaatcccgcggctcttggattcatcccttccctcccctcttgttctccgccatatgtgaaccggtgaacgggtgtgcgtgtgtctatcgaggctttcggtgggcgtattcgctccggtggatttggaatcgtgccttctcggcgcgcacaagtggcatgctagcacaataatgcagtgaagttgtgtcatgagtaaaatgtgtcacgcatgtgcatcagaggagacaaccatgaatgaagctaatatcgacctggcctgcagtacgtcttgctgcaagatgtgtgattatggtgagggatcatcaattgttaccagcgagatcaactggctggccatggactcgagcccttacagcactccttacggcacccctgttttttcccgagaaaattctttctcaagctttgccagttgcttttcaagccttggtgactctctaacagattctgattctgaagaggagattgagctccaagatactggtcaattttatcatgataccatattaattaaagattttatggagcaagaagagagttttgtgcgagtggaagaatgtcaatttaaggatattgctgatgactgtgctattttttccattccaataaaccaatatatttcatctgctgagcaacagctggagagacatgaagactccaacaagggaaattttgataccattaatatttcattggattcagatatatcttatgaacagagaaaagacatcctgtccgatgataaacatgtaagaacgaaatgtgctgtaccagtggaagatattgatcataaagaatcaggtgctatagttgttgaacagatcactagccttcccatgccaggtggtgatattttcccattgaatgaacaagttatggatggactcagcagtaccttggaaaatacaatagtatataacaatatattgaataccgaacctgaaatgaaacatggtactcactttgaaaatgaaaatgaatgcctgtacccactagctttgcctagttttgaagcagatcctctcatttggttaccaccggagccagaaaataatgaagatgactttgatactgtttctaatgatgacgacgagagtggcaataacagcactgggtggggtaggtcaagtttcaaggttaacttagcagagagaaacaaggaaagccgcgacgaccaattgcagaaagtaatgtcagaagtaatgaatggacaattcaagatcctagtaagtcgattcttggctgctgaagggctctctttatctgatggaggcacagataaaaactggcttgatattgttgcatcattgtcatgggatgctgcactacgtgtaaaacctgaagccaattccggaaatgcaatggatcctggttcgtatgtgaaggtgaaatgtttagcttcaggatcttaccagcagagtgatcaatggtcttgtttttaagaagagtgctgcacataaacagatgcgtgccaatgtaaaacatccaaaactgctacttcttcagggcgcccttggccattcgtcaacggggctatcatcaataaattcgatgaaacaggaaaacgatcagctggagagaactctttatgaagtgatagtcaaatgccagcttgatgttatattggtcgagaaagcagtttcccgtaatgtaaacgaatatattcagaaacaaggagttacggtagtaagtgacatgaatacccatcggttggaaagaattgctcgctgcattggctctccaattctatctttgcagagtgttcttatgaaacccagtcttattaagcagtgtgaatctctccattttgaaaagtttgttgaagagcataatattactggagaagatggaaaaaaatcatgcaaaacatttttatttctagagggttttccaagacctctgggatgcacgatactgctgaaaggagcaacaagggaagaacttaagaagattaagcgtgtgcttcatttcactgtctttgcagcttaccatttgatccttgaaacttcattctttgccgatcaaaaattgtttacgacagacaaaactaccacagggaaagagaagtgctttaaaactaatcaacagctgcttggttcctgttatgataattcaaaaaacagtgacaccatgaataacacaccaacttgtgatgatcagtatcctaatcaggaaaagcttattcatactgaaaaatctgtaccattgcatcttcatgattccaaaactatggcatctgaagattctgctggtgaagagcatattgacagcaaaggcattcagtcatattcatccctgcctgtttcagatccctcgacaaattttatgcaggacatgccatcaccagattgtgctgagtcaaaaatatctggtggttttgatggctcaacattcactgatacttccaaagaggtgcagaagaaggaattgtctagtgacaattttcagggaacttttgatgtaatttgtgctgagagtggagctgctttgaacactcaggatatcttggtatcaatgtctagccaacatatcaggaaccaagctgtttgtgagcagagtcacctgtcgcggataacttattatgggtattttgatacatcccttggacgatatttgcaagatactttacttaatgagaaacacagctgcctatcatgtggtgaatctccagaatctcacatgtactcttatacccaccataatggtactctaactgttcttgtgaaaagacttcccttggagttgacactttctggtgagactcaaggaagaatttggatgtggaccagatgtttgagatgcaatgctaagccgacccatagggttataatatcttcctctgcacgtaatctgtcgtttggaaagttcttggaactcagcttctcaacccactctgctaccaagaagctaccaacatgtgggcatttgcttcatagagactgcctacgtttctttggatttggatccagagttgctatgttcatatactcatctgtagaaatatattctgcttgtaagcctccattgagtttggagttcaataaccgaaacaaaaatgattggcttgacattgaagtgaagaatccaattgcatacttgcatgctaacatcattctattctttaaggtccttcttaaatggaagcagttatttacaacaattgaaaatgtaatacaagacttgagatcaagatactctagtcaagccatgggggaagacaccaacgtttcagtagatgaggatgaggggttacttttggaggtgtccaggatgcttacacaagagaaaaataaagttgaggtttctctgagggagtttagccgaattgccatacctgagagttttgcacatgggatccttggtttgaactggttgtaccagcaacttcttcttgggttctacatttgggatcttcggttgcttcatattctgcagtacactaaagttaatactgcatcttcagacaattccattcatgaaagcacagcaaagaatgaaccgaagagttcagcaagtattgcaatccaggacacaccatcactaaaggaaattggaacagaaagaaaggaagcaactataaattcttctggcaactttgatgatccatttgggtgatacaatgttggataaggttcaccttactgctaaattaataaccaaagagaaagagcacgatttgctcaattatcaagaccatgatgtaaaatcagctctttcctctctaggcgaagctgctgatcagtttgaaacgattgctaatgttaattgttcagagaaattaaacactataccatttatgaatgatgaacaacctgcagcatccaatgtattgcatcatgttgtcattccaagtgacgatgaaggaaaatggttctggaatcaatttaatcaattggaaatggaatacaagaaagaacttgaaggtggttctttgtataaattttacctcatcaacaaatacaccccatgctcttcaccattggcacaattaaaacatcaaatggacttggggcattttatagctggccatggtggtaatatcttttcaatttctgaggaagaggcttctagcattattgcttatgctctaattatatctgaacaacaagggttctattatgaagctgcatctagtaacttggataaaaatgcttctatgctgccatccatgtcgtctccaaatgagtctttcgaaaacaaccataaattttcaaggtttgcaccaactgaggaattaacatcagggttttatgattcatttctgtcagctttaaaagatctgcaccacgaaatcgatctgaacaatgaaaagatagctctgagaagcaaatatactgtcatttgtatatatgcaaaacaattccatgatcttcggaagatgtgctgcccatcagaacttgcatatatttcgtcaataagccgctgcaaaaactggaatgcacagggtggaaagagtaaggttttctttgcgaaatcaatggatgacagatttatcataaaacaaatcaagaagactgaatttgactcgttcttaaagtttggtcttgagtactttaagcattttggtgcatctcaggtttcaagcaaccctacttgtcttgcgaaaattctaggaatatatcaggttaaggaaactaggaatggcaaggagacaagggttaacttcatggttatggaaaatcttctgtttggacataatatactacgcagatatgatctgaagggtgctcttttctcacgatatattcctgattcagaaaattctgaaaaggtactgttggatcaaaattttattgaagacatgcgtaccatgccaatctacattcaaggaaaaactaaaaacctcatggaacgcgctatttggaacgacacatctttcctaagtaacatgaatgtcatggattactccttgcttgttggagttgacaaagagaagaaagagcttgtatttggaattatagattatttgagacaatatacctgggacaaacagctggaatcttgggtgaagacatctcttgttgttccaaagaatctatccccaactgtaattttacctagggagtacaaaatgagattcagggcctttatgtcacaatactttctatcagttccagatgcttgagtcttgaggcccaatcattttctggtattggtgaccgaacatatcttgagttaggacttcggagatcatgttgccgatggttatttccctatccagtgagcagtacggcatattggcatcatgttttgagcattgaaattttcccatagtttcattgttgtgtgtgtctatccttgtccattttccttctcagcagttgtgtacatagtagcagctaggacacctgggaagtgcaaattttaagcaaacgaacggtgatggacgcacaaatagcctagtcattgttttttattgagttaattagggtggagatctttccaaaaaaagggtggagatcaaggtctgtaggggtagaggagcatgtaatgtactccggtttgtgtttatcggaatatattcctgaagtttaaagttagattaaagattcagcttttttactttaatcaaattactagcaaaggtttatcatagcagcatttgtgtgacgaacattacttgtggcatggcagacatagacacaatatcattgtccaacatagatacaatatcgtcgaatgctacttcgtcaggcgaatgtatgtc

SEQ ID NO: 215404 - DNA, 5375 bp, Zea Mays
cctatatttagctgtttccgtccccattcctcctctcttcttcccgtttcaaaatcgcgtccaatttaaacagcaaaatcccacacatcaagccatcgaatcccgcggctcttggattcatcccttccctcccctcttgttctccgccatatgtgaaccggtgaacgggtgtgcgtgtgtctatcgaggctttcggtgggcgtattcgctccggtggatttggaatcgtgccttctcggcgcgcacaagtggcatgctagcacaataatgcagtgaagttgtgtcatgagtaaaatgtgtcacgcatgtgcatcagaggagacaaccatgaatgaagctaatatcgacctggcctgcagtacgtcttgctgcaagatgtgtgattatggtgagggatcatcaattgttaccagcgagatcaactggctggccatggactcgagcccttacagcactccttacggcacccctgttttttcccgagaaaattctttctcaagctttgccagttgcttttcaagccttggtgactctctaacagattctgattctgaagaggagattgagctccaagatactggtcaattttatcatgataccatattaattaaagattttatggagcaagaagagagttttgtgcgagtggaagaatgtcaatttaaggatattgctgatgactgtgctattttttccattccaataaaccaatatatttcatctgctgagcaacagctggagagacatgaagactccaacaagggaaattttgataccattaatatttcattggattcagatatatcttatgaacagagaaaagacatcctgtccgatgataaacatgtaagaacgaaatgtgctgtaccagtggaagatattgatcataaagaatcaggtgctatagttgttgaacagatcactagccttcccatgccaggtggtgatattttcccattgaatgaacaagttatggatggactcagcagtaccttggaaaatacaatagtatataacaatatattgaataccgaacctgaaatgaaacatggtactcactttgaaaatgaaaatgaatgcctgtacccactagctttgcctagttttgaagcagatcctctcatttggttaccaccggagccagaaaataatgaagatgactttgatactgtttctaatgatgacgacgagagtggcaataacagcactgggtggggtaggtcaagtttcaaggttaacttagcagagagaaacaaggaaagccgcgacgaccaattgcagaaagtaatgtcagaagtaatgaatggacaattcaagatcctagtaagtcgattcttggctgctgaagggctctctttatctgatggaggcacagataaaaactggcttgatattgttgcatcattgtcatgggatgctgcactacgtgtaaaacctgaagccaattccggaaatgcaatggatcctggttcgtatgtgaaggtgaaatgtttagcttcaggatcttaccagcagagtgaagtgatcaatggtcttgtttttaagaagagtgctgcacataaacagatgcgtgccaatgtaaaacatccaaaactgctacttcttcagggcgcccttggccattcgtcaacggggctatcatcaataaattcgatgaaacaggaaaacgatcagctggagagaactctttatgaagtgatagtcaaatgccagcttgatgttatattggtcgagaaagcagtttcccgtaatgtaaacgaatatattcagaaacaaggagttacggtagtaagtgacatgaatacccatcggttggaaagaattgctcgctgcattggctctccaattctatctttgcagagtgttcttatgaaacccagtcttattaagcagtgtgaatctctccattttgaaaagtttgttgaagagcataatattactggagaagatggaaaaaaatcatgcaaaacatttttatttctagagggttttccaagacctctgggatgcacgatactgctgaaaggagcaacaagggaagaacttaagaagattaagcgtgtgcttcatttcactgtctttgcagcttaccatttgatccttgaaacttcattctttgccgatcaaaaattgtttacgacagacaaaactaccacagggaaagagaagtgctttaaaactaatcaacagctgcttggttcctgttatgataattcaaaaaacagtgacaccatgaataacacaccaacttgtgatgatcagtatcctaatcaggaaaagcttattcatactgaaaaatctgtaccattgcatcttcatgattccaaaactatggcatctgaagattctgctggtgaagagcatattgacagcaaaggcattcagtcatattcatccctgcctgtttcagatccctcgacaaattttatgcaggacatgccatcaccagattgtgctgagtcaaaaatatctggtggttttgatggctcaacattcactgatacttccaaagaggtgcagaagaaggaattgtctagtgacaattttcagggaacttttgatgtaatttgtgctgagagtggagctgctttgaacactcaggatatcttggtatcaatgtctagccaacatatcaggaaccaagctgtttgtgagcagagtcacctgtcgcggataacttattatgggtattttgatacatcccttggacgatatttgcaagatactttacttaatgagaaacacagctgcctatcatgtggtgaatctccagaatctcacatgtactcttatacccaccataatggtactctaactgttcttgtgaaaagacttcccttggagttgacactttctggtgagactcaaggaagaatttggatgtggaccagatgtttgagatgcaatgctaagccgacccatagggttataatatcttcctctgcacgtaatctgtcgtttggaaagttcttggaactcagcttctcaacccactctgctaccaagaagctaccaacatgtgggcatttgcttcatagagactgcctacgtttctttggatttggatccagagttgctatgttcatatactcatctgtagaaatatattctgcttgtaagcctccattgagtttggagttcaataaccgaaacaaaaatgattggcttgacattgaagtgaagaatgtccttcttaaatggaagcagttatttacaacaattgaaaatgtaatacaagacttgagatcaagatactctagtcaagccatgggggaagacaccaacgtttcagtagatgaggatgaggggttacttttggaggtgtccaggatgcttacacaagagaaaaataaagttgaggtttctctgagggagtttagccgaattgccatacctgagagttttgcacatgggatccttggtttgaactggttgtaccagcaacttcttcttgggttctacatttgggatcttcggttgcttcatattctgcagtacactaaagttaatactgcatcttcagacaattccattcatgaaagcacagcaaagaatgaaccgaagagttcagcaaagaaattaaacactataccatttatgaatgatgaacaacctgcagcatccaatgtattgcatcatgttgtcattccaagtgacgatgaaggaaaatggttctggaatcaatttaatcaattggaaatggaatacaagaaagaacttgaaggtggttctttgtataaattttacctcatcaacaaatacaccccatgctcttcaccattggcacaattaaaacatcaaatggacttggggcattttatagctggccatggtggtaatatcttttcaatttctgaggaagaggcttctagcattattgcttatgctctaattatatctgaacaacaagggttctattatgaagctgcatctagtaacttggataaaaatgcttctatgctgccatccatgtcgtctccaaatgagtctttcgaaaacaaccataaattttcaaggtttgcaccaactgaggaattaacatcagggttttatgattcatttctgtcagctttaaaagatctgcaccacgaaatcgatctgaacaatgaaaagatagctctgagaagcaaatatactgtcatttgtatatatgcaaaacaattccatgatcttcggaagatgtgctgcccatcagaacttgcatatatttcgtcaataagccgctgcaaaaactggaatgcacagggtggaaagagtaaggttttctttgcgaaatcaatggatgacagatttatcataaaacaaatcaagaagactgaatttgactcgttcttaaagtttggtcttgagtactttaagcattttggtgcatctcaggtttcaagcaaccctacttgtcttgcgaaaattctaggaatatatcagaaaattctgaaaaggtactgttggatcaaaattttattgaagacatgcgtaccatgccaatctacattcaaggaaaaactaaaaacctcatggaacgcgctatttggaacgacacatctttcctaagtaacatgaatgtcatggattactccttgcttgttggagttgacaaagagaagaaagagcttgtatttggaattatagattatttgagacaatatacctgggacaaacagctggaatcttgggtgaagacatctcttgttgttccaaagaatctatccccaactgtaattttacctagggagtacaaaatgagattcagggcctttatgtcacaatactttctatcagttccagatgcttgagtcttgaggcccaatcattttctggtattggtgaccgaacatatcttgagttaggacttcggagatcatgttgccgatggttatttccctatccagtgagcagtacggcatattggcatcatgttttgagcattgaaattttcccatagtttcattgttgtgtgtgtctatccttgtccattttccttctcagcagttgtgtacatagtagcagctaggacacctgggaagtgcaaattttaagcaaacgaacggtgatggacgcacaaatagcctagtcattgttttttattgagttaattagggtggagatctttccaaaaaaagggtggagatcaaggtctgtaggggtagaggagcatgtaatgtactccggtttgtgtttatcggaatatattcctgaagtttaaagttagattaaagattcagcttttttactttaatcaaattactagcaaaggtttatcatagcagcatttgtgtgacgaacattacttgtggcatggcagacatagacacaatatcattgtccaacatagatacaatatcgtcgaatgctacttcgtcaggcgaatgtatgtc

SEQ ID NO: 215405 - DNA, 5604 bp, Zea Mays
gctcatccaagccactaccccagtacccctatatttagctgtttccgtccccattcctcctctcttcttcccgtttcaaaatcgcgtccaatttaaacagcaaaatcccacacatcaagccatcgaatcccgcggctcttggattcatcccttccctcccctcttgttctccgccatatgtgaaccggtgaacgggtgtgcgtgtgtctatcgaggctttcggtgggcgtattcgctccggtggatttggaatcgtgccttctcggcgcgcacaagtggcatgctagcacaataatgcagtgaagttgtgtcatgagtaaaatgtgtcacgcatgtgcatcagaggagacaaccatgaatgaagctaatatcgacctggcctgcagtacgtcttgctgcaagatgtgtgattatggtgagggatcatcaattgttaccagcgagatcaactggctggccatggactcgagcccttacagcactccttacggcacccctgttttttcccgagaaaattctttctcaagctttgccagttgcttttcaagccttggtgactctctaacagattctgattctgaagaggagattgagctccaagatactggtcaattttatcatgataccatattaattaaagattttatggagcaagaagagagttttgtgcgagtggaagaatgtcaatttaaggatattgctgatgactgtgctattttttccattccaataaaccaatatatttcatctgctgagcaacagctggagagacatgaagactccaacaagggaaattttgataccattaatatttcattggattcagatatatcttatgaacagagaaaagacatcctgtccgatgataaacatgtaagaacgaaatgtgctgtaccagtggaagatattgatcataaagaatcaggtgctatagttgttgaacagatcactagccttcccatgccaggtggtgatattttcccattgaatgaacaagttatggatggactcagcagtaccttggaaaatacaatagtatataacaatatattgaataccgaacctgaaatgaaacatggtactcactttgaaaatgaaaatgaatgcctgtacccactagctttgcctagttttgaagcagatcctctcatttggttaccaccggagccagaaaataatgaagatgactttgatactgtttctaatgatgacgacgagagtggcaataacagcactgggtggggtaggtcaagtttcaaggttaacttagcagagagaaacaaggaaagccgcgacgaccaattgcagaaagtaatgtcagaagtaatgaatggacaattcaagatcctaccaattccggaaatgcaatggatcctggttcgtatgtgaaggtgaaatgtttagcttcaggatcttaccagcagagtgaagtgatcaatggtcttgtttttaagaagagtgctgcacataaacagatgcgtgccaatgtaaaacatccaaaactgctacttcttcagggcgcccttggccattcgtcaacggggctatcatcaataaattcgatgaaacaggaaaacgatcagctggagagaactctttatgaagtgatagtcaaatgccagcttgatgttatattggtcgagaaagcagtttcccgtaatgtaaacgaatatattcagaaacaaggagttacggtaagtgttcttatgaaacccagtcttattaagcagtgtgaatctctccattttgaaaagtttgttgaagagcataatattactggagaagatggaaaaaaatcatgcaaaacatttttatttctagagggttttccaagacctctgggatgcacgatactgctgaaaggagcaacaagggaagaacttaagaagattaagcgtgtgcttcatttcactgtctttgcagcttaccatttgatccttgaaacttcattctttgccgatcaaaaattgtttacgacagacaaaactaccacagggaaagagaagtgctttaaaactaatcaacagctgcttggttcctgttatgataattcaaaaaacagtgacaccatgaataacacaccaacttgtgatgatcagtatcctaatcaggaaaagcttattcatactgaaaaatctgtaccattgcatcttcatgattccaaaactatggcatctgaagattctgctggtgaagagcatattgacagcaaaggcattcagtcatattcatccctgcctgtttcagatccctcgacaaattttatgcaggacatgccatcaccagattgtgctgagtcaaaaatatctggtggttttgatggctcaacattcactgatacttccaaagaggtgcagaagaaggaattgtctagtgacaattttcagggaacttttgatgtaatttgtgctgagagtggagctgctttgaacactcaggatatcttggtatcaatgtctagccaacatatcaggaaccaagctgtttgtgagcagagtcacctgtcgcggataacttattatgggtattttgatacatcccttggacgatatttgcaagatactttacttaatgagaaacacagctgcctatcatgtggtgaatctccagaatctcacatgtactcttatacccaccataatggtactctaactgttcttgtgaaaagacttcccttggagttgacactttctggtgagactcaaggaagaatttggatgtggaccagatgtttgagatgcaatgctaagccgacccatagggttataatatcttcctctgcacgtaatctgtcgtttggaaagttcttggaactcagcttctcaacccactctgctaccaagaagctaccaacatgtgggcatttgcttcatagagactgcctacgtttctttggatttggatccagagttgctatgttcatatactcatctgtagaaatatattctgcttgtaagcctccattgagtttggagttcaataaccgaaacaaaaatgattggcttgacattgaagtgaagaatgtccttcttaaatggaagcagttatttacaacaattgaaaatgtaatacaagacttgagatcaagatactctagtcaagccatgggggaagacaccaacgtttcagtagatgaggatgaggggttacttttggaggtgtccaggatgcttacacaagagaaaaataaagttgaggtttctctgagggagtttagccgaattgccatacctgagagttttgcacatgggatccttggtttgaactggttgtaccagcaacttcttcttgggttctacatttgggatcttcggttgcttcatattctgcagtacactaaagttaatactgcatcttcagacaattccattcatgaaagcacagcaaagaatgaaccgaagagttcagcaagtattgcaatccaggacacaccatcactaaaggaaattggaacagaaagaaaggaagcaactataaattcttctggcaactttgatgatccatttgggtgatacaatgttggataaggttcaccttactgctaaattaataaccaaagagaaagagcacgatttgctcaattatcaagaccatgatgtaaaatcagctctttcctctctaggcgaagctgctgatcagtttgaaacgattgctaatgttaattgttcagagaaattaaacactataccatttatgaatgatgaacaacctgcagcatccaatgtattgcatcatgttgtcattccaagtgacgatgaaggaaaatggttctggaatcaatttaatcaattggaaatggaatacaagaaagaacttgaaggtggttctttgtataaattttacctcatcaacaaatacaccccatgctcttcaccattggcacaattaaaacatcaaatggacttggggcattttatagctggccatggtggtaatatcttttcaatttctgaggaagaggcttctagcattattgcttatgctctaattatatctgaacaacaagggttctattatgaagctgcatctagtaacttggataaaaatgcttctatgctgccatccatgtcgtctccaaatgagtctttcgaaaacaaccataaattttcaaggtttgcaccaactgaggaattaacatcagggttttatgattcatttctgtcagctttaaaagatctgcaccacgaaatcgatctgaacaatgaaaagatagctctgagaagcaaatatactgtcatttgtatatatgcaaaacaattccatgatcttcggaagatgtgctgcccatcagaacttgcatatatttcgtcaataagccgctgcaaaaactggaatgcacagggtggaaagagtaaggttttctttgcgaaatcaatggatgacagatttatcataaaacaaatcaagaagactgaatttgactcgttcttaaagtttggtcttgagtactttaagcattttggtgcatctcaggtttcaagcaaccctacttgtcttgcgaaaattctaggaatatatcaggttaaggaaactaggaatggcaaggagacaagggttaacttcatggttatggaaaatcttctgtttggacataatatactacgcagatatgatctgaagggtgctcttttctcacgatatattcctgattcagaaaattctgaaaaggtactgttggatcaaaattttattgaagacatgcgtaccatgccaatctacattcaaggaaaaactaaaaacctcatggaacgcgctatttggaacgacacatctttcctaagtaacatgaatgtcatggattactccttgcttgttggagttgacaaagagaagaaagagcttgtatttggaattatagattatttgagacaatatacctgggacaaacagctggaatcttgggtgaagacatctcttgttgttccaaagaatctatccccaactgtaattttacctagggagtacaaaatgagattcagggcctttatgtcacaatactttctatcagttccagatgcttgagtcttgaggcccaatcattttctggtattggtgaccgaacatatcttgagttaggacttcggagatcatgttgccgatggttatttccctatccagtgagcagtacggcatattggcatcatgttttgagcattgaaattttcccatagtttcattgttgtgtgtgtctatccttgtccattttccttctcagcagttgtgtacatagtagcagctaggacacctgggaagtgcaaattttaagcaaacgaacggtgatggacgcacaaatagcctagtcattgttttttattgagttaattagggtggagatctttccaaaaaaagggtggagatcaaggtctgtaggggtagaggagcatgtaatgtactccggtttgtgtttatcggaatatattcctgaagtttaaagttagattaaagattcagcttttttactttaatcaaattactagcaaaggtttatcatagcagcatttgtgtgacgaacattacttgtggcatggcagacatagacacaatatcattgtccaacatagatacaatatcgtcgaatgctacttcgtcaggcgaatgtatgtc

SEQ ID NO: 215406 - DNA, 2091 bp, Zea Mays
cctatatttagctgtttccgtccccattcctcctctcttcttcccgtttcaaaatcgcgtccaatttaaacagcaaaatcccacacatcaagccatcgaatcccgcggctcttggattcatcccttccctcccctcttgttctccgccatatgtgaaccggtgaacgggtgtgcgtgtgtctatcgaggctttcggtgggcgtattcgctccggtggatttggaatcgtgccttctcggcgcgcacaagtggcatgctagcacaataatgcagtgaagttgtgtcatgagtaaaatgtgtcacgcatgtgcatcagaggagacaaccatgaatgaagctaatatcgacctggcctgcagtacgtcttgctgcaagatgtgtgattatggtgagggatcatcaattgttaccagcgagatcaactggctggccatggactcgagcccttacagcactccttacggcacccctgttttttcccgagaaaattctttctcaagctttgccagttgcttttcaagccttggtgactctctaacagattctgattctgaagaggagattgagctccaagatactggtcaattttatcatgataccatattaattaaagattttatggagcaagaagagagttttgtgcgagtggaagaatgtcaatttaaggatattgctgatgactgtgctattttttccattccaataaaccaatatatttcatctgctgagcaacagctggagagacatgaagactccaacaagggaaattttgataccattaatatttcattggattcagatatatcttatgaacagagaaaagacatcctgtccgatgataaacatgtaagaacgaaatgtgctgtaccagtggaagatattgatcataaagaatcaggtgctatagttgttgaacagatcactagccttcccatgccaggtggtgatattttcccattgaatgaacaagttatggatggactcagcagtaccttggaaaatacaatagtatataacaatatattgaataccgaacctgaaatgaaacatggtactcactttgaaaatgaaaatgaatgcctgtacccactagctttgcctagttttgaagcagatcctctcatttggttaccaccggagccagaaaataatgaagatgactttgatactgtttctaatgatgacgacgagagtggcaataacagcactgggtggggtaggtcaagtttcaaggttaacttagcagagagaaacaaggaaagccgcgacgaccaattgcagaaagtaatgtcagaagtaatgaatggacaattcaagatcctagtaagtcgattcttggctgctgaagggctctctttatctgatggaggcacagataaaaactggcttgatattgttgcatcattgtcatgggatgctgcactacgtgtaaaacctgaagccaattccggaaatgcaatggatcctggttcgtatgtgaaggtgaaatgtttagcttcaggatcttaccagcagagtgaagtgatcaatggtcttgtttttaagaagagtgctgcacataaacagatgcgtgccaatgtaaaacatccaaaactgctacttcttcagggcgcccttggccattcgtcaacggggctatcatcaataaattcgatgaaacaggaaaacgatcagctggagagaactctttatgaagtgatagtcaaatgccagcttgatgttatattggtcgagaaagcagtttcccgtaatgtaaacgaatatattcagaaacaaggagttacggtagtaagtgacatgaatacccatcggttggaaagaattgctcgctgcattggctctccaattctatctttgcagagtgttcttatgaaacccagtcttattaagcagtgtgaatctctccattttgaaaagtttgttgaagagcataatattactggagaagatggaaaaaaatcatgcaaaacatttttatttctagagggttttccaagacctctgggatgcacggggtggttttgtatcctaacatggagggcaagcacatattttctattgctcctgatggtcattactctgcaaggattg

SEQ ID NO: 215407 - DNA, 6060 bp, Zea Mays
atgaagccgcgggcgctcctggagcgcctggcccgccacttcccgtcctcccgccggtcctcgtccgaccagtcccggcgcgacagggaggaggaggcggacctggaggcgatcgcggcgcgggagcagcgcgggttcaagtacgagaccctggcggcggcgacgcggggcttctcggagaagaaccggctcgggcagggcgggttcggccccgtgtaccggggccgcctcgaggacgggcgcgacgtggccgtcaagcgcctgggcgccgggtcgcggcagggcacgcgggagttccggaacgaggccacgctgctgtcccgggtgcagcaccgcaacgtggtcaacctcatcggctactgcgcgcgcggggcggaggacaagctgctggtgtacgagtacgtccccaacgagagcctcgacaagatcctcttccccccctcctccgcctcggcctcccactcccactccagcagcaacagcgaccgatcacgacgagcggagctgacctggccgcggcggcacgaggttgtggtcggcgtggcgcgtggcctgctctacctccacgaggacgcgcacacgcctatcatccaccgcgacatcaaggccagcaacatcctcctggacgaccggtgggtgcccaagatcgcggacttcggcatggcccgcctcttccccgaggccggcgatggtcactctcgcgtccatacccgtgtcgccggcactaacgggtacatggcgcccgagtacctcatgcacggcgacctctccaccaaggccgacgtcttcagcttcggcgtggttgttctcgagattgtctcgggccgcaagaactccgcctttgtcccgcccctcgacgccgaggccgacagcctcctggaatacgcctggagactgtacaagaaaggtcggagcctggagttgcttgaccccgcggtcaagtcgtcggcggtgccggagcaggtcgagctgtgcgtgcgcatcgggctgctgtgcgtgcaggccgacccgcggctgcggccggacatgaagcgcgtggtgatcatcctgtccaagaagcagagcacactcgaggagccgacgcgcccgggcgtgcccgggtcgcggtaccggcggaggccccacggcctgcggggctctcactactctgtcgggtcatcgtccggcaccagctcgccgtctacgtccgctacatcgcacgcgtcagcatcagcgtcagcgtcagcctcccacgccatgacgacgtcgagcacgcacaccatgaggagccggggcttgccctcgcaccgagaagaagagcaggagtagcaggaacagggcgagcccaactgtacactgagataaaagttctagctgaaaacaacagatttgctctacatgctgacaatatgacgattcagagcatttgatggatggtgcaactgttgagtttgactattcccctcattggaaaaatgaaagtgatcaaccgaattggtcttcagtatcatgtttgaagactgctgctgatgctgcatgttcaatgtatactttgtctctaaatcgagaagctacaccaaatcttattgtgtcatctgagagatcagtcaagtcaatgactgaacagcagttagatgaaaacagtgaaaagcatgaagaaaatagtggaaggcttgaagaacatggtggaaatcctgttcaaacttcctatgatcaaattgttaatggctgcagtggaagagggaatagaaaattctgcagtggaagaaggaaaggaaaaggaaaatgataaggaaaaagaagaggaaaatggaaatgagaagagcaaggaaactggaaatgagactgaatatgaaaaggtgaagaacataaaactggttcacatagattatattttggagaaggctgaaactggcgttcagttcgttggcaatgtcatgcgtagcagtagtcagacaaggcgggcacactgttggtttccttgtgttgatagtgccacagaacgctgtccatttgacctagaatttacagttagcatggatttcattgctgtcagcaatggtgacttgctttaccaggtatgcgttcagtcttgatcaagagatctggaggaaaaatattaatttccttgtttttgaagaactaacttttgtgaagtaacaaggaagctcttttagctttaatacacttggtattacagttcatttcttttttgtgcatgttagttatgttctgtttcctgatcttagaaggtctctagtaaggaagatccttcaaaaaaacttatgtgtataaattgaacactccagttagtccacagtggatatccttggttgttggcccacttgaagttcttcctgacagaatcacagaaatgacataaatgtctcacacatatgtttattccctgctttggcaaagcttcagaacactattgcatttttccacaatgcatacagctgttatgaagactatctttctgcaccatttcccttaggccccgtttgtttcctttcatttcgaggaattggaatcttactaacagaataggctaattttttagaatatgacattccaccactttccaaagttatcatataagcctatctcaaattcatgaggtgagagatggaaattgattctatagatttacatgctaattttccgatgtacaacttatagcacactcttctacctgcacctctataacataaatatactatataactaactctctcatatgatttaggataatatacaaatatattatatgtataaatatataaacttaattagttttgtctaaattataattattaaaatggaattcaattccaacgaaacaaacgggcccttaggtttatacaatcacatttttcttccatctgaaatgacaatattaccagcaagcttaggagcctccacatgcatcctcagttctgatatcttgcatgatgagaaagttatatagatcaggtgcgtttgtttctcttattttactaccctgtcccctctgatctagaccaatgatttgacaccatactttttaatgagatccgaatgcgtggctgctatagcatgtgcttatcaattgtgcttattctttattaaactatttttcatatcagctgttgttttgaagccctcctttcactgagagcatttagtgtcagtaagcaatccatgaatgcataatttctgctccagtatttgtgttttaactaagttagattctggtttagatgcctatatgacactacattcttgttaagttgatcatttaattagtttggtacctccagcaaatactgtaaatatgtttatggaatatgttaaatacttctgtatgtttgcttgccttatattttgtattttttctgtatagggctttgtaaacctgtcatcctttggataggagtgcatgaaaatctgcaatccatgtgtctgaatcatgacctgctattacttttactttatcttcctaagcattaaccttgcttctttgtatccccttaactggtggcttgataacactttgtattatgcattaaccttgcttctttgtatccccttaattagtggctcttggtaatgctttgtacacctgcattacattatagtcaagtattatgtttcataccttgcagtctgcactaacttgtaaaatagttcagataattggcacaagaacgaaactggcttatgcccttgcaaagcaatggtttggaatatacacaagtgcagaggagtccagtgacggctaactgctcagtatgtgaatctgatgttagtggtgcaactgctttgagctctactgctgcttcaagtgatttatatggaactcaagcaatcggttcatatgggaaagttcgttcattgaaagctgtagctgttttcaaatgttggagaagcagatgggaccagactcatttcggaagattttgcaggtgatagtggctccaagtcgtgcataaaatctaggcatgagcttcctagcctctcttctcaagcaaattgatcggttcttgcaatttgacaactttatgcctggttataatggggtcttgactgtcagctgcattcgtacccttgtacgaatagcaaagaaggtgccatcttttgtatgccttgatcacatttttgaattggttgcccctttccgcaacatggacaaaccatggaaagttcgaattgaagctagcaggattcttattgatcttgagttacaccataaaggactcgatgcagctcttttgttgttcttgaaatatgtggacgaagaaaagtctttgcgaggttggattgctagagtactttttgatggttttgtatgctttgctatcttttgacatggaagctgttgaaggagcgacaaagttggctgttcatgtcttgcgtatatgtcaaacaagtattgttcctcacgccaatgatcaaataaattttggcaactctagttaggggtggtaacgggccatttaatttagcctagcaaatttacggatcgaatcaagttagggccggatcataaaacaatacaattttgaactaacaaaattaagggctttgttggtttgtgaagcaagtattagggtcatgatccattaccacccctaactctagttggtcttcttcatctgcttgctggcacaaaggcatacaataacatatttcttcgtcatcaagtgttctgcatattgcaagttgctgctggaaggtccccaacgttatttggtgttccaaaggtcctcacaccccctctggtggtcaactacatcttcagtgatcaacacactaaagatgattcctcaattcctcaaccatcatagtctcaggaaccttccactagcactcctagtgtccgggaggtcttaccgacctctggacccactcaagatgctgataattatcttactgcagtgaaagaaggaatgtggtcaaaattagggtgaagcttactgcatcttccagtaaagcatctgatgctgaccatagaggccattctgatggcgcaagaaatgaaaatgaaccgggtcaatgcagctcaatgtcaatggatgcccccatggctggagcagcaaatgaaccattaaatgtaagcaatcataacattgaggaacaaaactcatgtcacgaccttggatcaaggatgtcggcaagtgttagcaatgctaaactaatggacagacatgatatttccaaggagctacagtgcactgctgattccaggctggatactgttcccaaggatcagttctctcctgccattaatccgccggaagttttagacaaacctggcagtcagcttgaaggtgtctccaactatgatgtaaaccaagctccagagactgaacggagtggaaacagaagagagagaaaaaaacaagaaagataaaaagctgaaacgtgacgaaaaactagataaaaaaatatgacccagagtatctagagaaaagctccttaataagaaggaaaagaaagagttggccagaaagcagctagaaggtgaagagctacccctgaacagcggagagcagtgaacccttcaggttcacaggaagttttgccttcaaggccaccagctccagttctaagtgttgaaacacctgttcgaatctctgaaccccaggtatcaagcaaggaaacagctgtagatactgcacgtgcagcagccaaaccaaggataaagatcagagtcaagcccttggtaagaaaatctgaagggaattaaaaaagattgtagaattgtggccagtctgccatcatttgtaaggattactgtacagcaggaaaaatgcgggtttagttattttgtgaatggctgatgtatcctgtaaaaaaacattgctctgctctagtaatttctggggtaatcgaaatctgagttctagggtagtccatattttctgctgcagttgctttagtatctcagcgcttattatctcacaggttttaagtgtttgttcgatttgctgggcctaaaactaaaactgaaggatcgctgtgctcaatttgtagctgttgatgcattcatttcagatttgaggaggcttgacggaattaactgctgagcttgctcaa

SEQ ID NO: 215408 - DNA, 4700 bp, Zea Mays
gttggagccagcctaagtccataacagcttctgcattgccatcaaccatagaatgagaaagaccgtcttcctcatcaactacgcgccgacgcgcggacgctcccgtccccatcgcgacccgtgcgccgggtccacgctgaaccctttcaccggggcggcgaaagatatcagccgcgacgccgacgggctcgagcgccggtgagcgctcgcgcacccgggccaataaactggcaccggctcctcctctcgcgtcgcagagcctagcctcgggatgacgtggcgtaccacaacaccaccacacctcactcagccctgcgggtctccgaccaaccatttctagaagcctccaaaccctagcgcaggaggaagaggagttaggaggagctccagggatggcgaaggcgaggaagcagaagggtgacggtgccagtacgggaggaggcgccaccgtgctccaccagaagctctgcctctccatcgacatggagaaccagctgatctacgggtacactgagataaaagttctagctgaaaacaacagatttgctctacatgctgacaatatgacgattcagagcatttgatggatggtgcaactgttgagtttgactattcccctcattggaaaaatgaaagtgatcaaccgaattggtcttcagtatcatgtttgaagactgctgctgatgctgcatgttcaatgtatactttgtctctaaatcgagaagctacaccaaatcttattgtgtcatctgagagatcagtcaagtcaatgactgaacagcagttagatgaaaacagtgaaaagcatgaagaaaatagtggaaggcttgaagaacatggtggaaatcctgttcaaacttcctatgatcaaattgttaatggctgcagtggaagagggaatagaaaattctgcagtggaagaaggaaaggaaaaggaaaatgataaggaaaaagaagaggaaaatggaaatgagaagagcaaggaaactggaaatgagactgaatatgaaaaggtgaagaacataaaactggttcacatagattatattttggagaaggctgaaactggcgttcagttcgttggcaatgtcatgcgtagcagtagtcagacaaggcgggcacactgttggtttccttgtgttgatagtgccacagaacgctgtccatttgacctagaatttacagttagcatggatttcattgctgtcagcaatggtgacttgctttaccaggtctctagtaaggaagatccttcaaaaaaacttatgtgtataaattgaacactccagttagtccacagtggatatccttggttgttggcccacttgaagttcttcctgacagaatcacagaaatgacataaatgtctcacacatatgtttattccctgctttggcaaagcttcagaacactattgcatttttccacaatgcatacagctgttatgaagactatctttctgcaccatttcccttaggtttatacaatcacatttttcttccatctgaaatgacaatattaccagcaagcttaggagcctccacatgcatcctcagttctgatatcttgcatgatgagaaagttatatagatcaggtgcgtttgtttctcttattttactaccctgtcccctctgatctagaccaatgatttgacaccatactttttaatgagatccgaatgcgtggctgctatagcatgtgcttatcaattgtgcttattctttattaaactatttttcatatcagctgttgttttgaagccctcctttcactgagagcatttagtgtcagtaagcaatccatgaatgcataatttctgctccagtatttgtgttttaactaagttagattctggtttagatgcctatatgacactacattcttgttaagttgatcatttaattagtttggtacctccagcaaatactgtaaatatgtttatggaatatgttaaatacttctgtatgtttgcttgccttatattttgtattttttctgtatagggctttgtaaacctgtcatcctttggataggagtgcatgaaaatctgcaatccatgtgtctgaatcatgacctgctattacttttactttatcttcctaagcattaaccttgcttctttgtatccccttaactggtggcttgataacactttgtattatgcattaaccttgcttctttgtatccccttaattagtggctcttggtaatgctttgtacacctgcattacattatagtcaagtattatgtttcataccttgcagtctgcactaacttgtaaaatagttcagataattggcacaagaacgaaactggcttatgcccttgcaaagcaatggtttggaatatacacaagtgcagaggagtccagtgacggctaactgctcagtatgtgaatctgatgttagtggtgcaactgctttgagctctactgctgcttcaagtgatttatatggaactcaagcaatcggttcatatgggaaagttcgttcattgaaagctgtagctgttttcaaatgttggagaagcagatgggaccagactcatttcggaagattttgcaggtgatagtggctccaagtcgtgcataaaatctaggcatgagcttcctagcctctcttctcaagcaaattgatcggttcttgcaatttgacaactttatgcctggttataatggggtcttgactgtcagctgcattcgtacccttgtacgaatagcaaagaaggtgccatcttttgtatgccttgatcacatttttgaattggttgcccctttccgcaacatggacaaaccatggaaagttcgaattgaagctagcaggattcttattgatcttgagttacaccataaaggactcgatgcagctcttttgttgttcttgaaatatgtggacgaagaaaagtctttgcgaggttggattgctagagtactttttgatggttttgtatgctttgctatcttttgacatggaagctgttgaaggagcgacaaagttggctgttcatgtcttgcgtatatgtcaaacaagtattgttcctcacgccaatgatcaaataaattttggcaactctagttaggggtggtaacgggccatttaatttagcctagcaaatttacggatcgaatcaagttagggccggatcataaaacaatacaattttgaactaacaaaattaagggctttgttggtttgtgaagcaagtattagggtcatgatccattaccacccctaactctagttggtcttcttcatctgcttgctggcacaaaggcatacaataacatatttcttcgtcatcaagtgttctgcatattgcaagttgctgctggaaggtccccaacgttatttggtgttccaaaggtcctcacaccccctctggtggtcaactacatcttcagtgatcaacacactaaagatgattcctcaattcctcaaccatcatagtctcaggaaccttccactagcactcctagtgtccgggaggtcttaccgacctctggacccactcaagatgctgataattatcttactgcagtgaaagaaggaatgtggtcaaaattagggtgaagcttactgcatcttccagtaaagcatctgatgctgaccatagaggccattctgatggcgcaagaaatgaaaatgaaccgggtcaatgcagctcaatgtcaatggatgcccccatggctggagcagcaaatgaaccattaaatgtaagcaatcataacattgaggaacaaaactcatgtcacgaccttggatcaaggatgtcggcaagtgttagcaatgctaaactaatggacagacatgatatttccaaggagctacagtgcactgctgattccaggctggatactgttcccaaggatcagttctctcctgccattaatccgccggaagttttagacaaacctggcagtcagcttgaaggtgtctccaactatgatgtaaaccaagctccagagactgaacggagtggaaacagaagagagagaaaaaaacaagaaagataaaaagctgaaacgtgacgaaaaactagataaaaaaatatgacccagagtatctagagaaaagctccttaataagaaggaaaagaaagagttggccagaaagcagctagaaggtgaagagctacccctgaacagcggagagcagtgaacccttcaggttcacaggaagttttgccttcaaggccaccagctccagttctaagtgttgaaacacctgttcgaatctctgaaccccaggtatcaagcaaggaaacagctgtagatactgcacgtgcagcagccaaaccaaggataaagatcagagtcaagcccttggtaagaaaatctgaagggaattaaaaaagattgtagaattgtggccagtctgccatcatttgtaaggattactgtacagcaggaaaaatgcgggtttagttattttgtgaatggctgatgtatcctgtaaaaaaacattgctctgctctagtaatttctggggtaatcgaaatctgagttctagggtagtccatattttctgctgcagttgctttagtatctcagcgcttattatctcacaggttttaagtgtttgttcgatttgctgggcctaaaactaaaactgaaggatcgctgtgctcaatttgtagctgttgatgcattcatttcagatttgaggaggcttgacggaattaactgctgagcttgctcaa

SEQ ID NO: 215409 - DNA, 4347 bp, Zea Mays
gtccataacagcttctgcattgccatcaaccatagaatgagaaagaccgtcttcctcatcaactacgcgccgacgcgcggacgctcccgtccccatcgcgacccgtgcgccgggtccacgctgaaccctttcaccggggcggcgaaagatatcagccgcgacgccgacgggctcgagcgccggtgagcgctcgcgcacccgggccaataaactggcaccggctcctcctctcgcgtcgcagagcctagcctcgggatgacgtggcgtaccacaacaccaccacacctcactcagccctgcgggtctccgaccaaccatttctagaagcctccaaaccctagcgcaggaggaagaggagttaggaggagctccagggatggcgaaggcgaggaagcagaagggtgacggtgccagtacgggaggaggcgccaccgtgctccaccagaagctctgcctctccatcgacatggagaaccagctgatctacgggtacactgagataaaagttctagctgaaaacaacagatttgctctacatgctgacaatatgacgattcagagcatttgatggatggtgcaactgttgagtttgactattcccctcattggaaaaatgaaagtgatcaaccgaattggtcttcagtatcatgtttgaagactgctgctgatgctgcatgttcaatgtatactttgtctctaaatcgagaagctacaccaaatcttattgtgtcatctgagagatcagtcaagtcaatgactgaacagcagttagatgaaaacagtgaaaagcatgaagaaaatagtggaaggcttgaagaacatggtggaaatcctgttcaaacttcctatgatcaaattgttaatggctgcagtggaagagggaatagaaaattctgcagtggaagaaggaaaggaaaaggaaaatgataaggaaaaagaagaggaaaatggaaatgagaagagcaaggaaactggaaatgagactgaatatgaaaaggtgaagaacataaaactggttcacatagattatattttggagaaggctgaaactggcgttcagttcgttggcaatgtcatgcgtagcagtagtcagacaaggcgggcacactgttggtttccttgtgttgatagtgccacagaacgctgtccatttgacctagaatttacagttagcatggatttcattgctgtcagcaatggtgacttgctttaccaggtctctagtaaggaagatccttcaaaaaaacttatgtgtataaattgaacactccagttagtccacagtggatatccttggttgttggcccacttgaagttcttcctgacagaatcacagaaatgacataaatgtctcacacatatgtttattccctgctttggcaaagcttcagaacactattgcatttttccacaatgcatacagctgttatgaagactatctttctgcaccatttcccttaggccccgtttgtttcctttcatttcgaggaattggaatcttactaacagaataggctaattttttagaatatgacattccaccactttccaaagttatcatataagcctatctcaaattcatgaggtgagagatggaaattgattctatagatttacatgctaattttccgatgtacaacttatagcacactcttctacctgcacctctataacataaatatactatataactaactctctcatatgatttaggataatatacaaatatattatatgtataaatatataaacttaattagttttgtctaaattataattattaaaatggaattcaattccaacgaaacaaacgggcccttaggtttatacaatcacatttttcttccatctgaaatgacaatattaccagcaagcttaggagcctccacatgcatcctcagttctgatatcttgcatgatgagaaagttatatagatcagataattggcacaagaacgaaactggcttatgcccttgcaaagcaatggtttggaatatacacaagtgcagaggagtccagtgacggctaactgctcagtatgtgaatctgatgttagtggtgcaactgctttgagctctactgctgcttcaagtgatttatatggaactcaagcaatcggttcatatgggaaagttcgttcattgaaagctgtagctgttttcaaatgttggagaagcagatgggaccagactcatttcggaagattttgcaggtgatagtggctccaagtcgtgcataaaatctaggcatgagcttcctagcctctcttctcaagcaaattgatcggttcttgcaatttgacaactttatgcctggttataatggggtcttgactgtcagctgcattcgtacccttgtacgaatagcaaagaaggtgccatcttttgtatgccttgatcacatttttgaattggttgcccctttccgcaacatggacaaaccatggaaagttcgaattgaagctagcaggattcttattgatcttgagttacaccataaaggactcgatgcagctcttttgttgttcttgaaatatgtggacgaagaaaagtctttgcgaggttggattgctagagtactttttgatggttttgtatgctttgctatcttttgacatggaagctgttgaaggagcgacaaagttggctgttcatgtcttgcgtatatgtcaaacaagtattgttcctcacgccaatgatcaaataaattttggcaactctagttaggggtggtaacgggccatttaatttagcctagcaaatttacggatcgaatcaagttagggccggatcataaaacaatacaattttgaactaacaaaattaagggctttgttggtttgtgaagcaagtattagggtcatgatccattaccacccctaactctagttggtcttcttcatctgcttgctggcacaaaggcatacaataacatatttcttcgtcatcaagtgttctgcatattgcaagttgctgctggaaggtccccaacgttatttggtgttccaaaggtcctcacaccccctctggtggtcaactacatcttcagtgatcaacacactaaagatgattcctcaattcctcaaccatcatagtctcaggaaccttccactagcactcctagtgtccgggaggtcttaccgacctctggacccactcaagatgctgataattatcttactgcagtgaaagaaggaatgtggtcaaaattagggtgaagcttactgcatcttccagtaaagcatctgatgctgaccatagaggccattctgatggcgcaagaaatgaaaatgaaccgggtcaatgcagctcaatgtcaatggatgcccccatggctggagcagcaaatgaaccattaaatgtaagcaatcataacattgaggaacaaaactcatgtcacgaccttggatcaaggatgtcggcaagtgttagcaatgctaaactaatggacagacatgatatttccaaggagctacagtgcactgctgattccaggctggatactgttcccaaggatcagttctctcctgccattaatccgccggaagttttagacaaacctggcagtcagcttgaaggtgtctccaactatgatgtaaaccaagctccagagactgaacggagtggaaacagaagagagagaaaaaaacaagaaagataaaaagctgaaacgtgacgaaaaactagataaaaaaatatgacccagagtatctagagaaaagctccttaataagaaggaaaagaaagagttggccagaaagcagctagaaggtgaagagctacccctgaacagcggagagcagtgaacccttcaggttcacaggaagttttgccttcaaggccaccagctccagttctaagtgttgaaacacctgttcgaatctctgaaccccaggtatcaagcaaggaaacagctgtagatactgcacgtgcagcagccaaaccaaggataaagatcagagtcaagcccttggtaagaaaatctgaagggaattaaaaaagattgtagaattgtggccagtctgccatcatttgtaaggattactgtacagcaggaaaaatgcgggtttagttattttgtgaatggctgatgtatcctgtaaaaaaacattgctctgctctagtaatttctggggtaatcgaaatctgagttctagggtagtccatattttctgctgcagttgctttagtatctcagcgcttattatctcacaggttttaagtgtttgttcgatttgctgggcctaaaactaaaactgaaggatcgctgtgctcaatttgtagctgttgatgcattcatttcagatttgaggaggcttgacggaattaactgctgagcttgctcaa

SEQ ID NO: 215410 - DNA, 3341 bp, Zea Mays
cttctgcattgccatcaaccatagaatgagaaagaccgtcttcctcatcaactacgcgccgacgcgcggacgctcccgtccccatcgcgacccgtgcgccgggtccacgctgaaccctttcaccggggcggcgaaagatatcagccgcgacgccgacgggctcgagcgccggtgagcgctcgcgcacccgggccaataaactggcaccggctcctcctctcgcgtcgcagagcctagcctcgggatgacgtggcgtaccacaacaccaccacacctcactcagccctgcgggtctccgaccaaccatttctagaagcctccaaaccctagcgcaggaggaagaggagttaggaggagctccagggatggcgaaggcgaggaagcagaagggtgacggtgccagtacgggaggaggcgccaccgtgctccaccagaagctctgcctctccatcgacatggagaaccagctgatctacgggtacactgagataaaagttctagctgaaaacaacagatttgctctacatgctgacaatatgacgattcagagcatttgatggatggtgcaactgttgagtttgactattcccctcattggaaaaatgaaagtgatcaaccgaattggtcttcagtatcatgtttgaagactgctgctgatgctgcatgttcaatgtatactttgtctctaaatcgagaagctacaccaaatcttattgtgtcatctgagagatcagtcaagtcaatgactgaacagcagttagatgaaaacagtgaaaagcatgaagaaaatagtggaaggcttgaagaacatggtggaaatcctgttcaaacttcctatgatcaaattgttaatggctgcagtggaagagggaatagaaaattctgcagtggaagaaggaaaggaaaaggaaaatgataaggaaaaagaagaggaaaatggaaatgagaagagcaaggaaactggaaatgagactgaatatgaaaaggtgaagaacataaaactggttcacatagattatattttggagaaggctgaaactggcgttcagttcgttggcaatgtcatgcgtagcagtagtcagacaaggcgggcacactgttggtttccttgtgttgatagtgccacagaacgctgtccatttgacctagaatttacagttagcatggatttcattgctgtcagcaatggtgacttgctttaccaggtctctagtaaggaagatccttcaaaaaaacttatgtgtataaattgaacactccagttagtccacagtggatatccttggttgttggcccacttgaagttcttcctgacagaatcacagaaatgacataaatgtctcacacatatgtttattccctgctttggcaaagcttcagaacactattgcatttttccacaatgcatacagctgttatgaagactatctttctgcaccatttcccttaggtttatacaatcacatttttcttccatctgaaatgacaatattaccagcaagcttaggagcctccacatgcatcctcagttctgatatcttgcatgatgagaaagttatatagatcaggtgcgtttgtttctcttattttactaccctgtcccctctgatctagaccaatgatttgacaccatactttttaatgagatccgaatgcgtggctgctatagcatgtgcttatcaattgtgcttattctttattaaactatttttcatatcagctgttgttttgaagccctcctttcactgagagcatttagtgtcagtaagcaatccatgaatgcataatttctgctccagtatttgtgttttaactaagttagattctggtttagatgcctatatgacactacattcttgttaagttgatcatttaattagtttggtacctccagcaaatactgtaaatatgtttatggaatatgttaaatacttctgtatgtttgcttgccttatattttgtattttttctgtatagggctttgtaaacctgtcatcctttggataggagtgcatgaaaatctgcaatccatgtgtctgaatcatgacctgctattacttttactttatcttcctaagcattaaccttgcttctttgtatccccttaactggtggcttgataacactttgtattatgcattaaccttgcttctttgtatccccttaattagtggctcttggtaatgctttgtacacctgcattacattatagtcaagtattatgtttcataccttgcagtctgcactaacttgtaaaatagttcagataattggcacaagaacgaaactggcttatgcccttgcaaagcaatggtttggaatatacacaagtgcagaggagtccagtgacggctaactgctcagtatgtgaatctgatgttagtggtgcaactgctttgagctctactgctgcttcaagtgatttatatggaactcaagcaatcggttcatatgggaaagttcgttcattgaaagctgtagctgttttcaaatgttggagaagcagatgggaccagactcatttcggaagattttgcaggtgatagtggctccaagtcgtgcataaaatctaggcatgagcttcctagcctctcttctcaagcaaattgatcggttcttgcaatttgacaactttatgcctggttataatggggtcttgactgtcagctgcattcgtacccttgtacgaatagcaaagaaggtgccatcttttgtatgccttgatcacatttttgaattggttgcccctttccgcaacatggacaaaccatggaaagttcgaattgaagctagcaggattcttattgatcttgagttacaccataaaggactcgatgcagctcttttgttgttcttgaaatatgtggacgaagaaaagtctttgcgaggttggattgctagagtactttttgatggttttgtatgctttgctatcttttgacatggaagctgttgaaggagcgacaaagttggctgttcatgtcttgcgtatatgtcaaacaagtattgttcctcacgccaatgatcaaataaattttggcaactctagttaggggtggtaacgggccatttaatttagcctagcaaatttacggatcgaatcaagttagggccggatcataaaacaatacaattttgaactaacaaaattaagggctttgttggtttgtgaagcaagtattagggtcatgatccattaccacccctaactctagttggtcttcttcatctgcttgctggcacaaaggcatacaataacatatttcttcgtcatcaagtgttctgcatattgcaagttgctgctggaagttccagcatacaccctataaggacaatgtcca

SEQ ID NO: 215411 - DNA, 4421 bp, Zea Mays
cttctgcattgccatcaaccatagaatgagaaagaccgtcttcctcatcaactacgcgccgacgcgcggacgctcccgtccccatcgcgacccgtgcgccgggtccacgctgaaccctttcaccggggcggcgaaagatatcagccgcgacgccgacgggctcgagcgccggtgagcgctcgcgcacccgggccaataaactggcaccggctcctcctctcgcgtcgcagagcctagcctcgggatgacgtggcgtaccacaacaccaccacacctcactcagccctgcgggtctccgaccaaccatttctagaagcctccaaaccctagcgcaggaggaagaggagttaggaggagctccagggatggcgaaggcgaggaagcagaagggtgacggtgccagtacgggaggaggcgccaccgtgctccaccagaagctctgcctctccatcgacatggagaaccagctgatctacgggtacactgagataaaagttctagctgaaaacaacagatttgctctacatgctgacaatatgacgattcagagcatttgatggatggtgcaactgttgagtttgactattcccctcattggaaaaatgaaagtgatcaaccgaattggtcttcagtatcatgtttgaagactgctgctgatgctgcatgttcaatgtatactttgtctctaaatcgagaagctacaccaaatcttattgtgtcatctgagagatcagtcaagtcaatgactgaacagcagttagatgaaaacagtgaaaagcatgaagaaaatagtggaaggcttgaagaacatggtggaaatcctgttcaaacttcctatgatcaaattgttaatggctgcagtggaagagggaatagaaaattctgcagtggaagaaggaaaggaaaaggaaaatgataaggaaaaagaagaggaaaatggaaatgagaagagcaaggaaactggaaatgagactgaatatgaaaaggtgaagaacataaaactggttcacatagattatattttggagaaggctgaaactggcgttcagttcgttggcaatgtcatgcgtagcagtagtcagacaaggcgggcacactgttggtttccttgtgttgatagtgccacagaacgctgtccatttgacctagaatttacagttagcatggatttcattgctgtcagcaatggtgacttgctttaccagttagtccacagtggatatccttggttgttggcccacttgaagttcttcctgacagaatcacagaaatgacataaatgtctcacacatatgtttattccctgctttggcaaagcttcagaacactattgcatttttccacaatgcatacaggtgctgatcaatcttttttttttctgtgaaaagtgcttagattggtgttgattttattagtatctcaataagcttattttttaattgatttctgaaatttgcatttcttttgcagctgttatgaagactatctttctgcaccatttcccttaggccccgtttgtttcctttcatttcgaggaattggaatcttactaacagaataggctaattttttagaatatgacattccaccactttccaaagttatcatataagcctatctcaaattcatgaggtgagagatggaaattgattctatagatttacatgctaattttccgatgtacaacttatagcacactcttctacctgcacctctataacataaatatactatataactaactctctcatatgatttaggataatatacaaatatattatatgtataaatatataaacttaattagttttgtctaaattataattattaaaatggaattcaattccaacgaaacaaacgggcccttaggtttatacaatcacatttttcttccatctgaaatgacaatattaccagcaagcttaggagcctccacatgcatcctcagttctgatatcttgcatgatgagaaagttatatagatcagtctgcactaacttgtaaaatagttcagataattggcacaagaacgaaactggcttatgcccttgcaaagcaatggtttggaatatacacaagtgcagaggagtccagtgacggctaactgctcagtatgtgaatctgatgttagtggtgcaactgctttgagctctactgctgcttcaagtgatttatatggaactcaagcaatcggttcatatgggaaagttcgttcattgaaagctgtagctgttttcaaatgttggagaagcagatgggaccagactcatttcggaagattttgcaggtgatagtggctccaagtcgtgcataaaatctaggcatgagcttcctagcctctcttctcaagcaaattgatcggttcttgcaatttgacaactttatgcctggttataatggggtcttgactgtcagctgcattcgtacccttgtacgaatagcaaagaaggtgccatcttttgtatgccttgatcacatttttgaattggttgcccctttccgcaacatggacaaaccatggaaagttcgaattgaagctagcaggattcttattgatcttgagttacaccataaaggactcgatgcagctcttttgttgttcttgaaatatgtggacgaagaaaagtctttgcgaggttggattgctagagtactttttgatggttttgtatgctttgctatcttttgacatggaagctgttgaaggagcgacaaagttggctgttcatgtcttgcgtatatgtcaaacaagtattgttcctcacgccaatgatcaaataaattttggcaactctagttaggggtggtaacgggccatttaatttagcctagcaaatttacggatcgaatcaagttagggccggatcataaaacaatacaattttgaactaacaaaattaagggctttgttggtttgtgaagcaagtattagggtcatgatccattaccacccctaactctagttggtcttcttcatctgcttgctggcacaaaggcatacaataacatatttcttcgtcatcaagtgttctgcatattgcaagttgctgctggaaggtccccaacgttatttggtgttccaaaggtcctcacaccccctctggtggtcaactacatcttcagtgatcaacacactaaagatgattcctcaattcctcaaccatcatagtctcaggaaccttccactagcactcctagtgtccgggaggtcttaccgacctctggacccactcaagatgctgataattatcttactgcagtgaaagaaggaatgtggtcaaaattagggtgaagcttactgcatcttccagtaaagcatctgatgctgaccatagaggccattctgatggcgcaagaaatgaaaatgaaccgggtcaatgcagctcaatgtcaatggatgcccccatggctggagcagcaaatgaaccattaaatgtaagcaatcataacattgaggaacaaaactcatgtcacgaccttggatcaaggatgtcggcaagtgttagcaatgctaaactaatggacagacatgatatttccaaggagctacagtgcactgctgattccaggctggatactgttcccaaggatcagttctctcctgccattaatccgccggaagttttagacaaacctggcagtcagcttgaaggtgtctccaactatgatgtaaaccaagctccagagactgaacggagtggaaacagaagagagagaaaaaaacaagaaagataaaaagctgaaacgtgacgaaaaactagataaaaaaatatgacccagagtatctagagaaaagctccttaataagaaggaaaagaaagagttggccagaaagcagctagaaggtgaagagctacccctgaacagcggagagcagtgaacccttcaggttcacaggaagttttgccttcaaggccaccagctccagttctaagtgttgaaacacctgttcgaatctctgaaccccaggtatcaagcaaggaaacagctgtagatactgcacgtgcagcagccaaaccaaggataaagatcagagtcaagcccttggtaagaaaatctgaagggaattaaaaaagattgtagaattgtggccagtctgccatcatttgtaaggattactgtacagcaggaaaaatgcgggtttagttattttgtgaatggctgatgtatcctgtaaaaaaacattgctctgctctagtaatttctggggtaatcgaaatctgagttctagggtagtccatattttctgctgcagttgctttagtatctcagcgcttattatctcacaggttttaagtgtttgttcgatttgctgggcctaaaactaaaactgaaggatcgctgtgctcaatttgtagctgttgatgcattcatttcagatttgaggaggcttgacggaattaactgctgagcttgctcaa

SEQ ID NO: 215412 - DNA, 4726 bp, Zea Mays
attgccatcaaccatagaatgagaaagaccgtcttcctcatcaactacgcgccgacgcgcggacgctcccgtccccatcgcgacccgtgcgccgggtccacgctgaaccctttcaccggggcggcgaaagatatcagccgcgacgccgacgggctcgagcgccggtgagcgctcgcgcacccgggccaataaactggcaccggctcctcctctcgcgtcgcagagcctagcctcgggatgacgtggcgtaccacaacaccaccacacctcactcagccctgcgggtctccgaccaaccatttctagaagcctccaaaccctagcgcaggaggaagaggagttaggaggagctccagggatggcgaaggcgaggaagcagaagggtgacggtgccagtacgggaggaggcgccaccgtgctccaccagaagctctgcctctccatcgacatggagaaccagctgatctacgggtacactgagataaaagttctagctgaaaacaacagatttgctctacatgctgacaatatgacgattcagagcatttgatggatggtgcaactgttgagtttgactattcccctcattggaaaaatgaaagtgatcaaccgaattggtcttcagtatcatgtttgaagactgctgctgatgctgcatgttcaatgtatactttgtctctaaatcgagaagctacaccaaatcttattgtgtcatctgagagatcagtcaagtcaatgactgaacagcagttagatgaaaacagtgaaaagcatgaagaaaatagtggaaggcttgaagaacatggtggaaatcctgttcaaacttcctatgatcaaattgttaatggctgcagtggaagagggaatagaaaattctgcagtggaagaaggaaaggaaaaggaaaatgataaggaaaaagaagaggaaaatggaaatgagaagagcaaggaaactggaaatgagactgaatatgaaaaggtgaagaacataaaactggttcacatagattatattttggagaaggctgaaactggcgttcagttcgttggcaatgtcatgcgtagcagtagtcagacaaggcgggcacactgttggtttccttgtgttgatagtgccacagaacgctgtccatttgacctagaatttacagttagcatggatttcattgctgtcagcaatggtgacttgctttaccagttagtccacagtggatatccttggttgttggcccacttgaagttcttcctgacagaatcacagaaatgacataaatgtctcacacatatgtttattccctgctttggcaaagcttcagaacactattgcatttttccacaatgcatacaggtgctgatcaatcttttttttttctgtgaaaagtgcttagattggtgttgattttattagtatctcaataagcttattttttaattgatttctgaaatttgcatttcttttgcagctgttatgaagactatctttctgcaccatttcccttaggccccgtttgtttcctttcatttcgaggaattggaatcttactaacagaataggctaattttttagaatatgacattccaccactttccaaagttatcatataagcctatctcaaattcatgaggtgagagatggaaattgattctatagatttacatgctaattttccgatgtacaacttatagcacactcttctacctgcacctctataacataaatatactatataactaactctctcatatgatttaggataatatacaaatatattatatgtataaatatataaacttaattagttttgtctaaattataattattaaaatggaattcaattccaacgaaacaaacgggcccttaggtttatacaatcacatttttcttccatctgaaatgacaatattaccagcaagcttaggagcctccacatgcatcctcagttctgatatcttgcatgatgagaaagttatatagatcaggtgcgtttgtttctcttattttactaccctgtcccctctgatctagaccaatgatttgacaccatactttttaatgagatccgaatgcgtggctgctatagcatgtgcttatcaattgtgcttattctttattaaactatttttcatatcagctgttgttttgaagccctcctttcactgagagcatttagtgtcagtaagcaatccatgaatgcataatttctgctccagtatttgtgttttaactaagttagattctggtttagatgcctatatgacactacattcttgttaagttgatcatttaattagtttggtacctccagcaaatactgtaaatatgtttatggaatatgttaaatacttctgtatgtttgcttgccttatattttgtattttttctgtatagggctttgtaaacctgtcatcctttggataggagtgcatgaaaatctgcaatccatgtgtctgaatcatgacctgctattacttttactttatcttcctaagcattaaccttgcttctttgtatccccttaactggtggcttgataacactttgtattatgcattaaccttgcttctttgtatccccttaattagtggctcttggtaatgctttgtacacctgcattacattatagtcaagtattatgtttcataccttgcagtctgcactaacttgtaaaatagttcagataattggcacaagaacgaaactggcttatgcccttgcaaagcaatggtttggaatatacacaagtgcagaggagtccagtgacggctaactgctcagtatgtgaatctgatgttagtggtgcaactgctttgagctctactgctgcttcaagtgatttatatggaactcaagcaatcggttcatatgggaaagttcgttcattgaaagctgtagctgttttcaaatgttggagaagcagatgggaccagactcatttcggaagattttgcaggtgatagtggctccaagtcgtgcataaaatctaggcatgagcttcctagcctctcttctcaagcaaattgatcggttcttgcaatttgacaactttatgcctggttataatggggtcttgactgtcagctgcattcgtacccttgtacgaatagcaaagaaggtgccatcttttgtatgccttgatcacatttttgaattggttgcccctttccgcaacatggacaaaccatggaaagttcgaattgaagctagcaggattcttattgatcttgagttacaccataaaggactcgatgcagctcttttgttgttcttgaaatatgtggacgaagaaaagtctttgcgaggcatacaataacatatttcttcgtcatcaagtgttctgcatattgcaagttgctgctggaaggtccccaacgttatttggtgttccaaaggtcctcacaccccctctggtggtcaactacatcttcagtgatcaacacactaaagatgattcctcaattcctcaaccatcatagtctcaggaaccttccactagcactcctagtgtccgggaggtcttaccgacctctggacccactcaagatgctgataattatcttactgcagtgaaagaaggaatgtggtcaaaattagggtgaagcttactgcatcttccagtaaagcatctgatgctgaccatagaggccattctgatggcgcaagaaatgaaaatgaaccgggtcaatgcagctcaatgtcaatggatgcccccatggctggagcagcaaatgaaccattaaatgtaagcaatcataacattgaggaacaaaactcatgtcacgaccttggatcaaggatgtcggcaagtgttagcaatgctaaactaatggacagacatgatatttccaaggagctacagtgcactgctgattccaggctggatactgttcccaaggatcagttctctcctgccattaatccgccggaagttttagacaaacctggcagtcagcttgaaggtgtctccaactatgatgtaaaccaagctccagagactgaacggagtggaaacagaagagagagaaaaaaacaagaaagataaaaagctgaaacgtgacgaaaaactagataaaaaaatatgacccagagtatctagagaaaagctccttaataagaaggaaaagaaagagttggccagaaagcagctagaaggtgaagagctacccctgaacagcggagagcagtgaacccttcaggttcacaggaagttttgccttcaaggccaccagctccagttctaagtgttgaaacacctgttcgaatctctgaaccccaggtatcaagcaaggaaacagctgtagatactgcacgtgcagcagccaaaccaaggataaagatcagagtcaagcccttggtaagaaaatctgaagggaattaaaaaagattgtagaattgtggccagtctgccatcatttgtaaggattactgtacagcaggaaaaatgcgggtttagttattttgtgaatggctgatgtatcctgtaaaaaaacattgctctgctctagtaatttctggggtaatcgaaatctgagttctagggtagtccatattttctgctgcagttgctttagtatctcagcgcttattatctcacaggttttaagtgtttgttcgatttgctgggcctaaaactaaaactgaaggatcgctgtgctcaatttgtagctgttgatgcattcatttcagatttgaggaggcttgacggaattaactgctgagcttgctcaa

SEQ ID NO: 215413 - DNA, 4117 bp, Zea Mays
catcaaccatagaatgagaaagaccgtcttcctcatcaactacgcgccgacgcgcggacgctcccgtccccatcgcgacccgtgcgccgggtccacgctgaaccctttcaccggggcggcgaaagatatcagccgcgacgccgacgggctcgagcgccggtgagcgctcgcgcacccgggccaataaactggcaccggctcctcctctcgcgtcgcagagcctagcctcgggatgacgtggcgtaccacaacaccaccacacctcactcagccctgcgggtctccgaccaaccatttctagaagcctccaaaccctagcgcaggaggaagaggagttaggaggagctccagggatggcgaaggcgaggaagcagaagggtgacggtgccagtacgggaggaggcgccaccgtgctccaccagaagctctgcctctccatcgacatggagaaccagctgatctacgggtacactgagataaaagttctagctgaaaacaacagatttgctctacatgctgacaatatgacgattcagagcatttgatggatggtgcaactgttgagtttgactattcccctcattggaaaaatgaaagtgatcaaccgaattggtcttcagtatcatgtttgaagactgctgctgatgctgcatgttcaatgtatactttgtctctaaatcgagaagctacaccaaatcttattgtgtcatctgagagatcagtcaagtcaatgactgaacagcagttagatgaaaacagtgaaaagcatgaagaaaatagtggaaggcttgaagaacatggtggaaatcctgttcaaacttcctatgatcaaattgttaatggctgcagtggaagagggaatagaaaattctgcagtggaagaaggaaaggaaaaggaaaatgataaggaaaaagaagaggaaaatggaaatgagaagagcaaggaaactggaaatgagactgaatatgaaaaggtgaagaacataaaactggttcacatagattatattttggagaaggctgaaactggcgttcagttcgttggcaatgtcatgcgtagcagtagtcagacaaggcgggcacactgttggtttccttgtgttgatagtgccacagaacgctgtccatttgacctagaatttacagttagcatggatttcattgctgtcagcaatggtgacttgctttaccagctgttatgaagactatctttctgcaccatttcccttaggccccgtttgtttcctttcatttcgaggaattggaatcttactaacagaataggctaattttttagaatatgacattccaccactttccaaagttatcatataagcctatctcaaattcatgaggtgagagatggaaattgattctatagatttacatgctaattttccgatgtacaacttatagcacactcttctacctgcacctctataacataaatatactatataactaactctctcatatgatttaggataatatacaaatatattatatgtataaatatataaacttaattagttttgtctaaattataattattaaaatggaattcaattccaacgaaacaaacgggcccttaggtttatacaatcacatttttcttccatctgaaatgacaatattaccagcaagcttaggagcctccacatgcatcctcagttctgatatcttgcatgatgagaaagttatatagatcagataattggcacaagaacgaaactggcttatgcccttgcaaagcaatggtttggaatatacacaagtgcagaggagtccagtgacggctaactgctcagtatgtgaatctgatgttagtggtgcaactgctttgagctctactgctgcttcaagtgatttatatggaactcaagcaatcggttcatatgggaaagttcgttcattgaaagctgtagctgttttcaaatgttggagaagcagatgggaccagactcatttcggaagattttgcaggtgatagtggctccaagtcgtgcataaaatctaggcatgagcttcctagcctctcttctcaagcaaattgatcggttcttgcaatttgacaactttatgcctggttataatggggtcttgactgtcagctgcattcgtacccttgtacgaatagcaaagaaggtgccatcttttgtatgccttgatcacatttttgaattggttgcccctttccgcaacatggacaaaccatggaaagttcgaattgaagctagcaggattcttattgatcttgagttacaccataaaggactcgatgcagctcttttgttgttcttgaaatatgtggacgaagaaaagtctttgcgaggttggattgctagagtactttttgatggttttgtatgctttgctatcttttgacatggaagctgttgaaggagcgacaaagttggctgttcatgtcttgcgtatatgtcaaacaagtattgttcctcacgccaatgatcaaataaattttggcaactctagttaggggtggtaacgggccatttaatttagcctagcaaatttacggatcgaatcaagttagggccggatcataaaacaatacaattttgaactaacaaaattaagggctttgttggtttgtgaagcaagtattagggtcatgatccattaccacccctaactctagttggtcttcttcatctgcttgctggcacaaaggcatacaataacatatttcttcgtcatcaagtgttctgcatattgcaagttgctgctggaaggtccccaacgttatttggtgttccaaaggtcctcacaccccctctggtggtcaactacatcttcagtgatcaacacactaaagatgattcctcaattcctcaaccatcatagtctcaggaaccttccactagcactcctagtgtccgggaggtcttaccgacctctggacccactcaagatgctgataattatcttactgcagtgaaagaaggaatgtggtcaaaattagggtgaagcttactgcatcttccagtaaagcatctgatgctgaccatagaggccattctgatggcgcaagaaatgaaaatgaaccgggtcaatgcagctcaatgtcaatggatgcccccatggctggagcagcaaatgaaccattaaatgtaagcaatcataacattgaggaacaaaactcatgtcacgaccttggatcaaggatgtcggcaagtgttagcaatgctaaactaatggacagacatgatatttccaaggagctacagtgcactgctgattccaggctggatactgttcccaaggatcagttctctcctgccattaatccgccggaagttttagacaaacctggcagtcagcttgaaggtgtctccaactatgatgtaaaccaagctccagagactgaacggagtggaaacagaagagagagaaaaaaacaagaaagataaaaagctgaaacgtgacgaaaaactagataaaaaaatatgacccagagtatctagagaaaagctccttaataagaaggaaaagaaagagttggccagaaagcagctagaaggtgaagagctacccctgaacagcggagagcagtgaacccttcaggttcacaggaagttttgccttcaaggccaccagctccagttctaagtgttgaaacacctgttcgaatctctgaaccccaggtatcaagcaaggaaacagctgtagatactgcacgtgcagcagccaaaccaaggataaagatcagagtcaagcccttggtaagaaaatctgaagggaattaaaaaagattgtagaattgtggccagtctgccatcatttgtaaggattactgtacagcaggaaaaatgcgggtttagttattttgtgaatggctgatgtatcctgtaaaaaaacattgctctgctctagtaatttctggggtaatcgaaatctgagttctagggtagtccatattttctgctgcagttgctttagtatctcagcgcttattatctcacaggttttaagtgtttgttcgatttgctgggcctaaaactaaaactgaaggatcgctgtgctcaatttgtagctgttgatgcattcatttcagatttgaggaggcttgacggaattaactgctgagcttgctcaa

SEQ ID NO: 215414 - DNA, 3677 bp, Zea Mays
catagaatgagaaagaccgtcttcctcatcaactacgcgccgacgcgcggacgctcccgtccccatcgcgacccgtgcgccgggtccacgctgaaccctttcaccggggcggcgaaagatatcagccgcgacgccgacgggctcgagcgccggtgagcgctcgcgcacccgggccaataaactggcaccggctcctcctctcgcgtcgcagagcctagcctcgggatgacgtggcgtaccacaacaccaccacacctcactcagccctgcgggtctccgaccaaccatttctagaagcctccaaaccctagcgcaggaggaagaggagttaggaggagctccagggatggcgaaggcgaggaagcagaagggtgacggtgccagtacgggaggaggcgccaccgtgctccaccagaagctctgcctctccatcgacatggagaaccagctgatctacgggtacactgagataaaagttctagctgaaaacaacagatttgctctacatgctgacaatatgacgattcagagcatttgatggatggtgcaactgttgagtttgactattcccctcattggaaaaatgaaagtgatcaaccgaattggtcttcagtatcatgtttgaagactgctgctgatgctgcatgttcaatgtatactttgtctctaaatcgagaagctacaccaaatcttattgtgtcatctgagagatcagtcaagtcaatgactgaacagcagttagatgaaaacagtgaaaagcatgaagaaaatagtggaaggcttgaagaacatggtggaaatcctgttcaaacttcctatgatcaaattgttaatggctgcagtggaagagggaatagaaaattctgcagtggaagaaggaaaggaaaaggaaaatgataaggaaaaagaagaggaaaatggaaatgagaagagcaaggaaactggaaatgagactgaatatgaaaaggtgaagaacataaaactggttcacatagattatattttggagaaggctgaaactggcgttcagttcgttggcaatgtcatgcgtagcagtagtcagacaaggcgggcacactgttggtttccttgtgttgatagtgccacagaacgctgtccatttgacctagaatttacagttagcatggatttcattgctgtcagcaatggtgacttgctttaccagctgttatgaagactatctttctgcaccatttcccttaggccccgtttgtttcctttcatttcgaggaattggaatcttactaacagaataggctaattttttagaatatgacattccaccactttccaaagttatcatataagcctatctcaaattcatgaggtgagagatggaaattgattctatagatttacatgctaattttccgatgtacaacttatagcacactcttctacctgcacctctataacataaatatactatataactaactctctcatatgatttaggataatatacaaatatattatatgtataaatatataaacttaattagttttgtctaaattataattattaaaatggaattcaattccaacgaaacaaacgggcccttaggtttatacaatcacatttttcttccatctgaaatgacaatattaccagcaagcttaggagcctccacatgcatcctcagttctgatatcttgcatgatgagaaagttatatagatcaggtgcgtttgtttctcttattttactaccctgtcccctctgatctagaccaatgatttgacaccatactttttaatgagatccgaatgcgtggctgctatagcatgtgcttatcaattgtgcttattctttattaaactatttttcatatcagctgttgttttgaagccctcctttcactgagagcatttagtgtcagtaagcaatccatgaatgcataatttctgctccagtatttgtgttttaactaagttagattctggtttagatgcctatatgacactacattcttgttaagttgatcatttaattagtttggtacctccagcaaatactgtaaatatgtttatggaatatgttaaatacttctgtatgtttgcttgccttatattttgtattttttctgtatagggctttgtaaacctgtcatcctttggataggagtgcatgaaaatctgcaatccatgtgtctgaatcatgacctgctattacttttactttatcttcctaagcattaaccttgcttctttgtatccccttaactggtggcttgataacactttgtattatgcattaaccttgcttctttgtatccccttaattagtggctcttggtaatgctttgtacacctgcattacattatagtcaagtattatgtttcataccttgcagtctgcactaacttgtaaaatagttcagataattggcacaagaacgaaactggcttatgcccttgcaaagcaatggtttggaatatacacaagtgcagaggagtccagtgacggctaactgctcagtatgtgaatctgatgttagtggtgcaactgctttgagctctactgctgcttcaagtgatttatatggaactcaagcaatcggttcatatgggaaagttcgttcattgaaagctgtagctgttttcaaatgttggagaagcagatgggaccagactcatttcggaagattttgcaggtgatagtggctccaagtcgtgcataaaatctaggcatgagcttcctagcctctcttctcaagcaaattgatcggttcttgcaatttgacaactttatgcctggttataatggggtcttgactgtcagctgcattcgtacccttgtacgaatagcaaagaaggatcacatttttgaattggttgcccctttccgcaacatggacaaaccatggaaagttcgaattgaagctagcaggattcttattgatcttgagttacaccataaaggactcgatgcagctcttttgttgttcttgaaatatgtggacgaagaaaagtctttgcgaggttggattgctagagtactttttgatggttttgtatgctttgctatcttttgacatggaagctgttgaaggagcgacaaagttggctgttcatgtcttgcgtatatgtcaaacaagtattgttcctcacgccaatgatcaaataaattttggcaactctagttaggggtggtaacgggccatttaatttagcctagcaaatttacggatcgaatcaagttagggccggatcataaaacaatacaattttgaactaacaaaattaagggctttgttggtttgtgaagcaagtattagggtcatgatccattaccacccctaactctagttggtcttcttcatctgcttgctggcacaaaggcatacaataacatatttcttcgtcatcaagtgttctgcatattgcaagttgctgctggaaggttagtgagtttgttattgcatatgtattcattattttgtttcgttgattacttgttattgcattgacatctgtactacataaagcaccagttttcacggttcaaatttccaccgtcgtcgtgctctcccgcatttaaatggtaaaaacgctatttttttcacaaatggggattcaaaccatgattgttggctctaaacccacttaggcaacaatgttttattttatactctatacttaagcgtaaatggaaac

SEQ ID NO: 215415 - DNA, 4643 bp, Zea Mays
gagaaagaccgtcttcctcatcaactacgcgccgacgcgcggacgctcccgtccccatcgcgacccgtgcgccgggtccacgctgaaccctttcaccggggcggcgaaagatatcagccgcgacgccgacgggctcgagcgccggtacactgagataaaagttctagctgaaaacaacagatttgctctacatgctgacaatatgacgattcagagcatttgatggatggtgcaactgttgagtttgactattcccctcattggaaaaatgaaagtgatcaaccgaattggtcttcagtatcatgtttgaagactgctgctgatgctgcatgttcaatgtatactttgtctctaaatcgagaagctacaccaaatcttattgtgtcatctgagagatcagtcaagtcaatgactgaacagcagttagatgaaaacagtgaaaagcatgaagaaaatagtggaaggcttgaagaacatggtggaaatcctgttcaaacttcctatgatcaaattgttaatggctgcagtggaagagggaatagaaaattctgcagtggaagaaggaaaggaaaaggaaaatgataaggaaaaagaagaggaaaatggaaatgagaagagcaaggaaactggaaatgagactgaatatgaaaaggtgaagaacataaaactggttcacatagattatattttggagaaggctgaaactggcgttcagttcgttggcaatgtcatgcgtagcagtagtcagacaaggcgggcacactgttggtttccttgtgttgatagtgccacagaacgctgtccatttgacctagaatttacagttagcatggatttcattgctgtcagcaatggtgacttgctttaccagttagtccacagtggatatccttggttgttggcccacttgaagttcttcctgacagaatcacagaaatgacataaatgtctcacacatatgtttattccctgctttggcaaagcttcagaacactattgcatttttccacaatgcatacagctgttatgaagactatctttctgcaccatttcccttaggccccgtttgtttcctttcatttcgaggaattggaatcttactaacagaataggctaattttttagaatatgacattccaccactttccaaagttatcatataagcctatctcaaattcatgaggtgagagatggaaattgattctatagatttacatgctaattttccgatgtacaacttatagcacactcttctacctgcacctctataacataaatatactatataactaactctctcatatgatttaggataatatacaaatatattatatgtataaatatataaacttaattagttttgtctaaattataattattaaaatggaattcaattccaacgaaacaaacgggcccttaggtttatacaatcacatttttcttccatctgaaatgacaatattaccagcaagcttaggagcctccacatgcatcctcagttctgatatcttgcatgatgagaaagttatatagatcaggtgcgtttgtttctcttattttactaccctgtcccctctgatctagaccaatgatttgacaccatactttttaatgagatccgaatgcgtggctgctatagcatgtgcttatcaattgtgcttattctttattaaactatttttcatatcagctgttgttttgaagccctcctttcactgagagcatttagtgtcagtaagcaatccatgaatgcataatttctgctccagtatttgtgttttaactaagttagattctggtttagatgcctatatgacactacattcttgttaagttgatcatttaattagtttggtacctccagcaaatactgtaaatatgtttatggaatatgttaaatacttctgtatgtttgcttgccttatattttgtattttttctgtatagggctttgtaaacctgtcatcctttggataggagtgcatgaaaatctgcaatccatgtgtctgaatcatgacctgctattacttttactttatcttcctaagcattaaccttgcttctttgtatccccttaactggtggcttgataacactttgtattatgcattaaccttgcttctttgtatccccttaattagtggctcttggtaatgctttgtacacctgcattacattatagtcaagtattatgtttcataccttgcagtctgcactaacttgtaaaatagttcagataattggcacaagaacgaaactggcttatgcccttgcaaagcaatggtttggaatatacacaagtgcagaggagtccagtgacggctaactgctcagtatgtgaatctgatgttagtggtgcaactgctttgagctctactgctgcttcaagtgatttatatggaactcaagcaatcggttcatatgggaaagttcgttcattgaaagctgtagctgttttcaaatgttggagaagcagatgggaccagactcatttcggaagattttgcaggtgatagtggctccaagtcgtgcataaaatctaggcatgagcttcctagcctctcttctcaagcaaattgatcggttcttgcaatttgacaactttatgcctggttataatggggtcttgactgtcagctgcattcgtacccttgtacgaatagcaaagaaggtgccatcttttgtatgccttgatcacatttttgaattggttgcccctttccgcaacatggacaaaccatggaaagttcgaattgaagctagcaggattcttattgatcttgagttacaccataaaggactcgatgcagctcttttgttgttcttgaaatatgtggacgaagaaaagtctttgcgaggttggattgctagagtactttttgatggttttgtatgctttgctatcttttgacatggaagctgttgaaggagcgacaaagttggctgttcatgtcttgcgtatatgtcaaacaagtattgttcctcacgccaatgatcaaataaattttggcaactctagttaggggtggtaacgggccatttaatttagcctagcaaatttacggatcgaatcaagttagggccggatcataaaacaatacaattttgaactaacaaaattaagggctttgttggtttgtgaagcaagtattagggtcatgatccattaccacccctaactctagttggtcttcttcatctgcttgctggcacaaaggcatacaataacatatttcttcgtcatcaagtgttctgcatattgcaagttgctgctggaaggtccccaacgttatttggtgttccaaaggtcctcacaccccctctggtggtcaactacatcttcagtgatcaacacactaaagatgattcctcaattcctcaaccatcatagtctcaggaaccttccactagcactcctagtgtccgggaggtcttaccgacctctggacccactcaagatgctgataattatcttactgcagtgaaagaaggaatgtggtcaaaattagggtgaagcttactgcatcttccagtaaagcatctgatgctgaccatagaggccattctgatggcgcaagaaatgaaaatgaaccgggtcaatgcagctcaatgtcaatggatgcccccatggctggagcagcaaatgaaccattaaatgtaagcaatcataacattgaggaacaaaactcatgtcacgaccttggatcaaggatgtcggcaagtgttagcaatgctaaactaatggacagacatgatatttccaaggagctacagtgcactgctgattccaggctggatactgttcccaaggatcagttctctcctgccattaatccgccggaagttttagacaaacctggcagtcagcttgaaggtgtctccaactatgatgtaaaccaagctccagagactgaacggagtggaaacagaagagagagaaaaaaacaagaaagataaaaagctgaaacgtgacgaaaaactagataaaaaaatatgacccagagtatctagagaaaagctccttaataagaaggaaaagaaagagttggccagaaagcagctagaaggtgaagagctacccctgaacagcggagagcagtgaacccttcaggttcacaggaagttttgccttcaaggccaccagctccagttctaagtgttgaaacacctgttcgaatctctgaaccccaggtatcaagcaaggaaacagctgtagatactgcacgtgcagcagccaaaccaaggataaagatcagagtcaagcccttggtaagaaaatctgaagggaattaaaaaagattgtagaattgtggccagtctgccatcatttgtaaggattactgtacagcaggaaaaatgcgggtttagttattttgtgaatggctgatgtatcctgtaaaaaaacattgctctgctctagtaatttctggggtaatcgaaatctgagttctagggtagtccatattttctgctgcagttgctttagtatctcagcgcttattatctcacaggttttaagtgtttgttcgatttgctgggcctaaaactaaaactgaaggatcgctgtgctcaatttgtagctgttgatgcattcatttcagatttgaggaggcttgacggaattaactgctgagcttgctcaa

SEQ ID NO: 215416 - DNA, 3595 bp, Zea Mays
agaaagaccgtcttcctcatcaactacgcgccgacgcgcggacgctcccgtccccatcgcgacccgtgcgccgggtccacgctgaaccctttcaccggggcggcgaaagatatcagccgcgacgccgacgggctcgagcgccggtgagcgctcgcgcacccgggccaataaactggcaccggctcctcctctcgcgtcgcagagcctagcctcgggatgacgtggcgtaccacaacaccaccacacctcactcagccctgcgggtctccgaccaaccatttctagaagcctccaaaccctagcgcaggaggaagaggagttaggaggagctccagggatggcgaaggcgaggaagcagaagggtgacggtgccagtacgggaggaggcgccaccgtgctccaccagaagctctgcctctccatcgacatggagaaccagctgatctacgggtacactgagataaaagttctagctgaaaacaacagatttgctctacatgctgacaatatgacgattcagagcatttgatggatggtgcaactgttgagtttgactattcccctcattggaaaaatgaaagtgatcaaccgaattggtcttcagtatcatgtttgaagactgctgctgatgctgcatgttcaatgtatactttgtctctaaatcgagaagctacaccaaatcttattgtgtcatctgagagatcagtcaagtcaatgactgaacagcagttagatgaaaacagtgaaaagcatgaagaaaatagtggaaggcttgaagaacatggtggaaatcctgttcaaacttcctatgatcaaattgttaatggctgcagtggaagagggaatagaaaattctgcagtggaagaaggaaaggaaaaggaaaatgataaggaaaaagaagaggaaaatggaaatgagaagagcaaggaaactggaaatgagactgaatatgaaaaggtgaagaacataaaactggttcacatagattatattttggagaaggctgaaactggcgttcagttcgttggcaatgtcatgcgtagcagtagtcagacaaggcgggcacactgttggtttccttgtgttgatagtgccacagaacgctgtccatttgacctagaatttacagttagcatggatttcattgctgtcagcaatggtgacttgctttaccagttagtccacagtggatatccttggttgttggcccacttgaagttcttcctgacagaatcacagaaatgacataaatgtctcacacatatgtttattccctgctttggcaaagcttcagaacactattgcatttttccacaatgcatacaggtgctgatcaatcttttttttttctgtgaaaagtgcttagattggtgttgattttattagtatctcaataagcttattttttaattgatttctgaaatttgcatttcttttgcagctgttatgaagactatctttctgcaccatttcccttaggccccgtttgtttcctttcatttcgaggaattggaatcttactaacagaataggctaattttttagaatatgacattccaccactttccaaagttatcatataagcctatctcaaattcatgaggtgagagatggaaattgattctatagatttacatgctaattttccgatgtacaacttatagcacactcttctacctgcacctctataacataaatatactatataactaactctctcatatgatttaggataatatacaaatatattatatgtataaatatataaacttaattagttttgtctaaattataattattaaaatggaattcaattccaacgaaacaaacgggcccttaggtttatacaatcacatttttcttccatctgaaatgacaatattaccagcaagcttaggagcctccacatgcatcctcagttctgatatcttgcatgatgagaaagttatatagatcaggtgcgtttgtttctcttattttactaccctgtcccctctgatctagaccaatgatttgacaccatactttttaatgagatccgaatgcgtggctgctatagcatgtgcttatcaattgtgcttattctttattaaactatttttcatatcagctgttgttttgaagccctcctttcactgagagcatttagtgtcagtaagcaatccatgaatgcataatttctgctccagtatttgtgttttaactaagttagattctggtttagatgcctatatgacactacattcttgttaagttgatcatttaattagtttggtacctccagcaaatactgtaaatatgtttatggaatatgttaaatacttctgtatgtttgcttgccttatattttgtattttttctgtatagggctttgtaaacctgtcatcctttggataggagtgcatgaaaatctgcaatccatgtgtctgaatcatgacctgctattacttttactttatcttcctaagcattaaccttgcttctttgtatccccttaactggtggcttgataacactttgtattatgcattaaccttgcttctttgtatccccttaattagtggctcttggtaatgctttgtacacctgcattacattatagtcaagtattatgtttcataccttgcagtctgcactaacttgtaaaatagttcagataattggcacaagaacgaaactggcttatgcccttgcaaagcaatggtttggaatatacacaagtgcagaggagtccagtgacggctaactgctcagtatgtgaatctgatgttagtggtgcaactgctttgagctctactgctgcttcaagtgatttatatggaactcaagcaatcggttcatatgggaaagttcgttcattgaaagctgtagctgttttcaaatgttggagaagcagatgggaccagactcatttcggaagattttgcaggtgatagtggctccaagtcgtgcataaaatctaggcatgagcttcctagcctctcttctcaagcaaattgatcggttcttgcaatttgacaactttatgcctggttataatggggtcttgactgtcagctgcattcgtacccttgtacgaatagcaaagaaggtgccatcttttgtatgccttgatcacatttttgaattggttgcccctttccgcaacatggacaaaccatggaaagttcgaattgaagctagcaggattcttattgatcttgagttacaccataaaggactcgatgcagctcttttgttgttcttgaaatatgtggacgaagaaaagtctttgcgaggcatacaataacatatttcttcgtcatcaagtgttctgcatattgcaagttgctgctggaaggttagtgagtttgttattgcatatgtattcattattttgtttcgttgattacttgttattgcattgacatctgtactacataaagcaccagttttcacggttcaaatttccaccgtcgtcgtgctctcccgcatttaaatggtaaaaacgctatttttttcacaaatggggattcaaaccatgattgttggctctaaacccacttaggcaacaatgttttattttatactctatacttaagcgtaaatggaaac

SEQ ID NO: 215417 - DNA, 4528 bp, Zea Mays
gaaagaccgtcttcctcatcaactacgcgccgacgcgcggacgctcccgtccccatcgcgacccgtgcgccgggtccacgctgaaccctttcaccggggcggcgaaagatatcagccgcgacgccgacgggctcgagcgccggtgagcgctcgcgcacccgggccaataaactggcaccggctcctcctctcgcgtcgcagagcctagcctcgggatgacgtggcgtaccacaacaccaccacacctcactcagccctgcgggtctccgaccaaccatttctagaagcctccaaaccctagcgcaggaggaagaggagttaggaggagctccagggatggcgaaggcgaggaagcagaagggtgacggtgccagtacgggaggaggcgccaccgtgctccaccagaagctctgcctctccatcgacatggagaaccagctgatctacgggtacactgagataaaagttctagctgaaaacaacagatttgctctacatgctgacaatatgacgattcagagcatttgatggatggtgcaactgttgagtttgactattcccctcattggaaaaatgaaagtgatcaaccgaattggtcttcagtatcatgtttgaagactgctgctgatgctgcatgttcaatgtatactttgtctctaaatcgagaagctacaccaaatcttattgtgtcatctgagagatcagtcaagtcaatgactgaacagcagttagatgaaaacagtgaaaagcatgaagaaaatagtggaaggcttgaagaacatggtggaaatcctgttcaaacttcctatgatcaaattgttaatggctgcagtggaagagggaatagaaaattctgcagtggaagaaggaaaggaaaaggaaaatgataaggaaaaagaagaggaaaatggaaatgagaagagcaaggaaactggaaatgagactgaatatgaaaaggtgaagaacataaaactggttcacatagattatattttggagaaggctgaaactggcgttcagttcgttggcaatgtcatgcgtagcagtagtcagacaaggcgggcacactgttggtttccttgtgttgatagtgccacagaacgctgtccatttgacctagaatttacagttagcatggatttcattgctgtcagcaatggtgacttgctttaccagctgttatgaagactatctttctgcaccatttcccttaggtttatacaatcacatttttcttccatctgaaatgacaatattaccagcaagcttaggagcctccacatgcatcctcagttctgatatcttgcatgatgagaaagttatatagatcaggtgcgtttgtttctcttattttactaccctgtcccctctgatctagaccaatgatttgacaccatactttttaatgagatccgaatgcgtggctgctatagcatgtgcttatcaattgtgcttattctttattaaactatttttcatatcagctgttgttttgaagccctcctttcactgagagcatttagtgtcagtaagcaatccatgaatgcataatttctgctccagtatttgtgttttaactaagttagattctggtttagatgcctatatgacactacattcttgttaagttgatcatttaattagtttggtacctccagcaaatactgtaaatatgtttatggaatatgttaaatacttctgtatgtttgcttgccttatattttgtattttttctgtatagggctttgtaaacctgtcatcctttggataggagtgcatgaaaatctgcaatccatgtgtctgaatcatgacctgctattacttttactttatcttcctaagcattaaccttgcttctttgtatccccttaactggtggcttgataacactttgtattatgcattaaccttgcttctttgtatccccttaattagtggctcttggtaatgctttgtacacctgcattacattatagtcaagtattatgtttcataccttgcagtctgcactaacttgtaaaatagttcagataattggcacaagaacgaaactggcttatgcccttgcaaagcaatggtttggaatatacacaagtgcagaggagtccagtgacgaatggcttttggatggtttggctggttttctaactgagttattatcaagcgttaccttgggaataacgaggcgcgttataggcgtttcaaggctaactgctcagtatgtgaatctgatgttagtggtgcaactgctttgagctctactgctgcttcaagtgatttatatggaactcaagcaatcggttcatatgggaaagttcgttcattgaaagctgtagctgttttcaaatgttggagaagcagatgggaccagactcatttcggaagattttgcaggtgatagtggctccaagtcgtgcataaaatctaggcatgagcttcctagcctctcttctcaagcaaattgatcggttcttgcaatttgacaactttatgcctggttataatggggtcttgactgtcagctgcattcgtacccttgtacgaatagcaaagaaggtgccatcttttgtatgccttgatcacatttttgaattggttgcccctttccgcaacatggacaaaccatggaaagttcgaattgaagctagcaggattcttattgatcttgagttacaccataaaggactcgatgcagctcttttgttgttcttgaaatatgtggacgaagaaaagtctttgcgaggttggattgctagagtactttttgatggttttgtatgctttgctatcttttgacatggaagctgttgaaggagcgacaaagttggctgttcatgtcttgcgtatatgtcaaacaagtattgttcctcacgccaatgatcaaataaattttggcaactctagttaggggtggtaacgggccatttaatttagcctagcaaatttacggatcgaatcaagttagggccggatcataaaacaatacaattttgaactaacaaaattaagggctttgttggtttgtgaagcaagtattagggtcatgatccattaccacccctaactctagttggtcttcttcatctgcttgctggcacaaaggcatacaataacatatttcttcgtcatcaagtgttctgcatattgcaagttgctgctggaaggtccccaacgttatttggtgttccaaaggtcctcacaccccctctggtggtcaactacatcttcagtgatcaacacactaaagatgattcctcaattcctcaaccatcatagtctcaggaaccttccactagcactcctagtgtccgggaggtcttaccgacctctggacccactcaagatgctgataattatcttactgcagtgaaagaaggaatgtggtcaaaattagggtgaagcttactgcatcttccagtaaagcatctgatgctgaccatagaggccattctgatggcgcaagaaatgaaaatgaaccgggtcaatgcagctcaatgtcaatggatgcccccatggctggagcagcaaatgaaccattaaatgtaagcaatcataacattgaggaacaaaactcatgtcacgaccttggatcaaggatgtcggcaagtgttagcaatgctaaactaatggacagacatgatatttccaaggagctacagtgcactgctgattccaggctggatactgttcccaaggatcagttctctcctgccattaatccgccggaagttttagacaaacctggcagtcagcttgaaggtgtctccaactatgatgtaaaccaagctccagagactgaacggagtggaaacagaagagagagaaaaaaacaagaaagataaaaagctgaaacgtgacgaaaaactagataaaaaaatatgacccagagtatctagagaaaagctccttaataagaaggaaaagaaagagttggccagaaagcagctagaaggtgaagagctacccctgaacagcggagagcagtgaacccttcaggttcacaggaagttttgccttcaaggccaccagctccagttctaagtgttgaaacacctgttcgaatctctgaaccccaggtatcaagcaaggaaacagctgtagatactgcacgtgcagcagccaaaccaaggataaagatcagagtcaagcccttggtaagaaaatctgaagggaattaaaaaagattgtagaattgtggccagtctgccatcatttgtaaggattactgtacagcaggaaaaatgcgggtttagttattttgtgaatggctgatgtatcctgtaaaaaaacattgctctgctctagtaatttctggggtaatcgaaatctgagttctagggtagtccatattttctgctgcagttgctttagtatctcagcgcttattatctcacaggttttaagtgtttgttcgatttgctgggcctaaaactaaaactgaaggatcgctgtgctcaatttgtagctgttgatgcattcatttcagatttgaggaggcttgacggaattaactgctgagcttgctcaa

SEQ ID NO: 215418 - DNA, 4889 bp, Zea Mays
gaaagaccgtcttcctcatcaactacgcgccgacgcgcggacgctcccgtccccatcgcgacccgtgcgccgggtccacgctgaaccctttcaccggggcggcgaaagatatcagccgcgacgccgacgggctcgagcgccggtgagcgctcgcgcacccgggccaataaactggcaccggctcctcctctcgcgtcgcagagcctagcctcgggatgacgtggcgtaccacaacaccaccacacctcactcagccctgcgggtctccgaccaaccatttctagaagcctccaaaccctagcgcaggaggaagaggagttaggaggagctccagggatggcgaaggcgaggaagcagaagggtgacggtgccagtacgggaggaggcgccaccgtgctccaccagaagctctgcctctccatcgacatggagaaccagctgatctacgggtacactgagataaaagttctagctgaaaacaacagatttgctctacatgctgacaatatgacgattcagagcatttgatggatggtgcaactgttgagtttgactattcccctcattggaaaaatgaaagtgatcaaccgaattggtcttcagtatcatgtttgaagactgctgctgatgctgcatgttcaatgtatactttgtctctaaatcgagaagctacaccaaatcttattgtgtcatctgagagatcagtcaagtcaatgactgaacagcagttagatgaaaacagtgaaaagcatgaagaaaatagtggaaggcttgaagaacatggtggaaatcctgttcaaacttcctatgatcaaattgttaatggctgcagtggaagagggaatagaaaattctgcagtggaagaaggaaaggaaaaggaaaatgataaggaaaaagaagaggaaaatggaaatgagaagagcaaggaaactggaaatgagactgaatatgaaaaggtgaagaacataaaactggttcacatagattatattttggagaaggctgaaactggcgttcagttcgttggcaatgtcatgcgtagcagtagtcagacaaggcgggcacactgttggtttccttgtgttgatagtgccacagaacgctgtccatttgacctagaatttacagttagcatggatttcattgctgtcagcaatggtgacttgctttaccagctgttatgaagactatctttctgcaccatttcccttaggccccgtttgtttcctttcatttcgaggaattggaatcttactaacagaataggctaattttttagaatatgacattccaccactttccaaagttatcatataagcctatctcaaattcatgaggtgagagatggaaattgattctatagatttacatgctaattttccgatgtacaacttatagcacactcttctacctgcacctctataacataaatatactatataactaactctctcatatgatttaggataatatacaaatatattatatgtataaatatataaacttaattagttttgtctaaattataattattaaaatggaattcaattccaacgaaacaaacgggcccttaggtttatacaatcacatttttcttccatctgaaatgacaatattaccagcaagcttaggagcctccacatgcatcctcagttctgatatcttgcatgatgagaaagttatatagatcaggtgcgtttgtttctcttattttactaccctgtcccctctgatctagaccaatgatttgacaccatactttttaatgagatccgaatgcgtggctgctatagcatgtgcttatcaattgtgcttattctttattaaactatttttcatatcagctgttgttttgaagccctcctttcactgagagcatttagtgtcagtaagcaatccatgaatgcataatttctgctccagtatttgtgttttaactaagttagattctggtttagatgcctatatgacactacattcttgttaagttgatcatttaattagtttggtacctccagcaaatactgtaaatatgtttatggaatatgttaaatacttctgtatgtttgcttgccttatattttgtattttttctgtatagggctttgtaaacctgtcatcctttggataggagtgcatgaaaatctgcaatccatgtgtctgaatcatgacctgctattacttttactttatcttcctaagcattaaccttgcttctttgtatccccttaactggtggcttgataacactttgtattatgcattaaccttgcttctttgtatccccttaattagtggctcttggtaatgctttgtacacctgcattacattatagtcaagtattatgtttcataccttgcagtctgcactaacttgtaaaatagttcagataattggcacaagaacgaaactggcttatgcccttgcaaagcaatggtttggaatatacacaagtgcagaggagtccagtgacgaatggcttttggatggtttggctggttttctaactgagttattatcaagcgttaccttgggaataacgaggcgcgttataggcgtttcaaggctaactgctcagtatgtgaatctgatgttagtggtgcaactgctttgagctctactgctgcttcaagtgatttatatggaactcaagcaatcggttcatatgggaaagttcgttcattgaaagctgtagctgttttcaaatgttggagaagcagatgggaccagactcatttcggaagattttgcaggtgatagtggctccaagtcgtgcataaaatctaggcatgagcttcctagcctctcttctcaagcaaattgatcggttcttgcaatttgacaactttatgcctggttataatggggtcttgactgtcagctgcattcgtacccttgtacgaatagcaaagaaggtgccatcttttgtatgccttgatcacatttttgaattggttgcccctttccgcaacatggacaaaccatggaaagttcgaattgaagctagcaggattcttattgatcttgagttacaccataaaggactcgatgcagctcttttgttgttcttgaaatatgtggacgaagaaaagtctttgcgaggttggattgctagagtactttttgatggttttgtatgctttgctatcttttgacatggaagctgttgaaggagcgacaaagttggctgttcatgtcttgcgtatatgtcaaacaagtattgttcctcacgccaatgatcaaataaattttggcaactctagttaggggtggtaacgggccatttaatttagcctagcaaatttacggatcgaatcaagttagggccggatcataaaacaatacaattttgaactaacaaaattaagggctttgttggtttgtgaagcaagtattagggtcatgatccattaccacccctaactctagttggtcttcttcatctgcttgctggcacaaaggcatacaataacatatttcttcgtcatcaagtgttctgcatattgcaagttgctgctggaaggtccccaacgttatttggtgttccaaaggtcctcacaccccctctggtggtcaactacatcttcagtgatcaacacactaaagatgattcctcaattcctcaaccatcatagtctcaggaaccttccactagcactcctagtgtccgggaggtcttaccgacctctggacccactcaagatgctgataattatcttactgcagtgaaagaaggaatgtggtcaaaattagggtgaagcttactgcatcttccagtaaagcatctgatgctgaccatagaggccattctgatggcgcaagaaatgaaaatgaaccgggtcaatgcagctcaatgtcaatggatgcccccatggctggagcagcaaatgaaccattaaatgtaagcaatcataacattgaggaacaaaactcatgtcacgaccttggatcaaggatgtcggcaagtgttagcaatgctaaactaatggacagacatgatatttccaaggagctacagtgcactgctgattccaggctggatactgttcccaaggatcagttctctcctgccattaatccgccggaagttttagacaaacctggcagtcagcttgaaggtgtctccaactatgatgtaaaccaagctccagagactgaacggagtggaaacagaagagagagaaaaaaacaagaaagataaaaagctgaaacgtgacgaaaaactagataaaaaaatatgacccagagtatctagagaaaagctccttaataagaaggaaaagaaagagttggccagaaagcagctagaaggtgaagagctacccctgaacagcggagagcagtgaacccttcaggttcacaggaagttttgccttcaaggccaccagctccagttctaagtgttgaaacacctgttcgaatctctgaaccccaggtatcaagcaaggaaacagctgtagatactgcacgtgcagcagccaaaccaaggataaagatcagagtcaagcccttggtaagaaaatctgaagggaattaaaaaagattgtagaattgtggccagtctgccatcatttgtaaggattactgtacagcaggaaaaatgcgggtttagttattttgtgaatggctgatgtatcctgtaaaaaaacattgctctgctctagtaatttctggggtaatcgaaatctgagttctagggtagtccatattttctgctgcagttgctttagtatctcagcgcttattatctcacaggttttaagtgtttgttcgatttgctgggcctaaaactaaaactgaaggatcgctgtgctcaatttgtagctgttgatgcattcatttcagatttgaggaggcttgacggaattaactgctgagcttgctcaa

SEQ ID NO: 215419 - DNA, 2646 bp, Zea Mays
cggacgctcccgtccccatcgcgacccgtgcgccgggtccacgctgaaccctttcaccggggcggcgaaagatatcagccgcgacgccgacgggctcgagcgccggtacactgagataaaagttctagctgaaaacaacagatttgctctacatgctgacaatatgacgattcagagcatttgatggatggtgcaactgttgagtttgactattcccctcattggaaaaatgaaagtgatcaaccgaattggtcttcagtatcatgtttgaagactgctgctgatgctgcatgttcaatgtatactttgtctctaaatcgagaagctacaccaaatcttattgtgtcatctgagagatcagtcaagtcaatgactgaacagcagttagatgaaaacagtgaaaagcatgaagaaaatagtggaaggcttgaagaacatggtggaaatcctgttcaaacttcctatgatcaaattgttaatggctgcagtggaagagggaatagaaaattctgcagtggaagaaggaaaggaaaaggaaaatgataaggaaaaagaagaggaaaatggaaatgagaagagcaaggaaactggaaatgagactgaatatgaaaaggtgaagaacataaaactggttcacatagattatattttggagaaggctgaaactggcgttcagttcgttggcaatgtcatgcgtagcagtagtcagacaaggcgggcacactgttggtttccttgtgttgatagtgccacagaacgctgtccatttgacctagaatttacagttagcatggatttcattgctgtcagcaatggtgacttgctttaccagctgttatgaagactatctttctgcaccatttcccttaggccccgtttgtttcctttcatttcgaggaattggaatcttactaacagaataggctaattttttagaatatgacattccaccactttccaaagttatcatataagcctatctcaaattcatgaggtgagagatggaaattgattctatagatttacatgctaattttccgatgtacaacttatagcacactcttctacctgcacctctataacataaatatactatataactaactctctcatatgatttaggataatatacaaatatattatatgtataaatatataaacttaattagttttgtctaaattataattattaaaatggaattcaattccaacgaaacaaacgggcccttaggtttatacaatcacatttttcttccatctgaaatgacaatattaccagcaagcttaggagcctccacatgcatcctcagttctgatatcttgcatgatgagaaagttatatagatcagataattggcacaagaacgaaactggcttatgcccttgcaaagcaatggtttggaatatacacaagtgcagaggagtccagtgacggctaactgctcagtatgtgaatctgatgttagtggtgcaactgctttgagctctactgctgcttcaagtgatttatatggaactcaagcaatcggttcatatgggaaagttcgttcattgaaagctgtagctgttttcaaatgttggagaagcagatgggaccagactcatttcggaagattttgcaggtgatagtggctccaagtcgtgcataaaatctaggcatgagcttcctagcctctcttctcaagcaaattgatcggttcttgcaatttgacaactttatgcctggttataatggggtcttgactgtcagctgcattcgtacccttgtacgaatagcaaagaaggtgccatcttttgtatgccttgatcacatttttgaattggttgcccctttccgcaacatggacaaaccatggaaagttcgaattgaagctagcaggattcttattgatcttgagttacaccataaaggactcgatgcagctcttttgttgttcttgaaatatgtggacgaagaaaagtctttgcgaggttggattgctagagtactttttgatggttttgtatgctttgctatcttttgacatggaagctgttgaaggagcgacaaagttggctgttcatgtcttgcgtatatgtcaaacaagtattgttcctcacgccaatgatcaaataaattttggcaactctagttaggggtggtaacgggccatttaatttagcctagcaaatttacggatcgaatcaagttagggccggatcataaaacaatacaattttgaactaacaaaattaagggctttgttggtttgtgaagcaagtattagggtcatgatccattaccacccctaactctagttggtcttcttcatctgcttgctggcacaaaggcatacaataacatatttcttcgtcatcaagtgttctgcatattgcaagttgctgctggaaggttagtgagtttgttattgcatatgtattcattattttgtttcgttgattacttgttattgcattgacatctgtactacataaagcaccagttttcacggttcaaatttccaccgtcgtcgtgctctcccgcatttaaatggtaaaaacgctatttttttcacaaatggggattcaaaccatgattgttggctctaaacccacttaggcaacaatgttttattttatactctatacttaagcgtaaatggaaac

SEQ ID NO: 215420 - DNA, 3805 bp, Zea Mays
gggtccacgctgaaccctttcaccggggcggcgaaagatatcagccgcgacgccgacgggctcgagcgccggtgagcgctcgcgcacccgggccaataaactggcaccggctcctcctctcgcgtcgcagagcctagcctcgggatgacgtggcgtaccacaacaccaccacacctcactcagccctgcgggtctccgaccaaccatttctagaagcctccaaaccctagcgcaggaggaagaggagttaggaggagctccagggatggcgaaggcgaggaagcagaagggtgacggtgccagtacgggaggaggcgccaccgtgctccaccagaagctctgcctctccatcgacatggagaaccagctgatctacgggtacactgagataaaagttctagctgaaaacaacagatttgctctacatgctgacaatatgacgattcagagcatttgatggatggtgcaactgttgagtttgactattcccctcattggaaaaatgaaagtgatcaaccgaattggtcttcagtatcatgtttgaagactgctgctgatgctgcatgttcaatgtatactttgtctctaaatcgagaagctacaccaaatcttattgtgtcatctgagagatcagtcaagtcaatgactgaacagcagttagatgaaaacagtgaaaagcatgaagaaaatagtggaaggcttgaagaacatggtggaaatcctgttcaaacttcctatgatcaaattgttaatggctgcagtggaagagggaatagaaaattctgcagtggaagaaggaaaggaaaaggaaaatgataaggaaaaagaagaggaaaatggaaatgagaagagcaaggaaactggaaatgagactgaatatgaaaaggtgaagaacataaaactggttcacatagattatattttggagaaggctgaaactggcgttcagttcgttggcaatgtcatgcgtagcagtagtcagacaaggcgggcacactgttggtttccttgtgttgatagtgccacagaacgctgtccatttgacctagaatttacagttagcatggatttcattgctgtcagcaatggtgacttgctttaccaggtctctagtaaggaagatccttcaaaaaaacttatgtgtataaattgaacactccagttagtccacagtggatatccttggttgttggcccacttgaagttcttcctgacagaatcacagaaatgacataaatgtctcacacatatgtttattccctgctttggcaaagcttcagaacactattgcatttttccacaatgcatacagctgttatgaagactatctttctgcaccatttcccttaggtttatacaatcacatttttcttccatctgaaatgacaatattaccagcaagcttaggagcctccacatgcatcctcagttctgatatcttgcatgatgagaaagttatatagatcagataattggcacaagaacgaaactggcttatgcccttgcaaagcaatggtttggaatatacacaagtgcagaggagtccagtgacggctaactgctcagtatgtgaatctgatgttagtggtgcaactgctttgagctctactgctgcttcaagtgatttatatggaactcaagcaatcggttcatatgggaaagttcgttcattgaaagctgtagctgttttcaaatgttggagaagcagatgggaccagactcatttcggaagattttgcaggtgatagtggctccaagtcgtgcataaaatctaggcatgagcttcctagcctctcttctcaagcaaattgatcggttcttgcaatttgacaactttatgcctggttataatggggtcttgactgtcagctgcattcgtacccttgtacgaatagcaaagaaggtgccatcttttgtatgccttgatcacatttttgaattggttgcccctttccgcaacatggacaaaccatggaaagttcgaattgaagctagcaggattcttattgatcttgagttacaccataaaggactcgatgcagctcttttgttgttcttgaaatatgtggacgaagaaaagtctttgcgaggagcgacaaagttggctgttcatgtcttgcgtatatgtcaaacaagtattgttcctcacgccaatgatcaaataaattttggcaactctagttaggggtggtaacgggccatttaatttagcctagcaaatttacggatcgaatcaagttagggccggatcataaaacaatacaattttgaactaacaaaattaagggctttgttggtttgtgaagcaagtattagggtcatgatccattaccacccctaactctagttggtcttcttcatctgcttgctggcacaaaggcatacaataacatatttcttcgtcatcaagtgttctgcatattgcaagttgctgctggaaggtccccaacgttatttggtgttccaaaggtcctcacaccccctctggtggtcaactacatcttcagtgatcaacacactaaagatgattcctcaattcctcaaccatcatagtctcaggaaccttccactagcactcctagtgtccgggaggtcttaccgacctctggacccactcaagatgctgataattatcttactgcagtgaaagaaggaatgtggtcaaaattagggtgaagcttactgcatcttccagtaaagcatctgatgctgaccatagaggccattctgatggcgcaagaaatgaaaatgaaccgggtcaatgcagctcaatgtcaatggatgcccccatggctggagcagcaaatgaaccattaaatgtaagcaatcataacattgaggaacaaaactcatgtcacgaccttggatcaaggatgtcggcaagtgttagcaatgctaaactaatggacagacatgatatttccaaggagctacagtgcactgctgattccaggctggatactgttcccaaggatcagttctctcctgccattaatccgccggaagttttagacaaacctggcagtcagcttgaaggtgtctccaactatgatgtaaaccaagctccagagactgaacggagtggaaacagaagagagagaaaaaaacaagaaagataaaaagctgaaacgtgacgaaaaactagataaaaaaatatgacccagagtatctagagaaaagctccttaataagaaggaaaagaaagagttggccagaaagcagctagaaggtgaagagctacccctgaacagcggagagcagtgaacccttcaggttcacaggaagttttgccttcaaggccaccagctccagttctaagtgttgaaacacctgttcgaatctctgaaccccaggtatcaagcaaggaaacagctgtagatactgcacgtgcagcagccaaaccaaggataaagatcagagtcaagcccttggtaagaaaatctgaagggaattaaaaaagattgtagaattgtggccagtctgccatcatttgtaaggattactgtacagcaggaaaaatgcgggtttagttattttgtgaatggctgatgtatcctgtaaaaaaacattgctctgctctagtaatttctggggtaatcgaaatctgagttctagggtagtccatattttctgctgcagttgctttagtatctcagcgcttattatctcacaggttttaagtgtttgttcgatttgctgggcctaaaactaaaactgaaggatcgctgtgctcaatttgtagctgttgatgcattcatttcagatttgaggaggcttgacggaattaactgctgagcttgctcaa

SEQ ID NO: 215421 - DNA, 3838 bp, Zea Mays
ctttcaccggggcggcgaaagatatcagccgcgacgccgacgggctcgagcgccggtgagcgctcgcgcacccgggccaataaactggcaccggctcctcctctcgcgtcgcagagcctagcctcgggatgacgtggcgtaccacaacaccaccacacctcactcagccctgcgggtctccgaccaaccatttctagaagcctccaaaccctagcgcaggaggaagaggagttaggaggagctccagggatggcgaaggcgaggaagcagaagggtgacggtgccagtacgggaggaggcgccaccgtgctccaccagaagctctgcctctccatcgacatggagaaccagctgatctacgggtacactgagataaaagttctagctgaaaacaacagatttgctctacatgctgacaatatgacgattcagagcatttgatggatggtgcaactgttgagtttgactattcccctcattggaaaaatgaaagtgatcaaccgaattggtcttcagtatcatgtttgaagactgctgctgatgctgcatgttcaatgtatactttgtctctaaatcgagaagctacaccaaatcttattgtgtcatctgagagatcagtcaagtcaatgactgaacagcagttagatgaaaacagtgaaaagcatgaagaaaatagtggaaggcttgaagaacatggtggaaatcctgttcaaacttcctatgatcaaattgttaatggctgcagtggaagagggaatagaaaattctgcagtggaagaaggaaaggaaaaggaaaatgataaggaaaaagaagaggaaaatggaaatgagaagagcaaggaaactggaaatgagactgaatatgaaaaggtgaagaacataaaactggttcacatagattatattttggagaaggctgaaactggcgttcagttcgttggcaatgtcatgcgtagcagtagtcagacaaggcgggcacactgttggtttccttgtgttgatagtgccacagaacgctgtccatttgacctagaatttacagttagcatggatttcattgctgtcagcaatggtgacttgctttaccaggtctctagtaaggaagatccttcaaaaaaacttatgtgtataaattgaacactccagttagtccacagtggatatccttggttgttggcccacttgaagttcttcctgacagaatcacagaaatgacataaatgtctcacacatatgtttattccctgctttggcaaagcttcagaacactattgcatttttccacaatgcatacagctgttatgaagactatctttctgcaccatttcccttaggtttatacaatcacatttttcttccatctgaaatgacaatattaccagcaagcttaggagcctccacatgcatcctcagttctgatatcttgcatgatgagaaagttatatagatcagataattggcacaagaacgaaactggcttatgcccttgcaaagcaatggtttggaatatacacaagtgcagaggagtccagtgacggctaactgctcagtatgtgaatctgatgttagtggtgcaactgctttgagctctactgctgcttcaagtgatttatatggaactcaagcaatcggttcatatgggaaagttcgttcattgaaagctgtagctgttttcaaatgttggagaagcagatgggaccagactcatttcggaagattttgcaggtgatagtggctccaagtcgtgcataaaatctaggcatgagcttcctagcctctcttctcaagcaaattgatcggttcttgcaatttgacaactttatgcctggttataatggggtcttgactgtcagctgcattcgtacccttgtacgaatagcaaagaaggatcacatttttgaattggttgcccctttccgcaacatggacaaaccatggaaagttcgaattgaagctagcaggattcttattgatcttgagttacaccataaaggactcgatgcagctcttttgttgttcttgaaatatgtggacgaagaaaagtctttgcgaggttggattgctagagtactttttgatggttttgtatgctttgctatcttttgacatggaagctgttgaaggagcgacaaagttggctgttcatgtcttgcgtatatgtcaaacaagtattgttcctcacgccaatgatcaaataaattttggcaactctagttaggggtggtaacgggccatttaatttagcctagcaaatttacggatcgaatcaagttagggccggatcataaaacaatacaattttgaactaacaaaattaagggctttgttggtttgtgaagcaagtattagggtcatgatccattaccacccctaactctagttggtcttcttcatctgcttgctggcacaaaggcatacaataacatatttcttcgtcatcaagtgttctgcatattgcaagttgctgctggaaggtccccaacgttatttggtgttccaaaggtcctcacaccccctctggtggtcaactacatcttcagtgatcaacacactaaagatgattcctcaattcctcaaccatcatagtctcaggaaccttccactagcactcctagtgtccgggaggtcttaccgacctctggacccactcaagatgctgataattatcttactgcagtgaaagaaggaatgtggtcaaaattagggtgaagcttactgcatcttccagtaaagcatctgatgctgaccatagaggccattctgatggcgcaagaaatgaaaatgaaccgggtcaatgcagctcaatgtcaatggatgcccccatggctggagcagcaaatgaaccattaaatgtaagcaatcataacattgaggaacaaaactcatgtcacgaccttggatcaaggatgtcggcaagtgttagcaatgctaaactaatggacagacatgatatttccaaggagctacagtgcactgctgattccaggctggatactgttcccaaggatcagttctctcctgccattaatccgccggaagttttagacaaacctggcagtcagcttgaaggtgtctccaactatgatgtaaaccaagctccagagactgaacggagtggaaacagaagagagagaaaaaaacaagaaagataaaaagctgaaacgtgacgaaaaactagataaaaaaatatgacccagagtatctagagaaaagctccttaataagaaggaaaagaaagagttggccagaaagcagctagaaggtgaagagctacccctgaacagcggagagcagtgaacccttcaggttcacaggaagttttgccttcaaggccaccagctccagttctaagtgttgaaacacctgttcgaatctctgaaccccaggtatcaagcaaggaaacagctgtagatactgcacgtgcagcagccaaaccaaggataaagatcagagtcaagcccttggtaagaaaatctgaagggaattaaaaaagattgtagaattgtggccagtctgccatcatttgtaaggattactgtacagcaggaaaaatgcgggtttagttattttgtgaatggctgatgtatcctgtaaaaaaacattgctctgctctagtaatttctggggtaatcgaaatctgagttctagggtagtccatattttctgctgcagttgctttagtatctcagcgcttattatctcacaggttttaagtgtttgttcgatttgctgggcctaaaactaaaactgaaggatcgctgtgctcaatttgtagctgttgatgcattcatttcagatttgaggaggcttgacggaattaactgctgagcttgctcaa

SEQ ID NO: 215422 - DNA, 1532 bp, Zea Mays
cacaggtgacacgtcatccgcgagggatagctggagaagactaaacccccaaccaccgccgccgtggccgccggcggcgatcgcctccggttttcctcgaggctgatcaacccctgcccgttcggctgtctgcctgtctcgattggtacccggagatggatctgcttcttccgtacaagattggggatctcgcggagtccaagtcctttttgaatggttacaggggcgcgtggtttcgttgcaaggccattcttggtgggagtttcacgtcagtgcgatacatcaacaagtttggtgacatggtctacgaagagatagagttttacgggaggtacataatatgcgtgtcaatgattctggatacctggagtgttacttggaatatattgactatgatggggaggatctggattgggttgccgtcttccaagagaacccagcaagctcaagtcaaaattctaaaggaagtactgaagttatgataaggccttctttccctcaatggtattatgggcatgaacctgatcagctcccagttagtgatgtcacagcagttgttgatgaggcctggaaaataggcgatatggttgattggctcaaggacggttgctattggtctgggacaattactaagttactcaaaaaagatatggttaagctacaacttccggcacctcccataggtgaaggcagatgttatattgctaaccataaggatctgagacctacacttgagtggtccttagaaaaaggttggacagtacctcttgcgcaggcaaaccaaaaaagttggtataccgctcgtcttcttcgacaatataaatctgattcagacaagagcacctcaggtgatgaaaatggcgatgatgagaaggggggaatgcagcaataggtgtccagaacttgaaacatgcctcaggaagccccccaggtcccgtggttcctacgaaaacgctcagaaggacgccactgtcactccagtccaaggagagtgtggagatcagctcaacttccaagccaccagacccttgagagcagaactcgttcctgactgatggtgtgaggctgatgatgtcacggacgagtttctggatatgctgaacacggtcgagaccaggctacaaacacctcctggagtgtacgcgggaacttagcgacgacctgctggcttttccatccgctaggcggatgaagtggttctgattacccaaggcgattggaaatacctgttgttgctgtactgctgtttgtagtcgcaggaaacactagtcttgcgcatagagatgaaactggtaagtgcaaaagaggatcatcggttaaaggcagcgtctccgaactggtaagtgcaattcccgtcagccttaaccaaggaattgaagtggggaaacacgagtgtcttcttcttggaggggacctggtacgatctgttggtggtgatccgaaaagttatgcataggacataggagggacgtaggttagatgtaatggatcatgaattgttaccactagggtagcagcacagcggaagaaag

SEQ ID NO: 215423 - DNA, 1819 bp, Zea Mays
ctgagctcccagcacaggcacaacaaccgacgaccgtcacggcagtgtgggaactttcgccagatcggcctcctcgtcgcgagctcggaggggaggggagcacgccatcgtcgtcggagttgaagccgaagtagagccggctccgcgtcgtcgaggtccgcttcgcgcgtggctgttcccgcgtcgtcgagacgcgcggtcgacgagcgccgcctccgcatgcttgagacgcgcggcccgacgaggcacgcggccgacgagcgccgcttccgcgtgctcgaggcgcgcggccgtggagctccgactcgcgcgcggctgttccagcgcggcctctcaacagtggctcaaaatttggcgtgcaaccttcgctcaaccaaacactagtctggcgtgcaacctttgctcaacggtgcctaaaaatttcaagatcattagggcgaggaaaaggcaaaagcaccccaaatttggcaggaagcacatcccacctgatcgtttacccttttcctgccacggcgcggcagtccagctcaccgcccctttccttcgttcctcgaaccgctcctccccttcggcttccgcttcgtgtctcgcccgcactcccaaacgccaaaacaaaccatccatataaatccccccgaggaatctatgaccggcgaggaggagcaggagcacggtggccacaggtacgtcaggatgcctccggagccgcccgagccggaggggttggccgccgcgtcgtcggcgtcgttccgcctgccggagtcggtgcgggtgttcgacgagctgccgcgggccaggatcgtccaggtctcgcgccctgacgccggggacatcacgcccatgctgctctcctacaccatcgaggtccactacaagcaggtggcttctatataagaaggcctcacaagtgctatatctacattttgcattgaagagacgtgcatttcttgaagaattccatgagaaacaagaacaggtcaaagaatggcttcaaaatttggggataggggagcatgtgccagttgtacatgatgatgatgaagccgatgatgtgcatgttccttcacagcatgacgaaaactctgtcaaaaacaggaatgtcccttcaagtgctgttttacctgttattcgacctgcccttggccgtcagcaatcaatttctgatcgtgcaaaggctgccatgcaagaatacttgaaccatttcttgggaaacttggatattgtcaactcaagagaggtctgcaagtttttggaagtttcactgttatcatttctgccagaatatgggcctaagctaaaggaagattatgttacagcaaggcacttgccgaaaattgagatggacagtaaagagagatactgttcatcctgttgttttagtttttgcagtagtagctggcaaaaggtttgggctgtactgaagccaggattcttggctttacttcaagatccatttgatcctaagctcttggacataattattttcgatgtgtcaccttgcactgatagagatggagatgaccaaaccactctagcaaaggagataaaggaacgtaatccattgcattttggatttgaggtatttcgtttccatttatgacttgcttggtctagcatcttgacatatcactccaatcaaataactaatattagagtctctcccgtggaattattatgttaccactcgtacggttctaccaaacaagtagactaaatgagtaaatgggtcctttagcataatcatttttttgggtcaattttgggttcaagtgcaatcaaaacaaaattgttagaggcatatgtcatgggcctatcaagc

SEQ ID NO: 215424 - DNA, 1421 bp, Zea Mays
cctgcgcctgcgccgtttgtgttggcccgatggggaagtacatgaggaagcgcaagcgcaacgtggggaggacgacgccggccgcggagcacggcgtgaggacgcgtgcccaatccgacgccgtcgcgagcacagcttctgcggcggcggcggcggcgcccaagaggccgaggaagcagacgacggcggcagtgactgggaacaccagcggggcagcggcgccagggtcctgctacctgcacctgcggaccaggaggctgcagttcctgcccgggggtgagggcgaggtgcagcgtccggtgccgccgttgcctgcggcggcggcacagcggtcgtcgtctgtagcttccggggagccggtggagggtgccgggagctcgaggtgctccagcacggcgtcgtcttcggtggacgtcgtcgtcctggcggtggcaccggctagcgagaggggcggcggtgaagcggaggaggcacgcaacgacgacgacgactactgcggcgacgtcgagagcgtcgtcagcgactcggccgagtgctgccgccgcgacaggaggagggagacgacgccgtcgagccaggcacgggtagatcgtccctgcagcgacgaggagtgcagccaggccgcagacggcccaacgcgccaccgtcggcgacggaaggctttggcggccaccgcgacagccgcggtcgcttgcagagcgagggcgacgccaccggcagaagagatcgagcagttcttcgcggccgcggagaaggcccaggccgagcgcttcgcagccaagtacaatttcgacgtcgcacgcgggctgccgctcggcgccggccggtacgaatggaccccggtagccagcggttggtgacgacgcacgtgcgcgtgcgcgccggccggaaagctagcggcggtggcgcagaagaatgagtagctaggaggaaggagacgccactgggaaagtgggacgagcgtacagacgataaaaggactgaaggagagcagagacagagcattttcacagcagtagctgtagctccccccctgttttgttcagaattctgctggtgagtgtaactcctgcttctgcacagccggcattcaatatgtccagtacagttccacatcagctgacgccgccacgacagttttaccacaccgtcaccttgtttttgctgacaacgcctcggtacctcgcagtctttttgttgctttcctaccaactctctgtctctcaagcaaacgaaaccgctgctgggcataataaggtcagtaccgactggcgcctccaacatcagtcgggttggctgatcagtctacggcctgccgtccgaccgtgtacgaaataattcgtattttaatgggtgcaaaaaaaactagagacatatcttagtgaaataacctgtctagcacggttcgtgtttgggttgag

SEQ ID NO: 215425 - DNA, 392 bp, Zea Mays
tatcacaggcttctagcgtggagtatgaaaatatgtgatatatattgcggtggtattgttttctgatgaaatgaatattattaccccataagtggacacaggccagttgaaccaatacgaacccgatcaactacatcgatgcatcaccaacccaagcatcccaatccaaacaacttgtaatttgaaactagagattgcgaactgtacttaaatcaaatacttcactattggtctctagagaggaagctctgccaaccattactaataactgagaaggatttggcaatcgcttatctttgactcaataccttatgaccttggaaaggtttgaacccgtcagggactaaagatgccaaaggtatactgtttgccttctcattctactatgctat

SEQ ID NO: 215426 - DNA, 2685 bp, Zea Mays
atagtgcatcacacgcaaacaccagtgagcgacatgaggctcagctctgtccggcctgttgacccagatgcatggtgtatttaacaagcacacaatcccgccacccactgcacccatggcctctcactcacgttggacatggatcatgctgcatgcatcttcttaaccacctgactaatactgcctctttgtgctttatttctccacatactactaccggcgcaaacgctgtcatggcagcgcttctggcgatactaatgcacctcctggtcccggcgctgctgctgatgagagtcgtggcagtggtggcggccggggcaccgccgttctcgtgcggcggcggcccgtcgctggggttgccgttctgcaacacgaagctccccgctgctcagcgcgcggcggacctagtgtcgcggatgacacccgcggagaaggcgtcgcagctcggggatgtcgccaacggggtgccgcggctgggcgtcccctcgtacaagtggtggaacgaggccctgcacggggtggccatctcgggcaaggggatccacatggaccggggcgccgtccgctccgccaccagcttcccgcaggtgctgctcaccgccgcgtccttcaacgacaacctctggttccgcatcggccaggccacaggcaaggaggctcgcgcattctacaacatcgggcaggcggaggggctgaccatgtggtccccgaatgtgaacatcttccgggacccgcggtggggccgcggccaggagacgcccggcgaggaccccgcggtggccagccggtacgccgccgcctttgtccgcggtctgcagggcagcagcagcaacacaaaatcagtgccgccggtgctgctgacctcggcgtgctgcaagcacgccacggcgtacgacctggaggactggaagggcgtgacgcggtacagcttcagggccaccgtgacggttcaggacctggcggacaccttcaacccgccgttccggagctgcgtggtcgatggaaaggccagctgcgtcatgtgtgcctacacgtccgtcaatggcgtgccgtcctgcgccaacgccgatctgctcaccaagaccttcaggggaagctggggactcgacggcaggtatgtcgccgcggactgcgacgcggtgtccatcatgcgcaattcacagttctatcgcccgacggcggaggacaccgtcgcgaccacgctcaaagccgattgcggtccctacgtccagcaacacgccatggccgccatccagaaggggaagctgacgcagcaggacgttgacaaggccgtcaagaacctcttcactacccgcatgcggctgggccacttcgatggcgaccccaaggcccacgtgtacggtaacctcggagccgcccacatctgcacgcaggagcacaagaacctagcgctcgaggcggcgttggacggcattgtcttactcaagaacagcgccggcgtcctcccgctcaagcgagggtcggtcgcctctgccgccgtcatcggccacaacgccaacgacgttctcgccctcctcggcaactactggggcccaccgtgcgcgccgaccacgcctctccaagggatccaggggtacgtcaagaacgtcaggttcctggccggctgccacaaggcggcctgcaacgtcgccgcgacgccccaggcggccgcgctggcgagcacgtcggattccgtgatcctgttcatgggactgagccaggagcaggagagcgaagggaaagacaggacgacacttctccttccgggtaaccagcagagcttgatcaccgccgtagccaatgccgcgaagcggcctgtcatcttggtactcctcactggcggcccggtagacatcacgttcgcccaggcgaatcccaagatcggcgccatcctgtgggccggctaccctggccaggctggcggccttgccattgccaaagtcctcttcggtgagaagaaccccagtgggaggctgccggtgacgtggtacccggaggagttcaccaaggtccccatgacggacatgcggatgcgcagcgcgggcagctaccccggccggagctaccgcttctacaaaggcaagaccatctataagttcggctacggcctcagctactccaagttctctcaccgggtagtcaccgcccgcaacaacccggcgcacaacacgaccctactactcgccgccggccacgcggcgacgaccgaggacaacttaagctaccacgtcgaccacatcggcgacgagctgtgccgtcagctcaagttcttggcagtggtcaaggtgcagaatcacggcccaatggacgggaagcacacggcgctcatgttcctccggtggccgaacgcgaccgacggccgaccagcgaggcagctcgtcgggttccagagccagcacatcaaggcaggggagaaggcgcacctgaggtttgaggtaagcccgtgtgaggatttcagcagggtgagggacgatggcagaaaagtcattgataaagggtcacattttctcaaggttggcaagcatgagctggagattagtttcggggcatgagatttttttcctttgtggaaaacaaaagcatatatataggacttatacggtgtaattgtttcatagtgtgatttatcattttatttatactactctattaataacataatgtggacgctgatgctatcacggt

SEQ ID NO: 215427 - DNA, 2474 bp, Zea Mays
caaacacatccaaatatcatacacacaaagtgccctaaccaagctacttgaggaagaagagaaagaaaaacgtgaagaagaagagcgcagggataggaggagaacaaaagaaagagaaaagaagaatagaagaaaagagaggctgaaaggaaaagacaaagataaagaaaaaatattggttcggtcaaaaaaaccaggtctttcaacattttctccgagcagccaagcagcaccaagtagtaatgagtctcaggatgttctagacttgagatattcagatagcgaagaggaagacaatgttgtggtcagggaacactatcctgattcttcagctgatcaatcttcaagcaaggatactgatgaacgaagcaatgagcatgaatgcagtgcaacagcagaatttgttccctcagattgtgatggctcattcttatgtgatgagtctaattcatcaagaaacttgagatttagatgggacttcccagaaaaagatgtcagttattggtatgaagattgtcgtgttgattctggagatactcaattgcagtctagggagaggatcagaaataacactagaagttacaacactgtatttaatacaaataaccgaacaagagacaagtacaacccctgcagctgtggccatcaagaagacttcagatatttttccacagcaactagatcaagtagggagacaaagatttccaggaaaacagtggctgagaaacccaggttgcaataccgcaggtgctatcctccagaaagcttcgctgtgtcaaatggacgtgttggtggtacaccaaacaagaacacaggtccaaagcaagtatgggagccaatggatgcaagaaagaagatagggaatgggagaggatcagaaataacaccagaaactactggtgctgctgatggttcagatcaagtggaatgctcaaaggacattagtgaatgtgagaagcttgaggtagtgtgtgaaacacttgctgaaacttgttgtgagatatctgcagaagcctgtaagtcagatcaaccatgtagacaaggtgagaaaaatcagtctgcttgcagcgatggatctaaatgcgtagataagccaaattgctgcttgacaaaggacactgttaggacaacaaatttaaccagttcagacagcttttcgtgtctaagtgagggagatagagacagcagcatgagtagcatgacctcactgagtgctcagaatgtagaatcttcatctacatctgattcagatgagtattcagacaggaacgatagcagcccaggcgatccaccagtgaagaatgtttctcgttcattacttgagatgtgtgcaggaaatggtttcagggagtaccaaccgaaaggcttgaaccctcctaatggcaaccaatttggatttatggtggcacctttacaggaccagatgttgcaccaacagaagatccatgcaccgccgtactcgtcaccatttgtggggttccacaatcaccccttggcagttccaacaaatgggtacttgccatatcctcagccaggtcacttctaccctggccttatgacccctgttggatgtggagtcgctggcagccaatgcgttgactttccaatgcagtacagcaataacattcatccttactcgggccccgaatttggttttctgcctgcaaaaccagttcacaagaccccagtgagcttccatgctgtgccagtgccaccactggccccgctgtgtagaagcgaggtgccagtggtgataaatcaagagaggcagcagggctctgcaccccctaaattcaaacaggcagtgctggtccctgagaacggctgttcagcagaagacaacaccttcaaacagaaaggtgatgacacagacagcacacccttctccttgttccagttcaacctgcctattgcccctcccaccctggcaacatccaaagaagagcaaagtggagcgatgccgtcaatggcactgccaccagctcagataactcgagcccagctgtgctccagggaggagaccaatgtcaaggagtacaaccttttctctgggtgtaacggagtgatgtttcagctcaactagaggcgaagaaaagtgagcagctattcaatatacatacatggtgaacgatttgtattctagtaaaacagaataaagtaggtcgaggtttttactgtgttgccctcgaatatttatttcttttttaattttgatttgttgtgcttcccctccctgtttttttgtgtgtatggaaaactgaaaagacagtgagtggtatagattctgcagttttgacacgagtctagtgtcactttttaccccccggatggttgtcatcttccaactaggctcgttcggtgtagctctgtcaattcattttggactgactgaatctgtagcagtttttactacagatacagtaccaagccgtttgttttaattaagggtcctagacatctccggttgctccccc

SEQ ID NO: 215428 - DNA, 1056 bp, Zea Mays
ggcccacttggcccatctccccagccgccgcccctcccctatcctccctaaggccgccgccgcccctggtagccgccgcctctccctgctcctctctctcccaagcggctctctctctcctcgcttctctcccctcctcttctccagccgctgccaggcaaccggccgccgcagcgcagccacccgagcccctctgctgagagcgagaagagatggccgacaagggtgatgggccgacaatcggcatcgatctcggcacgacctactcttgcgtcggcgtgtggcagcacgaccgtgtcgagatcatcgccaacgaccagggtaaccgcaccacaccctcgtacgtcgccttcaccgactccgagcgcctcatcgaagatgcggccaagaaccaggtcaccatgaaccccatcaacaccgtctttggtgagcacgccctcgttctcggttctttacttactcctgctgccctagctgagatccgttttgttcactgtgaggagaagcccaaggaacccaaggaggtcagttacttatacttgccgattattattcaagtcccatgcggcggtgatcctcgtcgccttctgcctccttggtctgcaactggacgacatgctctggtttctgttccaggagacggtgacgctcaagatccaactgcactgcgactggatgctaaggtaacaatgcttggactggtacccagcatcgttcgtacttggaagaatacggactgtacagctggactagactggtcctccatccgacgctttagctcctctggggaggcatccaatgtggatgattatttatggctgatgggaagagctggttgtgatgcagttgaagacccaagatttgaacgacgctattgtcacaccgaaagtgtgttcgatgaaatgcctccaaaatccggaggtttctatttgtgaaagtttgcaggctaaggagtgttcctacttcctcctgtatacacagtttattcctgcattttttggggtgattaattcctttttcaaggaacgtggatgcgggcgataaattgaagctgtg

SEQ ID NO: 215429 - DNA, 2757 bp, Zea Mays
ccccacggttggtccacctcctcctgctcctctggcctctgcggtgcctcctcccggtcccgagtcccggccatgtcgtcgccgctggaggatgtcagcgtgggcatggaggaggaggatcagcggcccctgaaccgggccctgctccaccggagcgccaccaccaacgcctcccaggtggccatggtcggctccaatccctgccctatcgagagcctcgactacgagatgatagagaacgagctgttcgaccagaactggaggacgaggcgcaaggcggaccaggtgcggtacgtggtgctcaagtggaccttctgcttcgccatcggcatcctcaccgggatcgtcggcttcttcatcaacctcgccgtcgagaacgtcgcgggcttcaagcaccaggccgtttccgccctcatggactccgccagctactggacggcgttctgggtgttcgccggctgcaacctggcgctcctgctgctggcgtcgtccatcacggcgttcttgtcgccggcggccggcgggtcgggaatcccggaggtcaaggcctacctcaacggcgtcgacgcgcccaacatcttctcgctgcggaccctcgctgtcaaggtagtggggaacatcgcggccgtatcatcgtcgctgcacgtcggcaaggcggggccgatggtccacaccggcgcgtgcatcgctgccatcttcgggcagggaggctcccgcaagtacggcctcacctgccgctggctgcgctacttcaaaaacgaccgcgaccggcgcgacctggtgaccatcggcgccggcgcgggggtggcggcggcgttccgcgcgcctgtcggcggcgtgctgttcgcgctcgagtcgctgtcgtcgtggtggcgcagcgcgctcatctggcggtcgttctttacgacggcagtggtggcggtggtgctgcgcctcttcatcgagctgtgcgggaccgggcgctgcggcatgttcggccggggcggtctcatcatgtacgatgtcagcaccgtgttcgacgacctcatgacctaccacctcaaggacatccccaccgtcatcctcatcggcgtcaccggcgccctgctcggcggactctacaacttcctcatgataaaggttctccgactctacaacgccatcaacgagagaggtggagcgcacaagctgctgttagcggccaccgtctccatcgtgacgtcgtgctgcgtcttcggcctgccatggctggcgccgtgccggccgtgccccacgacgggtccactttcgtcgccggacgggacctgccacgcgctgaaccgtttccggcggttccactgcccaaagggccactacaacgatctcgccagcctgttcctcaacatcaacgacgacgcgatccgcaacctctactccaccggcaccaacgacgtgtaccacccggtttccatggtcatcttcttcgtggcgtcctacgcgctcggcgtgctcagttacggcgttgtggcgccgtccgggcttttcgtccccatcatcctcacgggcgccacctacggccgcctcgtggcaatgctgctcgggggccgctccggcctcgaccacggcctcgtcgccatcctcggctccgcgtcattcctcggcgggacgctccggatgacggtgtccgtgtgcgtcatcatcctcgagctcaccaacaacctgctactgctgccgctcgtcatgctcgtgctgctcatctccaagacggtcgccgactccttcaactccagcatctacgacctcatcctgcgcctcaagggcctgccccacctcgatggccacgctgagccgtacatgcggcagctggccgtcggcgacgtggtggccgggccgctgcggagcttcggcggcgtggagaaggtcggcaacgtcgtgcacacgctccgcaccacggggcaccacgcgttccccgtcgtggacgagccgcccttttcgccggcgccggtgctctacggcctggtgctgcgcgcgcacctgctggtgctgctcaagaagagggagttcctggtggcgccggagcggtgcccaaaggagtacgtggccgagaggttccaggcggaggacttcgacaagcgcgggtccgggaagcaggataccatcgccgacgtggtgctgtcgccggaggagatggagatgtacgtcgacctgcaccccttcaccaacacgtcgccgtacacggtggtcgagaccatgtcgctggccaaggcgctcgtgctcttccgggaggtcggcctgcgccacctcctcgtcgtgcccaaggcctgcgataggtcgccggtggtcggcatcttgacgaggcatgacttcatgccagagcacattctggagctgcaccctgtccttctgaggagcaggtggaagaggctccggtggcagaggggcgccatggccaagtacttccgatcgctcatcgtgtgggtcgccaacagcggctgaagcagatacattgctgccaggaaactgctgctggctcctgcagattgaaggagtcatcatcattgggtatttgtgaaataacaacacgtgttgatagcttcatatacatatatgcatatatatgttcagtcaaaattttgtcgttgtcttttggtactacgtttgtataattttcattttagtgaaagaagacgagttcgccacattgttttatgtcttctatacacttgaacaggtggcgtcctttggacgccctgcaatgactaaatgaagcaagtccctgctgatcacaggcaacagaag

SEQ ID NO: 215430 - DNA, 6489 bp, Zea Mays
atcatcagtaaacgtacaggcgcatcgcgaaaaagctcgcaaaatcgcagcacactagcacagaaccttggacgcgaaggcgtcataccccgatgccggcgtcgtcgtcgccggcgatggcgtcgcagcatgcgccgccgaggcgggagctcgacctcgacgctttcctcccgtcctctccgacatcctccggggcctcggacgccgacccggccgacgatgaccaccgccgcgccgtcgacgacctgctccgcctcctctcctcctcagactcggactccgattccgaggagtctagccgcatcccaagcaccagcatccagacgctatcccgagtccaagccccggcgcctgtcgctgagccctcgccgtcgccttccccatccgcgtccccgtccccgaggagatccgcatcggccttgccgtcggagaccctctcctccctcgtcgcgagaaccttctcgagcaacggcgcttcctcgtcgtcgaagcccctcccctcgctcttccggggcgtccgccccagccccaaacccggcgccgcgcttgccgctgctgccgcagcgtcccgcgcggtcctcaccccacacgccgctgccatcaagtcgcgccgatcagtatcggcgcccgtggagaaagttctggaggaagaggggagtggctccgaaggctccaaggagttccttcccactgggagcttggaagcagaggtagaagagaagggtgattcggaagcggttgctgatgcgaccaagcaaactgcaggtgggaatgtgggtgcggaactgggagaggataaacaggcagaagtgggaggtgaagagaatgctgaggctataaagctggtggaggcaagtcctctggatgctctagctgcggaggattccagtgggcatgagcaaggtaatgatgccaatttggcggaaactgaccaagttgggaatcagattgaggctgtctatgaggaaaatgaggatgaccaaactggaggtgataatcatgttcaatcaggtcagggtatggatcttattgcgattgctttagaggaaagttctgatgatgaacatgaatttgaaagatctgacagtatcttgcaagaacaagtggaatctgggagcttaattgataaagtgattgaagatagggtagagcagctggaggccagcaggaaggctgagaacacagagaagaagctgaaggtgtcaatgaaaccgttggagtgggcagaggagcttgagaagaggcaggcctcgtctggtcaacattgggaggaaggagcagctgcgcagcccatgcaactagagggaatcggaaagggcccaccagctatcggttacatgcaaattgagatggacaatccagtaacccgtgtcatgtcctcaccgtcatttaggtcagaccatggctctccccaggtgctggctgttcataggagctatatagcaatgggcacatctaaaggtgctgtcatcgtcattccaagcaaatactccattcatcaagctgatgatacagatgcaaagatgctgttcttttggaaccaaggcgagaagactcaatcaccagtgactgccatgtgctttaaccagcaaggggaccttctgctagtaggatatggtgatggtcatatgacaatttgggatgtacagaaatctgcagcagcaaaagttatatatggcgagcatacagcaccagtagtgcatgcttgttttatccgccaatctaaagccatcactggggattcaaaaggggtagttctattgcacacattttccattatccccgtaattaatcgtttaactgtcaagggaactcagcgtctttttgatgggaatactggaattgtgctctcagcctgtcctcttgtaatggatgaatcttttggttttagtaattcatctgcccagggaaatcagacaacttcctccagtggtggtcttggcagcatgatgggtggtgttgttggaggcgtggttggagtagattctggatggaagtttttcaacgaaggctcttctccaatggaggatggtgttgtagtcatgtttattatgcatcaacatgctcttgtggttagactccgtaccaatattgaccatgttgaccatattgagaccttctctagaccagatggagcacgtgagggctccatcgcgtatgctgcgtggaaatatacatcatatttgaatgaatcgtcatcagtagatgaagaacgagtgtcatggctagcacttgcatgggaccgtcaagtgcaagttgcaaagtttgttaaatcaaagatatttaaacacaaagagtggaagcttgatagttcagctgttggtgttgcctggttagacgaccagatgttagttgtccttaatttgagagggcaactctgtttattctctaaagatggcagtgagcttcgcagaactacctttgttcctgatggccttctttttgatgacaccatattgcaccatgcacatttttttaacaggtttggtaacccagagaggcattttaacagttcagtagcggtaagaggtgctacagtgtatattcttgggccatcttttctcacggtttcccgacttcttccatggaaagagcgaattgaagcactaaagagggctggcgattggatgggtgcactagacatggcaatgaggctttatgatggtcagacacagggtgttgttgatctcccaagaacggttgattctattagagatgccataatgccttacttagtagagttgctgctatcatatataagttatgtttttgaatatatttcaattgcgctgccaaatcatactggaaaagggggagaatcaggtgttctaatagaggcagatcgatccctgcttacacaaagagatgagcagtacgctcgtgtaggaggggttgcagttgagtattgtgtccacattggacggaatgatatccttttcgatacagtcttctctaagtttgctgctgcagaaagtggaggtatgtttctggaggtgctagagccttatatattgaaggatatgcttggttctctgccccctgagattatgcaagcactagtggagcattatagtggcaaagggtggttgcaacgagttgaacaatgcatccttcacatggatatttcttcattggactttaatcaggtagtcagactttgtcgtgaacatgggctatatggtgcactaatttatttatttaaccaaggcctgaatgatttccgtacaccactagaggaacttctatcagtcgttcagaacaccaacagtaaagatgatgcttctagtggatacaggatgcttgtttatctgaaatattgctttcagggtttggcatttcctccagggcatggaataattccccaatcccggcttcattcagtgagggaagaactccttcaatttctgcttgaagaatctaagccactcacttctgaagtatttaagggtttcaatgcttcttgtggaaagtgcctaaacatatgctatctgctatggttggatactgaagctactttggaagtcatcaaatgtgcttttgtacaggataactttgagtctagagatgaacttccgagtactgtcaatacatctgcttcagataatgaagatggtattgatgctggaagaccagagggccaaaatgctatggtacaaaatgtggttgatgccatcattgacatagttggtttggaaaatgatgtgattcggtctgttatgggtagaactgaatcagaattatggccttcggagaaggattttggctatttaatggagtttgtgtccttttttgtttctcacaaaagggctaatgcatctaagagggttgttatgcacattcttacttatctcatttcgtcatatgatgacacaagaacaaggattcagaaagaaaaagaagttcttcaactcttcaatgcggttccccgaaacgattggaattcggattttgtcttgaacctttgttcagatgctcatttttatcaggcctgtggtttgatatttacagccaggaatcagaatttggctgctttagatagttacatgaaggataaagaggaacctttccatgcttttatcttcattgataagaagttactagaattggttgacgatgaagctttgtcgtttcataccacagtaatatctcgctttcctgagctagtcaagctaagcagggaatgtgcatttgtcttggcgattgatcatttctgtgataagatacagcaaatattagcagagcttcgttctgaccgacacagcctctttcttttcttgaaaactgctattgaagtacacttgtctggaaaacttgacttcagtaagcttgaattaagaaacaaacaaactgttgaactccagtactcttctactgaagttgaagcttatcagcagaggctatcaaatctctccaagttatgccacaatcctgtttacatcgacgacgagttagttgagctttatctggagcttttatgtcagtatgagcgaaggtcagttctgaagtttctggagacttttgacagttacagattggaacggtgcttgcatctttgcctagattatggagttacagatgctgctgctttcttgcaagagagggttggtgatgttgggagtgcccttgaccttattctggctggacttgatgagaaaattagcttatttatctcttctgtggaaagtactttctctggcgtcgcatcaaaaagtatcgctgaaattaagcaaccagacatcgttctagaaatgagtgaggctcatccagtgcttgatgcattgcatgcctccattggattgtgccaaaggaattcacagcgcttggacccagaggaatctcagtccctttggttccaactccttgactccttctcagagccattaaaaaaactgtatgggatcaaggatgtaaatggaaaaggtgtcaagtccaattggagtgaagcatcaatggaacatctgaaggaaaaaggactatctcaacaaatgaggatttcaactaaacaaaagtgcctaaatgttctgcgaaaagtattttcacaatgtgttggagaaataatagaggccatggctgggtatattcccctaccggcaatcatggcaaaactgttatctgataatgggaatcaagagttcggtgatttcaaacttgtgatacacagaatgttatctatgtatctttacgaaaaaagaatactggaaacggctaagtcagtaattgaggatgactcattttacaccttgagcttattaaagagaggagtttgtcatgggtttgccccacagactttcgtatgctgcatatgcaactgttcactttctaaagaaggtgctatttcagccgtacgtttgttcagttgcgggcatgcaacacatcttcagtgtgagtctgagcagaccaggtcatccaatcaggaatccaaagagggatgccctgtttgtctctcaatgagtgatacgcaagctcgaagcaaatcacctatgtttgagaatgggctaatgaagtattctggggctgaacatgaagtgtcacatggcatgtatcagattcatgaagttgatcatgctgagagatctcgtgggcttcaacagatgtcacggtatgaaatactgaataatcttcagaaagcgcagaagtcctttcatatagaaaccgtacctccattgaaacttgcaccgccagctatataccatgagaagatacagaagaggaccacttcggttggtgaaactagcaaacattctgttagaagtcagaaaccccagaaaatttggcaaatgaaggagaaaaaatcaaaagaggctgggagtcatcatccacaaaagtcaagttttctacgttaatagaagaaaagattgctgatttgttaagtatgaaaccagatccaaactgattgttaatttgcttcatgccatcaccacgatcgaatcttcaagactacaaatttgtcagcgtgatggagcctgcccatcagtacatagcttttttttttgtcttggggatgcatcctgttggtgagatcctcttcccctgcaccatggtcagaggttctgtggagccaaggtgctttgggctagggaggaaattgtaacagtaaattttcatacagttcatcgtgattagttttgtgtacagagcagagcatacacgtggtgacatggtccctgtagagggacacattcgcagtaaaggtgggatgcctcgattcatactcaacaatgtaaagtaaaggtgggatacctcaattcatgatcattgtaaaatacgtgcacagtataacacaggagcactggctgagtggcatgtatccttgcagttcatcgcgattaatctctgtacagagctgttatactgtcggttttgatatcagttgcaattacacatctgctacagttttgtagtatcagatatcagaacacgtcgggcccgcagaacgcctggaagctcgtagttgtcggcgccgagcatcctgtcgccattgggttgcgc

SEQ ID NO: 215431 - DNA, 6477 bp, Zea Mays
cagtaaacgtacaggcgcatcgcgaaaaagctcgcaaaatcgcagcacactagcacagaaccttggacgcgaaggcgtcataccccgatgccggcgtcgtcgtcgccggcgatggcgtcgcagcatgcgccgccgaggcgggagctcgacctcgacgctttcctcccgtcctctccgacatcctccggggcctcggacgccgacccggccgacgatgaccaccgccgcgccgtcgacgacctgctccgcctcctctcctcctcagactcggactccgattccgaggagtctagccgcatcccaagcaccagcatccagacgctatcccgagtccaagccccggcgcctgtcgctgagccctcgccgtcgccttccccatccgcgtccccgtccccgaggagatccgcatcggccttgccgtcggagaccctctcctccctcgtcgcgagaaccttctcgagcaacggcgcttcctcgtcgtcgaagcccctcccctcgctcttccggggcgtccgccccagccccaaacccggcgccgcgcttgccgctgctgccgcagcgtcccgcgcggtcctcaccccacacgccgctgccatcaagtcgcgccgatcagtatcggcgcccgtggagaaagttctggaggaagaggggagtggctccgaaggctccaaggagttccttcccactgggagcttggaagcagaggtagaagagaagggtgattcggaagcggttgctgatgcgaccaagcaaactgcaggtgggaatgtgggtgcggaactgggagaggataaacaggcagaagtgggaggtgaagagaatgctgaggctataaagctggtggaggcaagtcctctggatgctctagctgcggaggattccagtgggcatgagcaaggtaatgatgccaatttggcggaaactgaccaagttgggaatcagattgaggctgtctatgaggaaaatgaggatgaccaaactggaggtgataatcatgttcaatcaggtcagggtatggatcttattgcgattgctttagaggaaagttctgatgatgaacatgaatttgaaagatctgacagtatcttgcaagaacaagtggaatctgggagcttaattgataaagtgattgaagatagggtagagcagctggaggccagcaggaaggctgagaacacagagaagaagctgaaggtgtcaatgaaaccgttggagtgggcagaggagcttgagaagaggcaggcctcgtctggtcaacattgggaggaaggagcagctgcgcagcccatgcaactagagggaatcggaaagggcccaccagctatcggttacatgcaaattgagatggacaatccagtaacccgtgtcatgtcctcaccgtcatttaggtcagaccatggctctccccaggtgctggctgttcataggagctatatagcaatgggcacatctaaaggtgctgtcatcgtcattccaagcaaatactccattcatcaagctgatgatacagatgcaaagatgctgttcttttggaaccaaggcgagaagactcaatcaccagtgactgccatgtgctttaaccagcaaggggaccttctgctagtaggatatggtgatggtcatatgacaatttgggatgtacagaaatctgcagcagcaaaagttatatatggcgagcatacagcaccagtagtgcatgcttgttttatccgccaatctaaagccatcactggggattcaaaaggggtagttctattgcacacattttccattatccccgtaattaatcgtttaactgtcaagggaactcagcgtctttttgatgggaatactggaattgtgctctcagcctgtcctcttgtaatggatgaatcttttggttttagtaattcatctgcccagggaaatcagacaacttcctccagtggtggtcttggcagcatgatgggtggtgttgttggaggcgtggttggagtagattctggatggaagtttttcaacgaaggctcttctccaatggaggatggtgttgtagtcatgtttattatgcatcaacatgctcttgtggttagactccgtaccaatattgaccatgttgaccatattgagaccttctctagaccagatggagcacgtgagggctccatcgcgtatgctgcgtggaaatatacatcatatttgaatgaatcgtcatcagtagatgaagaacgagtgtcatggctagcacttgcatgggaccgtcaagtgcaagttgcaaagtttgttaaatcaaagatatttaaacacaaagagtggaagcttgatagttcagctgttggtgttgcctggttagacgaccagatgttagttgtccttaatttgagagggcaactctgtttattctctaaagatggcagtgagcttcgcagaactacctttgttcctgatggccttctttttgatgacaccatattgcaccatgcacatttttttaacaggtttggtaacccagagaggcattttaacagttcagtagcggtaagaggtgctacagtgtatattcttgggccatcttttctcacggtttcccgacttcttccatggaaagagcgaattgaagcactaaagagggctggcgattggatgggtgcactagacatggcaatgaggctttatgatggtcagacacagggtgttgttgatctcccaagaacggttgattctattagagatgccataatgccttacttagtagagttgctgctatcatatataagttatgtttttgaatatatttcaattgcgctgccaaatcatactggaaaagggggagaatcaggtgttctaatagaggcagatcgatccctgcttacacaaagagatgagcagtacgctcgtgtaggaggggttgcagttgagtattgtgtccacattggacggaatgatatccttttcgatacagtcttctctaagtttgctgctgcagaaagtggaggtatgtttctggaggtgctagagccttatatattgaaggatatgcttggttctctgccccctgagattatgcaagcactagtggagcattatagtggcaaagggtggttgcaacgagttgaacaatgcatccttcacatggatatttcttcattggactttaatcaggtagtcagactttgtcgtgaacatgggctatatggtgcactaatttatttatttaaccaaggcctgaatgatttccgtacaccactagaggaacttctatcagtcgttcagaacaccaacagtaaagatgatgcttctagtggatacaggatgcttgtttatctgaaatattgctttcagggtttggcatttcctccagggcatggaataattccccaatcccggcttcattcagtgagggaagaactccttcaatttctgcttgaagaatctaagccactcacttctgaagtatttaagggtttcaatgcttcttgtggaaagtgcctaaacatatgctatctgctatggttggatactgaagctactttggaagtcatcaaatgtgcttttgtacaggataactttgagtctagagatgaacttccgagtactgtcaatacatctgcttcagataatgaagatggtattgatgctggaagaccagagggccaaaatgctatggtacaaaatgtggttgatgccatcattgacatagttggtttggaaaatgatgtgattcggtctgttatgggtagaactgaatcagaattatggccttcggagaaggattttggctatttaatggagtttgtgtccttttttgtttctcacaaaagggctaatgcatctaagagggttgttatgcacattcttacttatctcatttcgtcatatgatgacacaagaacaaggattcagaaagaaaaagaagttcttcaactcttcaatgcggttccccgaaacgattggaattcggattttgtcttgaacctttgttcagatgctcatttttatcaggcctgtggtttgatatttacagccaggaatcagaatttggctgctttagatagttacatgaaggataaagaggaacctttccatgcttttatcttcattgataagaagttactagaattggttgacgatgaagctttgtcgtttcataccacagtaatatctcgctttcctgagctagtcaagctaagcagggaatgtgcatttgtcttggcgattgatcatttctgtgataagatacagcaaatattagcagagcttcgttctgaccgacacagcctctttcttttcttgaaaactgctattgaagtacacttgtctggaaaacttgacttcagtaagcttgaattaagaaacaaacaaactgttgaactccagtactcttctactgaagttgaagcttatcagcagaggctatcaaatctctccaagttatgccacaatcctgtttacatcgacgacgagttagttgagctttatctggagcttttatgtcagtatgagcgaaggtcagttctgaagtttctggagacttttgacagttacagattggaacggtgcttgcatctttgcctagattatggagttacagatgctgctgctttcttgcaagagagggttggtgatgttgggagtgcccttgaccttattctggctggacttgatgagaaaattagcttatttatctcttctgtggaaagtactttctctggcgtcgcatcaaaaagtatcgctgaaattaagcaaccagacatcgttctagaaatgagtgaggctcatccagtgcttgatgcattgcatgcctccattggattgtgccaaaggaattcacagcgcttggacccagaggaatctcagtccctttggttccaactccttgactccttctcagagccattaaaaaaactgtatgggatcaaggatgtaaatggaaaaggtgtcaagtccaattggagtgaagcatcaatggaacatctgaaggaaaaaggactatctcaacaaatgaggatttcaactaaacaaaagtgcctaaatgttctgcgaaaagtattttcacaatgtgttggagaaataatagaggccatggctgggtatattcccctaccggcaatcatggcaaaactgttatctgataatgggaatcaagagttcggtgatttcaaacttgtgatacacagaatgttatctatgtatctttacgaaaaaagaatactggaaacggctaagtcagtaattgaggatgactcattttacaccttgagcttattaaagagaggagtttgtcatgggtttgccccacagactttcgtatgctgcatatgcaactgttcactttctaaagaaggtgctatttcagccgtacgtttgttcagttgcgggcatgcaacacatcttcagtgtgagtctgagcagaccaggtcatccaatcaggaatccaaagagggatgccctgtttgtctctcaatgagtgatacgcaagctcgaagcaaatcacctatgtttgagaatgggctaatgaagtattctggggctgaacatgaagtgtcacatggcatgtatcagattcatgaagttgatcatgctgagagatctcgtgggcttcaacagatgtcacggtatgaaatactgaataatcttcagaaagcgcagaagtcctttcatatagaaaccgtacctccattgaaacttgcaccgccagctatataccatgagaagatacagaagaggaccacttcggttggtgaaactagcaaacattctgttagaagtcagaaaccccagaaaatttggcaaatgaaggagaaaaaatcaaaagaggctgggagtcatcatccacaaaagtcaagttttctacgttaatagaagaaaagattgctgatttgttaagtatgaaaccagatccaaactgattgttaatttgcttcatgccatcaccacgatcgaatcttcaagactacaaatttgtcagcgtgatggagcctgcccatcagtacatagcttttttttttgtcttggggatgcatcctgttggtttatcatcttctgcttaattacaggttctgtggagccaaggtgctttgggctagggaggaaattgtaacagtaaattttcatacagttcatcgtgattagttttgtgtacagagcagagcatacacgtggtgacatggtccctgtagagggacacattcgcagtaaaggtgggatgcctcgattcatactcaacaatgtaaagtaaaggtgggatacctcaattcatgatcattgtaaaatacgtgcacagtataacacaggagcactggctgagtggcatgtatccttgcagttcatcgcgattaatctctgtacagagctgttatactgtcggttttgatatcagttgcaattacacatctgctacagttttgtagtatcagatatcagaacacgtcgggcccgcagaacgcctggaagctcgtagttgtcggcgccgagcatcctgtcgccattgggttgcgc

SEQ ID NO: 215432 - DNA, 6672 bp, Zea Mays
cagtaaacgtacaggcgcatcgcgaaaaagctcgcaaaatcgcagcacactagcacagaaccttggacgcgaaggcgtcataccccgatgccggcgtcgtcgtcgccggcgatggcgtcgcagcatgcgccgccgaggcgggagctcgacctcgacgctttcctcccgtcctctccgacatcctccggggcctcggacgccgacccggccgacgatgaccaccgccgcgccgtcgacgacctgctccgcctcctctcctcctcagactcggactccgattccgaggagtctagccgcatcccaagcaccagcatccagacgctatcccgagtccaagccccggcgcctgtcgctgagccctcgccgtcgccttccccatccgcgtccccgtccccgaggagatccgcatcggccttgccgtcggagaccctctcctccctcgtcgcgagaaccttctcgagcaacggcgcttcctcgtcgtcgaagcccctcccctcgctcttccggggcgtccgccccagccccaaacccggcgccgcgcttgccgctgctgccgcagcgtcccgcgcggtcctcaccccacacgccgctgccatcaagtcgcgccgatcagtatcggcgcccgtggagaaagttctggaggaagaggggagtggctccgaaggctccaaggagttccttcccactgggagcttggaagcagaggtagaagagaagggtgattcggaagcggttgctgatgcgaccaagcaaactgcaggtgggaatgtgggtgcggaactgggagaggataaacaggcagaagtgggaggtgaagagaatgctgaggctataaagctggtggaggcaagtcctctggatgctctagctgcggaggattccagtgggcatgagcaaggtaatgatgccaatttggcggaaactgaccaagttgggaatcagattgaggctgtctatgaggaaaatgaggatgaccaaactggaggtgataatcatgttcaatcaggtcagggtatggatcttattgcgattgctttagaggaaagttctgatgatgaacatgaatttgaaagatctgacagtatcttgcaagaacaagtggaatctgggagcttaattgataaagtgattgaagatagggtagagcagctggaggccagcaggaaggctgagaacacagagaagaagctgaaggtgtcaatgaaaccgttggagtgggcagaggagcttgagaagaggcaggcctcgtctggtcaacattgggaggaaggagcagctgcgcagcccatgcaactagagggaatcggaaagggcccaccagctatcggttacatgcaaattgagatggacaatccagtaacccgtgtcatgtcctcaccgtcatttaggtcagaccatggctctccccaggtgctggctgttcataggagctatatagcaatgggcacatctaaaggtgctgtcatcgtcattccaagcaaatactccattcatcaagctgatgatacagatgcaaagatgctgttcttttggaaccaaggcgagaagactcaatcaccagtgactgccatgtgctttaaccagcaaggggaccttctgctagtaggatatggtgatggtcatatgacaatttgggatgtacagaaatctgcagcagcaaaagttatatatggcgagcatacagcaccagtagtgcatgcttgttttatccgccaatctaaagccatcactggggattcaaaaggggtagttctattgcacacattttccattatccccgtaattaatcgtttaactgtcaagggaactcagcgtctttttgatgggaatactggaattgtgctctcagcctgtcctcttgtaatggatgaatcttttggttttagtaattcatctgcccagggaaatcagacaacttcctccagtggtggtcttggcagcatgatgggtggtgttgttggaggcgtggttggagtagattctggatggaagtttttcaacgaaggctcttctccaatggaggatggtgttgtagtcatgtttattatgcatcaacatgctcttgtggttagactccgtaccaatattgaccatgttgaccatattgagaccttctctagaccagatggagcacgtgagggctccatcgcgtatgctgcgtggaaatatacatcatatttgaatgaatcgtcatcagtagatgaagaacgagtgtcatggctagcacttgcatgggaccgtcaagtgcaagttgcaaagtttgttaaatcaaagatatttaaacacaaagagtggaagcttgatagttcagctgttggtgttgcctggttagacgaccaggtttggtaacccagagaggcattttaacagttcagtagcggtaagaggtgctacagtgtatattcttgggccatcttttctcacggtttcccgacttcttccatggaaagagcgaattgaagcactaaagagggctggcgattggatgggtgcactagacatggcaatgaggctttatgatggtcagacacagggtgttgttgatctcccaagaacggttgattctattagagatgccataatgccttacttagtagagttgctgctatcatatataagttatgtttttgaatatatttcaattgcgctgccaaatcatactggaaaagggggagaatcaggtgttctaatagaggcagatcgatccctgcttacacaaagagatgagcagtacgctcgtgtaggaggggttgcagttgagtattgtgtccacattggacggaatgatatccttttcgatacagtcttctctaagtttgctgctgcagaaagtggaggtatgtttctggaggtgctagagccttatatattgaaggatatgcttggttctctgccccctgagattatgcaagcactagtggagcattatagtggcaaagggtggttgcaacgagttgaacaatgcatccttcacatggatatttcttcattggactttaatcaggtagtcagactttgtcgtgaacatgggctatatggtgcactaatttatttatttaaccaaggcctgaatgatttccgtacaccactagaggaacttctatcagtcgttcagaacaccaacagtaaagatgatgcttctagtggatacaggatgcttgtttatctgaaatattgctttcagggtttggcatttcctccagggcatggaataattccccaatcccggcttcattcagtgagggaagaactccttcaatttctgcttgaagaatctaagccactcacttctgaagtatttaagggtttcaatgcttcttgtggaaagtgcctaaacatatgctatctgctatggttggatactgaagctactttggaagtcatcaaatgtgcttttgtacaggataactttgagtctagagatgaacttccgagtactgtcaatacatctgcttcagataatgaagatggtattgatgctggaagaccagagggccaaaatgctatggtacaaaatgtggttgatgccatcattgacatagttggtttggaaaatgatgtgattcggtctgttatgggtagaactgaatcagaattatggccttcggagaaggattttggctatttaatggagtttgtgtccttttttgtttctcacaaaagggctaatgcatctaagagggttgttatgcacattcttacttatctcatttcgtcatatgatgacacaagaacaaggattcagaaagaaaaagaagttcttcaactcttcaatgcggttccccgaaacgattggaattcggattttgtcttgaacctttgttcagatgctcatttttatcaggcctgtggtttgatatttacagccaggaatcagaatttggctgctttagatagttacatgaaggataaagaggaacctttccatgcttttatcttcattgataagaagttactagaattggttgacgatgaagctttgtcgtttcataccacagtaatatctcgctttcctgagctagtcaagctaagcagggaatgtgcatttgtcttggcgattgatcatttctgtgataagatacagcaaatattagcagagcttcgttctgaccgacacagcctctttcttttcttgaaaactgctattgaagtacacttgtctggaaaacttgacttcagtaagcttgaattaagaaacaaacaaactgttgaactccagtactcttctactgaagttgaagcttatcagcagaggctatcaaatctctccaagttatgccacaatcctgtttacatcgacgacgagttagttgagctttatctggagcttttatgtcagtatgagcgaaggtcagttctgaagtttctggagacttttgacagttacagattggaacggtgcttgcatctttgcctagattatggagttacagatgctgctgctttcttgcaagagagggttggtgatgttgggagtgcccttgaccttattctggctggacttgatgagaaaattagcttatttatctcttctgtggaaagtactttctctggcgtcgcatcaaaaagtatcgctgaaattaagcaaccagacatcgttctagaaatgagtgaggctcatccagtgcttgatgcattgcatgcctccattggattgtgccaaaggaattcacagcgcttggacccagaggaatctcagtccctttggttccaactccttgactcgaaattattcaatagcgcatctagaaagacaatgcgagcctattgctgtaagcctgtgataatttgggggaagttttttccaaactgttctcaatttttgtcatgctcatagtttgctgaagacatatttaaggggtgtttgtttgagattataatatgtccagattatataatctaataaattttgaactaacactttcttcaaaatttattggattatataatctggacagattataatcccaaacaaacaccccattatatatttatattttgtactgatgtatactagtacttcttccaaattgttgggttattaattcagcttctcagagccattaaaaaaactgtatgggatcaaggatgtaaatggaaaaggtgtcaagtccaattggagtgaagcatcaatggaacatctgaaggaaaaaggactatctcaacaaatgaggatttcaactaaacaaaagtgcctaaatgttctgcgaaaagtattttcacaatgtgttggagaaataatagaggccatggctgggtatattcccctaccggcaatcatggcaaaactgttatctgataatgggaatcaagagttcggtgatttcaaacttgtgatacacagaatgttatctatgtatctttacgaaaaaagaatactggaaacggctaagtcagtaattgaggatgactcattttacaccttgagcttattaaagagaggagtttgtcatgggtttgccccacagactttcgtatgctgcatatgcaactgttcactttctaaagaaggtgctatttcagccgtacgtttgttcagttgcgggcatgcaacacatcttcagtgtgagtctgagcagaccaggtcatccaatcaggaatccaaagagggatgccctgtttgtctctcaatgagtgatacgcaagctcgaagcaaatcacctatgtttgagaatgggctaatgaagtattctggggctgaacatgaagtgtcacatggcatgtatcagattcatgaagttgatcatgctgagagatctcgtgggcttcaacagatgtcacggtatgaaatactgaataatcttcagaaagcgcagaagtcctttcatatagaaaccgtacctccattgaaacttgcaccgccagctatataccatgagaagatacagaagaggaccacttcggttggtgaaactagcaaacattctgttagaagtcagaaaccccagaaaatttggcaaatgaaggagaaaaaatcaaaagaggctgggagtcatcatccacaaaagtcaagttttctacgttaatagaagaaaagattgctgatttgttaagtatgaaaccagatccaaactgattgttaatttgcttcatgccatcaccacgatcgaatcttcaagactacaaatttgtcagcgtgatggagcctgcccatcagtacatagcttttttttttgtcttggggatgcatcctgttggtgagatcctcttcccctgcaccatggtcagaggttctgtggagccaaggtgctttgggctagggaggaaattgtaacagtaaattttcatacagttcatcgtgattagttttgtgtacagagcagagcatacacgtggtgacatggtccctgtagagggacacattcgcagtaaaggtgggatgcctcgattcatactcaacaatgtaaagtaaaggtgggatacctcaattcatgatcattgtaaaatacgtgcacagtataacacaggagcactggctgagtggcatgtatccttgcagttcatcgcgattaatctctgtacagagctgttatactgtcggttttgatatcagttgcaattacacatctgctacagttttgtagtatcagatatcagaacacgtcgggcccgcagaacgcctggaagctcgtagttgtcggcgccgagcatcctgtcgccattgggttgcgc

SEQ ID NO: 215433 - DNA, 6547 bp, Zea Mays
cagtaaacgtacaggcgcatcgcgaaaaagctcgcaaaatcgcagcacactagcacagaaccttggacgcgaaggcgtcataccccgatgccggcgtcgtcgtcgccggcgatggcgtcgcagcatgcgccgccgaggcgggagctcgacctcgacgctttcctcccgtcctctccgacatcctccggggcctcggacgccgacccggccgacgatgaccaccgccgcgccgtcgacgacctgctccgcctcctctcctcctcagactcggactccgattccgaggagtctagccgcatcccaagcaccagcatccagacgctatcccgagtccaagccccggcgcctgtcgctgagccctcgccgtcgccttccccatccgcgtccccgtccccgaggagatccgcatcggccttgccgtcggagaccctctcctccctcgtcgcgagaaccttctcgagcaacggcgcttcctcgtcgtcgaagcccctcccctcgctcttccggggcgtccgccccagccccaaacccggcgccgcgcttgccgctgctgccgcagcgtcccgcgcggtcctcaccccacacgccgctgccatcaagtcgcgccgatcagtatcggcgcccgtggagaaagttctggaggaagaggggagtggctccgaaggctccaaggagttccttcccactgggagcttggaagcagaggtagaagagaagggtgattcggaagcggttgctgatgcgaccaagcaaactgcaggtgggaatgtgggtgcggaactgggagaggataaacaggcagaagtgggaggtgaagagaatgctgaggctataaagctggtggaggcaagtcctctggatgctctagctgcggaggattccagtgggcatgagcaaggtaatgatgccaatttggcggaaactgaccaagttgggaatcagattgaggctgtctatgaggaaaatgaggatgaccaaactggaggtgataatcatgttcaatcaggtcagggtatggatcttattgcgattgctttagaggaaagttctgatgatgaacatgaatttgaaagatctgacagtatcttgcaagaacaagtggaatctgggagcttaattgataaagtgattgaagatagggtagagcagctggaggccagcaggaaggctgagaacacagagaagaagctgaaggtgtcaatgaaaccgttggagtgggcagaggagcttgagaagaggcaggcctcgtctggtcaacattgggaggaaggagcagctgcgcagcccatgcaactagagggaatcggaaagggcccaccagctatcggttacatgcaaattgagatggacaatccagtaacccgtgtcatgtcctcaccgtcatttaggtcagaccatggctctccccaggtgctggctgttcataggagctatatagcaatgggcacatctaaaggtgctgtcatcgtcattccaagcaaatactccattcatcaagctgatgatacagatgcaaagatgctgttcttttggaaccaaggcgagaagactcaatcaccagtgactgccatgtgctttaaccagcaaggggaccttctgctagtaggatatggtgatggtcatatgacaatttgggatgtacagaaatctgcagcagcaaaagttatatatggcgagcatacagcaccagtagtgcatgcttgttttatccgccaatctaaagccatcactggggattcaaaaggggtagttctattgcacacattttccattatccccgtaattaatcgtttaactgtcaagggaactcagcgtctttttgatgggaatactggaattgtgctctcagcctgtcctcttgtaatggatgaatcttttggttttagtaattcatctgcccagggaaatcagacaacttcctccagtggtggtcttggcagcatgatgggtggtgttgttggaggcgtggttggagtagattctggatggaagtttttcaacgaaggctcttctccaatggaggatggtgttgtagtcatgtttattatgcatcaacatgctcttgtggttagactccgtaccaatattgaccatgttgaccatattgagaccttctctagaccagatggagcacgtgagggctccatcgcgtatgctgcgtggaaatatacatcatatttgaatgaatcgtcatcagtagatgaagaacgagtgtcatggctagcacttgcatgggaccgtcaagtgcaagttgcaaagtttgttaaatcaaagatatttaaacacaaagagtggaagcttgatagttcagctgttggtgttgcctggttagacgaccagatgttagttgtccttaatttgagagggcaactctgtttattctctaaagatggcagtgagcttcgcagaactacctttgttcctgatggccttctttttgatgacaccatattgcaccatgcacatttttttaacaggtttggtaacccagagaggcattttaacagttcagtagcggtaagaggtgctacagtgtatattcttgggccatcttttctcacggtttcccgacttcttccatggaaagagcgaattgaagcactaaagagggctggcgattggatgggtgcactagacatggcaatgaggctttatgatggtcagacacagggtgttgttgatctcccaagaacggttgattctattagagatgccataatgccttacttagtagagttgctgctatcatatataagttatgtttttgaatatatttcaattgcgctgccaaatcatactggaaaagggggagaatcaggtgttctaatagaggcagatcgatccctgcttacacaaagagatgagcagtacgctcgtgtaggaggggttgcagttgagtattgtgtccacattggacggaatgatatccttttcgatacagtcttctctaagtttgctgctgcagaaagtggaggtatgtttctggaggtgctagagccttatatattgaaggatatgcttggttctctgccccctgagattatgcaagcactagtggagcattatagtggcaaagggtggttgcaacgagttgaacaatgcatccttcacatggatatttcttcattggactttaatcaggtagtcagactttgtcgtgaacatgggctatatggtgcactaatttatttatttaaccaaggcctgaatgatttccgtacaccactagaggaacttctatcagtcgttcagaacaccaacagtaaagatgatgcttctagtggatacaggatgcttgtttatctgaaatattgctttcagggtttggcatttcctccagggcatggaataattccccaatcccggcttcattcagtgagggaagaactccttcaatttctgcttgaagaatctaagccactcacttctgaagtatttaagggtttcaatgcttcttgtggaaagtgcctaaacatatgctatctgctatggttggatactgaagctactttggaagtcatcaaatgtgcttttgtacaggataactttgagtctagagatgaacttccgagtactgtcaatacatctgcttcagataatgaagatggtattgatgctggaagaccagagggccaaaatgctatggtacaaaatgtggttgatgccatcattgacatagttggtttggaaaatgatgtgattcggtctgttatgggtagaactgaatcagaattatggccttcggagaaggattttggctatttaatggagtttgtgtccttttttgtttctcacaaaagggctaatgcatctaagagggttgttatgcacattcttacttatctcatttcgtcatatgatgacacaagaacaaggattcagaaagaaaaagaagttcttcaactcttcaatgcggttccccgaaacgattggaattcggattttgtcttgaacctttgttcagatgctcatttttatcaggcctgtggtttgatatttacagccaggaatcagaatttggctgctttagatagttacatgaaggataaagaggaacctttccatgcttttatcttcattgataagaagttactagaattggttgacgatgaagctttgtcgtttcataccacagtaatatctcgctttcctgagctagtcaagctaagcagggaatgtgcatttgtcttggcgattgatcatttctgtgataagatacagcaaatattagcagagcttcgttctgaccgacacagcctctttcttttcttgaaaactgctattgaagtacacttgtctggaaaacttgacttcagtaagcttgaattaagaaacaaacaaactgttgaactccagtactcttctactgaagttgaagcttatcagcagaggctatcaaatctctccaagttatgccacaatcctgtttacatcgacgacgagttagttgagctttatctggagcttttatgtcagtatgagcgaaggtcagttctgaagtttctggagacttttgacagttacagattggaacggtgcttgcatctttgcctagattatggagttacagatgctgctgctttcttgcaagagagggttggtgatgttgggagtgcccttgaccttattctggctggacttgatgagaaaattagcttatttatctcttctgtggaaagtactttctctggcgtcgcatcaaaaagtatcgctgaaattaagcaaccagacatcgttctagaaatgagtgagtgcttgatgcattgcatgcctccattggattgtgccaaaggaattcacagcgcttggacccagaggaatctcagtccctttggttccaactccttgactcgaaattattcaatagcgcatctagaaagacaatgcgagcctattgctcttctcagagccattaaaaaaactgtatgggatcaaggatgtaaatggaaaaggtgtcaagtccaattggagtgaagcatcaatggaacatctgaaggaaaaaggactatctcaacaaatgaggatttcaactaaacaaaagtgcctaaatgttctgcgaaaagtattttcacaatgtgttggagaaataatagaggccatggctgggtatattcccctaccggcaatcatggcaaaactgttatctgataatgggaatcaagagttcggtgatttcaaacttgtgatacacagaatgttatctatgtatctttacgaaaaaagaatactggaaacggctaagtcagtaattgaggatgactcattttacaccttgagcttattaaagagaggagtttgtcatgggtttgccccacagactttcgtatgctgcatatgcaactgttcactttctaaagaaggtgctatttcagccgtacgtttgttcagttgcgggcatgcaacacatcttcagtgtgagtctgagcagaccaggtcatccaatcaggaatccaaagagggatgccctgtttgtctctcaatgagtgatacgcaagctcgaagcaaatcacctatgtttgagaatgggctaatgaagtattctggggctgaacatgaagtgtcacatggcatgtatcagattcatgaagttgatcatgctgagagatctcgtgggcttcaacagatgtcacggtatgaaatactgaataatcttcagaaagcgcagaagtcctttcatatagaaaccgtacctccattgaaacttgcaccgccagctatataccatgagaagatacagaagaggaccacttcggttggtgaaactagcaaacattctgttagaagtcagaaaccccagaaaatttggcaaatgaaggagaaaaaatcaaaagaggctgggagtcatcatccacaaaagtcaagttttctacgttaatagaagaaaagattgctgatttgttaagtatgaaaccagatccaaactgattgttaatttgcttcatgccatcaccacgatcgaatcttcaagactacaaatttgtcagcgtgatggagcctgcccatcagtacatagcttttttttttgtcttggggatgcatcctgttggtgagatcctcttcccctgcaccatggtcagaggtttatcatcttctgcttaattacaggttctgtggagccaaggtgctttgggctagggaggaaattgtaacagtaaattttcatacagttcatcgtgattagttttgtgtacagagcagagcatacacgtggtgacatggtccctgtagagggacacattcgcagtaaaggtgggatgcctcgattcatactcaacaatgtaaagtaaaggtgggatacctcaattcatgatcattgtaaaatacgtgcacagtataacacaggagcactggctgagtggcatgtatccttgcagttcatcgcgattaatctctgtacagagctgttatactgtcggttttgatatcagttgcaattacacatctgctacagttttgtagtatcagatatcagaacacgtcgggcccgcagaacgcctggaagctcgtagttgtcggcgccgagcatcctgtcgccattgggttgcgc

SEQ ID NO: 215434 - DNA, 6479 bp, Zea Mays
cagtaaacgtacaggcgcatcgcgaaaaagctcgcaaaatcgcagcacactagcacagaaccttggacgcgaaggcgtcataccccgatgccggcgtcgtcgtcgccggcgatggcgtcgcagcatgcgccgccgaggcgggagctcgacctcgacgctttcctcccgtcctctccgacatcctccggggcctcggacgccgacccggccgacgatgaccaccgccgcgccgtcgacgacctgctccgcctcctctcctcctcagactcggactccgattccgaggagtctagccgcatcccaagcaccagcatccagacgctatcccgagtccaagccccggcgcctgtcgctgagccctcgccgtcgccttccccatccgcgtccccgtccccgaggagatccgcatcggccttgccgtcggagaccctctcctccctcgtcgcgagaaccttctcgagcaacggcgcttcctcgtcgtcgaagcccctcccctcgctcttccggggcgtccgccccagccccaaacccggcgccgcgcttgccgctgctgccgcagcgtcccgcgcggtcctcaccccacacgccgctgccatcaagtcgcgccgatcagtatcggcgcccgtggagaaagttctggaggaagaggggagtggctccgaaggctccaaggagttccttcccactgggagcttggaagcagaggtagaagagaagggtgattcggaagcggttgctgatgcgaccaagcaaactgcaggtgggaatgtgggtgcggaactgggagaggataaacaggcagaagtgggaggtgaagagaatgctgaggctataaagctggtggaggcaagtcctctggatgctctagctgcggaggattccagtgggcatgagcaaggtaatgatgccaatttggcggaaactgaccaagttgggaatcagattgaggctgtctatgaggaaaatgaggatgaccaaactggaggtgataatcatgttcaatcaggtcagggtatggatcttattgcgattgctttagaggaaagttctgatgatgaacatgaatttgaaagatctgacagtatcttgcaagaacaagtggaatctgggagcttaattgataaagtgattgaagatagggtagagcagctggaggccagcaggaaggctgagaacacagagaagaagctgaaggtgtcaatgaaaccgttggagtgggcagaggagcttgagaagaggcaggcctcgtctggtcaacattgggaggaaggagcagctgcgcagcccatgcaactagagggaatcggaaagggcccaccagctatcggttacatgcaaattgagatggacaatccagtaacccgtgtcatgtcctcaccgtcatttaggtcagaccatggctctccccaggtgctggctgttcataggagctatatagcaatgggcacatctaaaggtgctgtcatcgtcattccaagcaaatactccattcatcaagctgatgatacagatgcaaagatgctgttcttttggaaccaaggcgagaagactcaatcaccagtgactgccatgtgctttaaccagcaaggggaccttctgctagtaggatatggtgatggtcatatgacaatttgggatgtacagaaatctgcagcagcaaaagttatatatggcgagcatacagcaccagtagtgcatgcttgttttatccgccaatctaaagccatcactggggattcaaaaggggtagttctattgcacacattttccattatccccgtaattaatcgtttaactgtcaagggaactcagcgtctttttgatgggaatactggaattgtgctctcagcctgtcctcttgtaatggatgaatcttttggttttagtaattcatctgcccagggaaatcagacaacttcctccagtggtggtcttggcagcatgatgggtggtgttgttggaggcgtggttggagtagattctggatggaagtttttcaacgaaggctcttctccaatggaggatggtgttgtagtcatgtttattatgcatcaacatgctcttgtggttagactccgtaccaatattgaccatgttgaccatattgagaccttctctagaccagatggagcacgtgagggctccatcgcgtatgctgcgtggaaatatacatcatatttgaatgaatcgtcatcagtagatgaagaacgagtgtcatggctagcacttgcatgggaccgtcaagtgcaagttgcaaagtttgttaaatcaaagatatttaaacacaaagagtggaagcttgatagttcagctgttggtgttgcctggttagacgaccagatgttagttgtccttaatttgagagggcaactctgtttattctctaaagatggcagtgagcttcgcagaactacctttgttcctgatggccttctttttgatgacaccatattgcaccatgcacatttttttaacaggtttggtaacccagagaggcattttaacagttcagtagcggtaagaggtgctacagtgtatattcttgggccatcttttctcacggtttcccgacttcttccatggaaagagcgaattgaagcactaaagagggctggcgattggatgggtgcactagacatggcaatgaggctttatgatggtcagacacagggtgttgttgatctcccaagaacggttgattctattagagatgccataatgccttacttagtagagttgctgctatcatatataagttatgtttttgaatatatttcaattgcgctgccaaatcatactggaaaagggggagaatcaggtgttctaatagaggcagatcgatccctgcttacacaaagagatgagcagtacgctcgtgtaggaggggttgcagttgagtattgtgtccacattggacggaatgatatccttttcgatacagtcttctctaagtttgctgctgcagaaagtggaggtatgtttctggaggtgctagagccttatatattgaaggatatgcttggttctctgccccctgagattatgcaagcactagtggagcattatagtggcaaagggtggttgcaacgagttgaacaatgcatccttcacatggatatttcttcattggactttaatcaggtagtcagactttgtcgtgaacatgggctatatggtgcactaatttatttatttaaccaaggcctgaatgatttccgtacaccactagaggaacttctatcagtcgttcagaacaccaacagtaaagatgatgcttctagtggatacaggatgcttgtttatctgaaatattgctttcagggtttggcatttcctccagggcatggaataattccccaatcccggcttcattcagtgagggaagaactccttcaatttctgcttgaagaatctaagccactcacttctgaagtatttaagggtttcaatgcttcttgtggaaagtgcctaaacatatgctatctgctatggttggatactgaagctactttggaagtcatcaaatgtgcttttgtacaggataactttgagtctagagatgaacttccgagtactgtcaatacatctgcttcagataatgaagatggtattgatgctggaagaccagagggccaaaatgctatggtacaaaatgtggttgatgccatcattgacatagttggtttggaaaatgatgtgattcggtctgttatgggtagaactgaatcagaattatggccttcggagaaggattttggctatttaatggagtttgtgtccttttttgtttctcacaaaagggctaatgcatctaagagggttgttatgcacattcttacttatctcatttcgtcatatgatgacacaagaacaaggattcagaaagaaaaagaagttcttcaactcttcaatgcggttccccgaaacgattggaattcggattttgtcttgaacctttgttcagatgctcatttttatcaggcctgtggtttgatatttacagccaggaatcagaatttggctgctttagatagttacatgaaggataaagaggaacctttccatgcttttatcttcattgataagaagttactagaattggttgacgatgaagctttgtcgtttcataccacagtaatatctcgctttcctgagctagtcaagctaagcagggaatgtgcatttgtcttggcgattgatcatttctgtgataagatacagcaaatattagcagagcttcgttctgaccgacacagcctctttcttttcttgaaaactgctattgaagtacacttgtctggaaaacttgacttcagtaagcttgaattaagaaacaaacaaactgttgaactccagtactcttctactgaagttgaagcttatcagcagaggctatcaaatctctccaagttatgccacaatcctgtttacatcgacgacgagttagttgagctttatctggagcttttatgtcagtatgagcgaaggtcagttctgaagtttctggagacttttgacagttacagattggaacggtgcttgcatctttgcctagattatggagttacagatgctgctgctttcttgcaagagagggttggtgatgttgggagtgcccttgaccttattctggctggacttgatgagaaaattagcttatttatctcttctgtggaaagtactttctctggcgtcgcatcaaaaagtatcgctgaaattaagcaaccagacatcgttctagaaatgagctcatccagtgcttgatgcattgcatgcctccattggattgtgccaaaggaattcacagcgcttggacccagaggaatctcagtccctttggttccaactccttgactccttctcagagccattaaaaaaactgtatgggatcaaggatgtaaatggaaaaggtgtcaagtccaattggagtgaagcatcaatggaacatctgaaggaaaaaggactatctcaacaaatgaggatttcaactaaacaaaagtgcctaaatgttctgcgaaaagtattttcacaatgtgttggagaaataatagaggccatggctgggtatattcccctaccggcaatcatggcaaaactgttatctgataatgggaatcaagagttcggtgatttcaaacttgtgatacacagaatgttatctatgtatctttacgaaaaaagaatactggaaacggctaagtcagtaattgaggatgactcattttacaccttgagcttattaaagagaggagtttgtcatgggtttgccccacagactttcgtatgctgcatatgcaactgttcactttctaaagaaggtgctatttcagccgtacgtttgttcagttgcgggcatgcaacacatcttcagtgtgagtctgagcagaccaggtcatccaatcaggaatccaaagagggatgccctgtttgtctctcaatgagtgatacgcaagctcgaagcaaatcacctatgtttgagaatgggctaatgaagtattctggggctgaacatgaagtgtcacatggcatgtatcagattcatgaagttgatcatgctgagagatctcgtgggcttcaacagatgtcacggtatgaaatactgaataatcttcagaaagcgcagaagtcctttcatatagaaaccgtacctccattgaaacttgcaccgccagctatataccatgagaagatacagaagaggaccacttcggttggtgaaactagcaaacattctgttagaagtcagaaaccccagaaaatttggcaaatgaaggagaaaaaatcaaaagaggctgggagtcatcatccacaaaagtcaagttttctacgttaatagaagaaaagattgctgatttgttaagtatgaaaccagatccaaactgattgttaatttgcttcatgccatcaccacgatcgaatcttcaagactacaaatttgtcagcgtgatggagcctgcccatcagtacatagcttttttttttgtcttggggatgcatcctgttggtgagatcctcttcccctgcaccatggtcagaggttctgtggagccaaggtgctttgggctagggaggaaattgtaacagtaaattttcatacagttcatcgtgattagttttgtgtacagagcagagcatacacgtggtgacatggtccctgtagagggacacattcgcagtaaaggtgggatgcctcgattcatactcaacaatgtaaagtaaaggtgggatacctcaattcatgatcattgtaaaatacgtgcacagtataacacaggagcactggctgagtggcatgtatccttgcagttcatcgcgattaatctctgtacagagctgttatactgtcggttttgatatcagttgcaattacacatctgctacagttttgtagtatcagatatcagaacacgtcgggcccgcagaacgcctggaagctcgtagttgtcggcgccgagcatcctgtcgccattgggttgcgc

SEQ ID NO: 215435 - DNA, 6479 bp, Zea Mays
cagtaaacgtacaggcgcatcgcgaaaaagctcgcaaaatcgcagcacactagcacagaaccttggacgcgaaggcgtcataccccgatgccggcgtcgtcgtcgccggcgatggcgtcgcagcatgcgccgccgaggcgggagctcgacctcgacgctttcctcccgtcctctccgacatcctccggggcctcggacgccgacccggccgacgatgaccaccgccgcgccgtcgacgacctgctccgcctcctctcctcctcagactcggactccgattccgaggagtctagccgcatcccaagcaccagcatccagacgctatcccgagtccaagccccggcgcctgtcgctgagccctcgccgtcgccttccccatccgcgtccccgtccccgaggagatccgcatcggccttgccgtcggagaccctctcctccctcgtcgcgagaaccttctcgagcaacggcgcttcctcgtcgtcgaagcccctcccctcgctcttccggggcgtccgccccagccccaaacccggcgccgcgcttgccgctgctgccgcagcgtcccgcgcggtcctcaccccacacgccgctgccatcaagtcgcgccgatcagtatcggcgcccgtggagaaagttctggaggaagaggggagtggctccgaaggctccaaggagttccttcccactgggagcttggaagcagaggtagaagagaagggtgattcggaagcggttgctgatgcgaccaagcaaactgcaggtgggaatgtgggtgcggaactgggagaggataaacaggcagaagtgggaggtgaagagaatgctgaggctataaagctggtggaggcaagtcctctggatgctctagctgcggaggattccagtgggcatgagcaaggtaatgatgccaatttggcggaaactgaccaagttgggaatcagattgaggctgtctatgaggaaaatgaggatgaccaaactggaggtgataatcatgttcaatcaggtcagggtatggatcttattgcgattgctttagaggaaagttctgatgatgaacatgaatttgaaagatctgacagtatcttgcaagaacaagtggaatctgggagcttaattgataaagtgattgaagatagggtagagcagctggaggccagcaggaaggctgagaacacagagaagaagctgaaggtgtcaatgaaaccgttggagtgggcagaggagcttgagaagaggcaggcctcgtctggtcaacattgggaggaaggagcagctgcgcagcccatgcaactagagggaatcggaaagggcccaccagctatcggttacatgcaaattgagatggacaatccagtaacccgtgtcatgtcctcaccgtcatttaggtcagaccatggctctccccaggtgctggctgttcataggagctatatagcaatgggcacatctaaaggtgctgtcatcgtcattccaagcaaatactccattcatcaagctgatgatacagatgcaaagatgctgttcttttggaaccaaggcgagaagactcaatcaccagtgactgccatgtgctttaaccagcaaggggaccttctgctagtaggatatggtgatggtcatatgacaatttgggatgtacagaaatctgcagcagcaaaagttatatatggcgagcatacagcaccagtagtgcatgcttgttttatccgccaatctaaagccatcactggggattcaaaaggggtagttctattgcacacattttccattatccccgtaattaatcgtttaactgtcaagggaactcagcgtctttttgatgggaatactggaattgtgctctcagcctgtcctcttgtaatggatgaatcttttggttttagtaattcatctgcccagggaaatcagacaacttcctccagtggtggtcttggcagcatgatgggtggtgttgttggaggcgtggttggagtagattctggatggaagtttttcaacgaaggctcttctccaatggaggatggtgttgtagtcatgtttattatgcatcaacatgctcttgtgactccgtaccaatattgaccatgttgaccatattgagaccttctctagaccagatggagcacgtgagggctccatcgcgtatgctgcgtggaaatatacatcatatttgaatgaatcgtcatcagtagatgaagaacgagtgtcatggctagcacttgcatgggaccgtcaagtgcaagttgcaaagtttgttaaatcaaagatatttaaacacaaagagtggaagcttgatagttcagctgttggtgttgcctggttagacgaccagatgttagttgtccttaatttgagagggcaactctgtttattctctaaagatggcagtgagcttcgcagaactacctttgttcctgatggccttctttttgatgacaccatattgcaccatgcacatttttttaacaggtttggtaacccagagaggcattttaacagttcagtagcggtaagaggtgctacagtgtatattcttgggccatcttttctcacggtttcccgacttcttccatggaaagagcgaattgaagcactaaagagggctggcgattggatgggtgcactagacatggcaatgaggctttatgatggtcagacacagggtgttgttgatctcccaagaacggttgattctattagagatgccataatgccttacttagtagagttgctgctatcatatataagttatgtttttgaatatatttcaattgcgctgccaaatcatactggaaaagggggagaatcaggtgttctaatagaggcagatcgatccctgcttacacaaagagatgagcagtacgctcgtgtaggaggggttgcagttgagtattgtgtccacattggacggaatgatatccttttcgatacagtcttctctaagtttgctgctgcagaaagtggaggtatgtttctggaggtgctagagccttatatattgaaggatatgcttggttctctgccccctgagattatgcaagcactagtggagcattatagtggcaaagggtggttgcaacgagttgaacaatgcatccttcacatggatatttcttcattggactttaatcaggtagtcagactttgtcgtgaacatgggctatatggtgcactaatttatttatttaaccaaggcctgaatgatttccgtacaccactagaggaacttctatcagtcgttcagaacaccaacagtaaagatgatgcttctagtggatacaggatgcttgtttatctgaaatattgctttcagggtttggcatttcctccagggcatggaataattccccaatcccggcttcattcagtgagggaagaactccttcaatttctgcttgaagaatctaagccactcacttctgaagtatttaagggtttcaatgcttcttgtggaaagtgcctaaacatatgctatctgctatggttggatactgaagctactttggaagtcatcaaatgtgcttttgtacaggataactttgagtctagagatgaacttccgagtactgtcaatacatctgcttcagataatgaagatggtattgatgctggaagaccagagggccaaaatgctatggtacaaaatgtggttgatgccatcattgacatagttggtttggaaaatgatgtgattcggtctgttatgggtagaactgaatcagaattatggccttcggagaaggattttggctatttaatggagtttgtgtccttttttgtttctcacaaaagggctaatgcatctaagagggttgttatgcacattcttacttatctcatttcgtcatatgatgacacaagaacaaggattcagaaagaaaaagaagttcttcaactcttcaatgcggttccccgaaacgattggaattcggattttgtcttgaacctttgttcagatgctcatttttatcaggcctgtggtttgatatttacagccaggaatcagaatttggctgctttagatagttacatgaaggataaagaggaacctttccatgcttttatcttcattgataagaagttactagaattggttgacgatgaagctttgtcgtttcataccacagtaatatctcgctttcctgagctagtcaagctaagcagggaatgtgcatttgtcttggcgattgatcatttctgtgataagatacagcaaatattagcagagcttcgttctgaccgacacagcctctttcttttcttgaaaactgctattgaagtacacttgtctggaaaacttgacttcagtaagcttgaattaagaaacaaacaaactgttgaactccagtactcttctactgaagttgaagcttatcagcagaggctatcaaatctctccaagttatgccacaatcctgtttacatcgacgacgagttagttgagctttatctggagcttttatgtcagtatgagcgaaggtcagttctgaagtttctggagacttttgacagttacagattggaacggtgcttgcatctttgcctagattatggagttacagatgctgctgctttcttgcaagagagggttggtgatgttgggagtgcccttgaccttattctggctggacttgatgagaaaattagcttatttatctcttctgtggaaagtactttctctggcgtcgcatcaaaaagtatcgctgaaattaagcaaccagacatcgttctagaaatgagtgaggctcatccagtgcttgatgcattgcatgcctccattggattgtgccaaaggaattcacagcgcttggacccagaggaatctcagtccctttggttccaactccttgactccttctcagagccattaaaaaaactgtatgggatcaaggatgtaaatggaaaaggtgtcaagtccaattggagtgaagcatcaatggaacatctgaaggaaaaaggactatctcaacaaatgaggatttcaactaaacaaaagtgcctaaatgttctgcgaaaagtattttcacaatgtgttggagaaataatagaggccatggctgggtatattcccctaccggcaatcatggcaaaactgttatctgataatgggaatcaagagttcggtgatttcaaacttgtgatacacagaatgttatctatgtatctttacgaaaaaagaatactggaaacggctaagtcagtaattgaggatgactcattttacaccttgagcttattaaagagaggagtttgtcatgggtttgccccacagactttcgtatgctgcatatgcaactgttcactttctaaagaaggtgctatttcagccgtacgtttgttcagttgcgggcatgcaacacatcttcagtgtgagtctgagcagaccaggtcatccaatcaggaatccaaagagggatgccctgtttgtctctcaatgagtgatacgcaagctcgaagcaaatcacctatgtttgagaatgggctaatgaagtattctggggctgaacatgaagtgtcacatggcatgtatcagattcatgaagttgatcatgctgagagatctcgtgggcttcaacagatgtcacggtatgaaatactgaataatcttcagaaagcgcagaagtcctttcatatagaaaccgtacctccattgaaacttgcaccgccagctatataccatgagaagatacagaagaggaccacttcggttggtgaaactagcaaacattctgttagaagtcagaaaccccagaaaatttggcaaatgaaggagaaaaaatcaaaagaggctgggagtcatcatccacaaaagtcaagttttctacgttaatagaagaaaagattgctgatttgttaagtatgaaaccagatccaaactgattgttaatttgcttcatgccatcaccacgatcgaatcttcaagactacaaatttgtcagcgtgatggagcctgcccatcagtacatagcttttttttttgtcttggggatgcatcctgttggtgagatcctcttcccctgcaccatggtcagaggttctgtggagccaaggtgctttgggctagggaggaaattgtaacagtaaattttcatacagttcatcgtgattagttttgtgtacagagcagagcatacacgtggtgacatggtccctgtagagggacacattcgcagtaaaggtgggatgcctcgattcatactcaacaatgtaaagtaaaggtgggatacctcaattcatgatcattgtaaaatacgtgcacagtataacacaggagcactggctgagtggcatgtatccttgcagttcatcgcgattaatctctgtacagagctgttatactgtcggttttgatatcagttgcaattacacatctgctacagttttgtagtatcagatatcagaacacgtcgggcccgcagaacgcctggaagctcgtagttgtcggcgccgagcatcctgtcgccattgggttgcgc

SEQ ID NO: 215436 - DNA, 6531 bp, Zea Mays
cagtaaacgtacaggcgcatcgcgaaaaagctcgcaaaatcgcagcacactagcacagaaccttggacgcgaaggcgtcataccccgatgccggcgtcgtcgtcgccggcgatggcgtcgcagcatgcgccgccgaggcgggagctcgacctcgacgctttcctcccgtcctctccgacatcctccggggcctcggacgccgacccggccgacgatgaccaccgccgcgccgtcgacgacctgctccgcctcctctcctcctcagactcggactccgattccgaggagtctagccgcatcccaagcaccagcatccagacgctatcccgagtccaagccccggcgcctgtcgctgagccctcgccgtcgccttccccatccgcgtccccgtccccgaggagatccgcatcggccttgccgtcggagaccctctcctccctcgtcgcgagaaccttctcgagcaacggcgcttcctcgtcgtcgaagcccctcccctcgctcttccggggcgtccgccccagccccaaacccggcgccgcgcttgccgctgctgccgcagcgtcccgcgcggtcctcaccccacacgccgctgccatcaagtcgcgccgatcagtatcggcgcccgtggagaaagttctggaggaagaggggagtggctccgaaggctccaaggagttccttcccactgggagcttggaagcagaggtagaagagaagggtgattcggaagcggttgctgatgcgaccaagcaaactgcaggtgggaatgtgggtgcggaactgggagaggataaacaggcagaagtgggaggtgaagagaatgctgaggctataaagctggtggaggcaagtcctctggatgctctagctgcggaggattccagtgggcatgagcaaggtaatgatgccaatttggcggaaactgaccaagttgggaatcagattgaggctgtctatgaggaaaatgaggatgaccaaactggaggtgataatcatgttcaatcaggtcagggtatggatcttattgcgattgctttagaggaaagttctgatgatgaacatgaatttgaaagatctgacagtatcttgcaagaacaagtggaatctgggagcttaattgataaagtgattgaagatagggtagagcagctggaggccagcaggaaggctgagaacacagagaagaagctgaaggtgtcaatgaaaccgttggagtgggcagaggagcttgagaagaggcaggcctcgtctggtcaacattgggaggaaggagcagctgcgcagcccatgcaactagagggaatcggaaagggcccaccagctatcggttacatgcaaattgagatggacaatccagtaacccgtgtcatgtcctcaccgtcatttaggtcagaccatggctctccccaggtgctggctgttcataggagctatatagcaatgggcacatctaaaggtgctgtcatcgtcattccaagcaaatactccattcatcaagctgatgatacagatgcaaagatgctgttcttttggaaccaaggcgagaagactcaatcaccagtgactgccatgtgctttaaccagcaaggggaccttctgctagtaggatatggtgatggtcatatgacaatttgggatgtacagaaatctgcagcagcaaaagttatatatggcgagcatacagcaccagtagtgcatgcttgttttatccgccaatctaaagccatcactggggattcaaaaggggtagttctattgcacacattttccattatccccgtaattaatcgtttaactgtcaagggaactcagcgtctttttgatgggaatactggaattgtgctctcagcctgtcctcttgtaatggatgaatcttttggttttagtaattcatctgcccagggaaatcagacaacttcctccagtggtggtcttggcagcatgatgggtggtgttgttggaggcgtggttggagtagattctggatggaagtttttcaacgaaggctcttctccaatggaggatggtgttgtagtcatgtttattatgcatcaacatgctcttgtggttagactccgtaccaatattgaccatgttgaccatattgagaccttctctagaccagatggagcacgtgagggctccatcgcgtatgctgcgtggaaatatacatcatatttgaatgaatcgtcatcagtagatgaagaacgagtgtcatggctagcacttgcatgggaccgtcaagtgcaagttgcaaagtttgttaaatcaaagatatttaaacacaaagagtggaagcttgatagttcagctgttggtgttgcctggttagacgaccagatgttagttgtccttaatttgagagggcaactctgtttattctctaaagatggcagtgagcttcgcagaactacctttgttcctgatggccttctttttgatgacaccatattgcaccatgcacatttttttaacaggtttggtaacccagagaggcattttaacagttcagtagcggtaagaggtgctacagtgtatattcttgggccatcttttctcacggtttcccgacttcttccatggaaagagcgaattgaagcactaaagagggctggcgattggatgggtgcactagacatggcaatgaggctttatgatggtcagacacagggtgttgttgatctcccaagaacggttgattctattagagatgccataatgccttacttagtagagttgctgctatcatatataagttatgtttttgaatatatttcaattgcgctgccaaatcatactggaaaagggggagaatcaggtgttctaatagaggcagatcgatccctgcttacacaaagagatgagcagtacgctcgtgtaggaggggttgcagttgagtattgtgtccacattggacggaatgatatccttttcgatacagtcttctctaagtttgctgctgcagaaagtggaggtatgtttctggaggtgctagagccttatatattgaaggatatgcttggttctctgccccctgagattatgcaagcactagtggagcattatagtggcaaagggtggttgcaacgagttgaacaatgcatccttcacatggatatttcttcattggactttaatcaggtagtcagactttgtcgtgaacatgggctatatggtgcactaatttatttatttaaccaaggcctgaatgatttccgtacaccactagaggaacttctatcagtcgttcagaacaccaacagtaaagatgatgcttctagtggatacaggatgcttgtttatctgaaatattgctttcagggtttggcatttcctccagggcatggaataattccccaatcccggcttcattcagtgagggaagaactccttcaatttctgcttgaagaatctaagccactcacttctgaagtatttaagggtttcaatgcttcttgtggaaagtgcctaaacatatgctatctgctatggttggatactgaagctactttggaagtcatcaaatgtgcttttgtacaggataactttgagtctagagatgaacttccgagtactgtcaatacatctgcttcagataatgaagatggtattgatgctggaagaccagagggccaaaatgctatggtacaaaatgtggttgatgccatcattgacatagttggtttggaaaatgatgtgattcggtctgttatgggtagaactgaatcagaattatggccttcggagaaggattttggctatttaatggagtttgtgtccttttttgtttctcacaaaagggctaatgcatctaagagggttgttatgcacattcttacttatctcatttcgtcatatgatgacacaagaacaaggattcagaaagaaaaagaagttcttcaactcttcaatgcggttccccgaaacgattggaattcggattttgtcttgaacctttgttcagatgctcatttttatcaggcctgtggtttgatatttacagccaggaatcagaatttggctgctttagatagttacatgaaggataaagaggaacctttccatgcttttatcttcattgataagaagttactagaattggttgacgatgaagctttgtcgtttcataccacagtaatatctcgctttcctgagctagtcaagctaagcagggaatgtgcatttgtcttggcgattgatcatttctgtgataagatacagcaaatattagcagagcttcgttctgaccgacacagcctctttcttttcttgaaaactgctattgaagtacacttgtctggaaaacttgacttcagtaagcttgaattaagaaacaaacaaactgttgaactccagtactcttctactgaagttgaagcttatcagcagaggctatcaaatctctccaagttatgccacaatcctgtttacatcgacgacgagttagttgagctttatctggagcttttatgtcagtatgagcgaaggtcagttctgaagtttctggagacttttgacagttacagattggaacggtgcttgcatctttgcctagattatggagttacagatgctgctgctttcttgcaagagagggttggtgatgttgggagtgcccttgaccttattctggctggacttgatgagaaaattagcttatttatctcttctgtggaaagtactttctctggcgtcgcatcaaaaagtatcgctgaaattaagcaaccagacatcgttctagaaatgagtgaggctcatccagtgcttgatgcattgcatgcctccattggattgtgccaaaggaattcacagcgcttggacccagaggaatctcagtccctttggttccaactccttgactcgaaattattcaatagcgcatctagaaagacaatgcgagcctattgctcttctcagagccattaaaaaaactgtatgggatcaaggatgtaaatggaaaaggtgtcaagtccaattggagtgaagcatcaatggaacatctgaaggaaaaaggactatctcaacaaatgaggatttcaactaaacaaaagtgcctaaatgttctgcgaaaagtattttcacaatgtgttggagaaataatagaggccatggctgggtatattcccctaccggcaatcatggcaaaactgttatctgataatgggaatcaagagttcggtgatttcaaacttgtgatacacagaatgttatctatgtatctttacgaaaaaagaatactggaaacggctaagtcagtaattgaggatgactcattttacaccttgagcttattaaagagaggagtttgtcatgggtttgccccacagactttcgtatgctgcatatgcaactgttcactttctaaagaaggtgctatttcagccgtacgtttgttcagttgcgggcatgcaacacatcttcagtgtgagtctgagcagaccaggtcatccaatcaggaatccaaagagggatgccctgtttgtctctcaatgagtgatacgcaagctcgaagcaaatcacctatgtttgagaatgggctaatgaagtattctggggctgaacatgaagtgtcacatggcatgtatcagattcatgaagttgatcatgctgagagatctcgtgggcttcaacagatgtcacggtatgaaatactgaataatcttcagaaagcgcagaagtcctttcatatagaaaccgtacctccattgaaacttgcaccgccagctatataccatgagaagatacagaagaggaccacttcggttggtgaaactagcaaacattctgttagaagtcagaaaccccagaaaatttggcaaatgaaggagaaaaaatcaaaagaggctgggagtcatcatccacaaaagtcaagttttctacgttaatagaagaaaagattgctgatttgttaagtatgaaaccagatccaaactgattgttaatttgcttcatgccatcaccacgatcgaatcttcaagactacaaatttgtcagcgtgatggagcctgcccatcagtacatagcttttttttttgtcttggggatgcatcctgttggtgagatcctcttcccctgcaccatggtcagaggttctgtggagccaaggtgctttgggctagggaggaaattgtaacagtaaattttcatacagttcatcgtgattagttttgtgtacagagcagagcatacacgtggtgacatggtccctgtagagggacacattcgcagtaaaggtgggatgcctcgattcatactcaacaatgtaaagtaaaggtgggatacctcaattcatgatcattgtaaaatacgtgcacagtataacacaggagcactggctgagtggcatgtatccttgcagttcatcgcgattaatctctgtacagagctgttatactgtcggttttgatatcagttgcaattacacatctgctacagttttgtagtatcagatatcagaacacgtcgggcccgcagaacgcctggaagctcgtagttgtcggcgccgagcatcctgtcgccattgggttgcgc

SEQ ID NO: 215437 - DNA, 1379 bp, Zea Mays
cgcgatctcgctcgtgatattccagccccgccgccgccatccccgcccccatccgtgacaccccaccatcaccgccgcgccacgcgcgacaactccatcccccatccgcacccctaccccgagcatcgcagtgcctcccgcacgaggtcgttgcgcttgtcgatctgatggcggcccatggcaaaggagcaggcggtgatggcagccacagcagaaagccgacgctcggcgtgattcccacccgtcgcgagccaagaggttcgaggtcatttttgagccaagaggttcgcggccacgggagcaaccctacagaaccatcaccaccaccgctctctcttcctctgctcttctctgcctgcctgagctcaccgcacctcgcctcctcaccgcggatcctccgttaatccggtagaaaatggccgatgccgaggatatgcagcccctcgtctgcgacaacagaactggcatggtcaaggctgggttcgctggcgatgacgccctgagggccgtcttccccagcatcgtggggcgcccgcgccacattggtgtcatggtcgagatggggcagaaggacgcctacgtcggtgacgaggttctgcaaaccgatcatgacaaaaccaaaggtagctttgaagccgcagactctgtctccacaacctgaagcccaagcacctcatgatcctcaaacaccagagcaacaacaaagcgggactggtgtaggcatgtagctggtgagccgggtagtgaaggaggtgtgtaccaggcctccagtgagcaaatgggcatggtgctggatgcatctgcggccggtggcaggaaggtcgagctggatggggacatgcgatggacatcacagaacagaagacgaaatgaatcgcaaggggaaactaacatgcgagagaggaggaggtagccacaaccaaagagcttggttcaatacttcaatggctagaataatgaacgatatgaagatcaggtagcattatatatgtcaataagaagcagaggagagaagcagcccgcatcgcaggagacaaggacttcacttgtttggccagttcaggacttcaggatgttgtcgatgatgtccatgctatattccctcgcttcatgcttaacaatgagggagagactaagtgaggggctgaaggccgttggtgctgtcagaatgtttttttggagttttggtggatgatgctcagtgactgcaatgcaaaggatccttctgttttgtatattgaatgagattacatcactgttttttcttagcgatatgttgagctcatgtgctcgtttatgttagtcgatctttggctcttgtagtaacttggaaagcttgctgctttttttaagggcatacatgcctgtgatgtgtggtc

SEQ ID NO: 215438 - DNA, 2313 bp, Zea Mays
atttcctgcgctactacttccggctggctggcatttaatgagcccacacaagtgtggtacccttcaagtgtggaccatgcaaaccctgtcgcattgaacactgagcagtctttccctttgattgtgaatagcttgggtacattgggagataatcaccagtatcacctcttagaaacaacagaagggttggcttgcaaattcaagaaagttccacaatcactcgcagcaccattgaaaagattagagaagagagacaatgtggttttgggatcaaataatttagggtcatcttgtttcacagctgaccttggaagctcggttcttggaaaaagtggagacaaatcgaatagaatgaaggatattggtgcaaacttgtcttccaaacacaatgatcatggcaatcaggcaaatcaacacactttagttggctcgaagaacatggaaggcaagtctgtaaaggctaaacatactgtggttgatgcacataaaaacacgtcttggacagtggactcactgataaacgtcaaggacaagtctgaagtatatggtgatagtaatagggatatcttaaatgatgtcacagtccagctggatcatagggctagcaatgagttgctgccgagaagcacggccaccaatataccacagctagccactctggaaaacgatgttgtggacacagtcatgccatattcacccaatggtggttgtgaggaatcattttcctgccctggcataaaaaacaccccaagtgttcgagaaagaagtgtagatcccattaatatttcaagtgattctcatgataccatagaagcatccgaaagcagtgaaagattcatggaatgccaaaaagctagcttgtgtcgtcgcaggaaaactgtgaagatggctatggtgtcctcatcatctgaggagtcaggagaagacactatctctgaaaacgtatctttggggtatgttttggcatgtagaagttctctatctaaagcacaaaagaagagagtaacgaagcttattcaggaaattcaacctgaattcacagtttttatatcaataatgcggatgagcaatgtgaaactcccaggtcctcttctgggaattaccaaggaatatgcaattgcacatttcccagataaaaccacaaatgtcactcttgagacgcctggcaagagcaagaagtggcatcccaaattctacaaaagagatgaaagtagaaagaacttgcttatgggacaatggctagactttgtccgtgacaatcatgtgcaggagggagatatctgcctctttttaccgacaaaagatgagataagacacacatttatggtctatattcttcatgaaacaacccattctagatgtggggctggctttcaaagggttggcccatgccttggtggtgcatccagtgcaaagatggcttcagaagttcatattgaggatgaaccaaccgctggagaacatgtttcgtcggacagtgatatgccagaaaattctcatgaacctctggagagcggagactcggatgatccatttgaacctccatactttgtaccatgcaggagtcctctatctaaatcccaaaagagaatggttgagcagcgagtgcgagctatccgatctgaagttcccatttgtgtggcagtaatgaagaacaataacgttggcattgctcagcgttggatgctagaattatgttcacgatatgcttcggtatatctcccaactaaagggcaaaacatattgctccagtgcaaggggaagacgtgggaagccaaaatgatgtttcataatggcagaaggtggtttcttaatggaggttggcccgattttgctcgtggcaatggcctgcgcgtcggtgacatgtgtctattcgaactgaagaagaaaaagagtacgcttaccatggcagtccatatcattcgcaaggagcagttttaggttgggctggcatgtagttaatccatggttgtggctgatctctggatggattagagaccaatctcaatctgtaacgtttgttggtaggctggtagctatctgctgacaacatgttttagcatgatgtatatataacatcctttattatgccgaaatgtcgccttgcttttacttatgtgtacatgtagcacagttttgtttgcttttcaaaatttgattgtacggcagtaggttgaacatgcagcttgagtttcagccgcactaggtcgcctctccacagaaaacagaaagtgaagatggagaatatgcaatgtgtttggaagcaaaactaatttaggtaaacaaatgtaatgaaattctcaaagcggtttg

SEQ ID NO: 215439 - DNA, 2993 bp, Zea Mays
tgtactagcattttaacgccgcagctcatcgtctctctctccccgcccgccgcctatattcctttgaccgaccgccgctgcgcccactcctgttcgttcgttaagccctctgaccggccgaaaccccggcggcctcctggaggttccggggttgagttcggtctgagctgctgctgccggcggaggcattcccttgtcgtttcttggagtgtcctggtggtggtgaccggtggatatgaacactgtgtgtgaagtttgtggggatattggttacagacaacttctgctttgttgcagagactgcaagcgttgtgctgtgcaccaatactgtttggacaaagttgtctacgaggcatcattaataaaatggttctgttatgaatgcctacaaaggcgtggtgaagttactcgcatcagttctctagagaagttgtcaagtgaaagaccactaagtcaggtccattctcgttctccagtacagcagctaattaccaagagtgtagagtcagtaagggatgcagggccttggagagatcggaaaaatgaatcaattgcgactaaatatccatctctcaacagaacatatccttcaattaagaagcacactaaaaagaagccgattgtgaaaccaatgggtaactgcacaaatagaaaagtgcgaatggctaaagttaccacccatacaagtgccgaagcgtcacgttcttgtgaaaccattgggacagaatcatctaagagcaaccatgggaagaaccagcaggtggaccatgcaaaccctgtcgcattgaacactgagcagtctttccctttgattgtgaatagcttgggtacattgggagataatcaccagtatcacctcttagaaacaacagaagggttggcttgcaaattcaagaaagttccacaatcactcgcagcaccattgaaaagattagagaagagagacaatgtggttttgggatcaaataatttagggtcatcttgtttcacagctgaccttggaagctcggttcttggaaaaagtggagacaaatcgaatagaatgaaggatattggtgcaaacttgtcttccaaacacaatgatcatggcaatcaggcaaatcaacacactttagttggctcgaagaacatggaaggcaagtctgtaaaggctaaacatactgtggttgatgcacataaaaacacgtcttggacagtggactcactgataaacgtcaaggacaagtctgaagtatatggtgatagtaatagggatatcttaaatgatgtcacagtccagctggatcatagggctagcaatgagttgctgccgagaagcacggccaccaatataccacagctagccactctggaaaacgatgttgtggacacagtcatgccatattcacccaatggtggttgtgaggaatcattttcctgccctggcataaaaaacaccccaagtgttcgagaaagaagtgtagatcccattaatatttcaagtgattctcatgataccatagaagcatccgaaagcagtgaaagattcatggaatgccaaaaagctagcttgtgtcgtcgcaggaaaactgtgaagatggctatggtgtcctcatcatctgaggagtcaggagaagacactatctctgaaaacgtatctttggggtatgttttggcatgtagaagttctctatctaaagcacaaaagaagagagtaacgaagcttattcaggaaattcaacctgaattcacagtttttatatcaataatgcggatgagcaatgtgaaactcccagggaattaccaaggaatatgcaattgcacatttcccagataaaaccacaaatgtcactcttgagacgcctggcaagagcaagaagtggcatcccaaattctacaaaagagatgaaagtagaaagaacttgcttatgggacaatggctagactttgtccgtgacaatcatgtgcaggagggagatatctgcctctttttaccgacaaaagatgagataagacacacatttatggtctatattcttcatgaaacaacccattctagatgtggggctggctttcaaagggttggcccatgccttggtggtgcatccagtgcaaagatggcttcagaagttcatattgaggatgaaccaaccgctggagaacatgtttcgtcggacagtgatatgccagaaaattctcatgaacctctggagagcggagactcggatgatccatttgaacctccatactttgtaccatgcaggagtcctctatctaaatcccaaaagagaatggttgagcagcgagtgcgagctatccgatctgaagttcccatttgtgtggcagtaatgaagaacaataacgttggcattgctcagcgttggatgctagaattatgttcacgatatgcttcggtatatctcccaactaaagggcaaaacatattgctccagtgcaaggggaagacgtgggaagccaaaatgatgtttcataatggcagaaggtggtttcttaatggaggttggcccgattttgctcgtggcaatggcctgcgcgtcggtgacatgtgtctattcgaactgaagaagaaaaagagtacgcttaccatggcagtccatatcattcgcaaggagcagttttaggttgggctggcatgtagttaatccatggttgtggctgatctctggatggattagagaccaatctcaatctgtaacgtttgttggtaggctggtagctatctgctgacaacatgttttagcatgatgtatatataacatcctttattatgccgaaatgtcgccttgcttttacttatgtgtacatgtagcacagttttgtttgcttttcaaaatttgattgtacggcagtaggttgaacatgcagcttgagtttcagccgcactaggtcgcctctccacagaaaacagaaagtgaagatggagaatatgcaatgtgtttggaagcaaaactaatttaggtaaacaaatgtaatgaaattctcaaagcggtttg

SEQ ID NO: 215440 - DNA, 3414 bp, Zea Mays
gttttgttacaattattaggcttgctctaataaagatttcaattttattgttcctcccagcatcacagctggaccattaatgtcagagagacagagacaagtatagtatcagtctctggagaaagacaaatgccacaaacacaatgtaggtctacagcctagcctaatggagaggagctgtttgacccgcgtgtcgcacagggctaactccaaagctcaggtcaacgagctgctgctggtctggaggacagcaactgatgcctttgccgtgccatggaaagaattgaaaaggtatcaaccatctgctggcctggaaaaagcttggagcaggaagagagaaatggtggcatggcaatatggcatgcattcccatgcgcagtgcacaacacaatgcctggactggattcaattcaacggccgaggcgctgcctccgcttccctccaaatgttgcgctcccgagctctcctcggcagcctcccacccccgagtcgccccgacaactcctcccagcctccaaccaccgagagcgtagaactcgtaatccaaggccagcgcgcgcacgccattgcctcgccccgtcccgctccggcgcccccccaccgccagcatgcacaggctcgccccgccccggtcgtgctgagacgacgtacctatactatacacatacacacggacacaccaaacgacgccaacgtggcgacgtcggcgaggaagatgagccagctccccgccccggccagccggctgtgggaagcgagcatccgcaagctccagaccatccgccgcgcgacgacagccacagggcccgcggccgacggcgccgatggcggggccgccctcacgcccagtctcctctccatcaattcctcctccgcgtccagcactatctaccagtaccaccacgaggacggcgaggacagcgacacgagcaccgatggcggcaacgattcggaagccggcgaggacgaggacgccggcgagcccacgcacgcggagcagctgctgcccagcggggacttctaccagggcgacctgcgcggggaccagccgcacggcgcgggcaagttcctctggaccgacggcagcatgtacgagggctcctggcgccgcggccgcgcgtccggccgcggcaagttctcatggacctcgggggccacctacgagggcgacttcgccggcgggtacatgcacggccagggcacctacatcggcgagttcggggacaccttcgcggggctctgggccaacaacctccgccacggccggggcacgcaggcgtacgccaacggcgacgtgtacgacggccactggcgcgacggcctgcaggacggccacgggcgctacatctggcgccacggccacgagtacatcggcacctggagggccggcgacatgcacggctgcgggaccgtgatctgggcggacggcgaccgctacgacggcgcctgggaggacaccaggcccaagggccagggcacgttccgctgggccgacggcgggatgtacatcggcacctggtgcgaggaggccggcgccgtgcacgccgacggcgtctactacccgccgtccggtggccccgcggtgcccgtgccccgcgagccctgcgaccccatcacggcgctgctccaggagctagaggtgtgcgagggcaagacggcgtcgctcatgccgtcgcagaaggtcctcacgtggcccggcgtggaggccgtgcagaagaagccggtgtggcgcccgcccaaggttagccttgaccaaggcaggaggtccagcgtgagcaggaggagcagcgcgtcgctggacctggacatgctgcagccggccgccgccgagggtggcgagaccgaggaggtgcgcgcggacaggtcgtgcctgcggacgtcgtcgtgcatgcgcacgccgccgaggccgggcaagaagcagggggagaccatctccaaggggcacaggaactacgagctcatgctcaacctgcagcttggcatcaggcacgctgttggtaggcagtcagcgccaaatacgctggatctcaagtcatcggcattcgatccaaaagagaagatatggacaaggtttcctcccgaaggatcaaagcatactcctcctcaccagtcctgcgatttccggtggaaagactactgccccctggttttcaggactctgcgcaagctcttcgacgtcgatccagcagactacatgatctccatttgcggggacgaggcgctccgggaactgtcgtctcctggtaagagcgggagcttcttctacctcacgaacgatgacaagtacatgatcaaaacgatgaagaaggcagaggttaaagtgctccttaggatgcttccagcctactacaaacacgtccgctttttcgaaaacactctgatcactaaattcttcggcctgcactgcgtcaacgtcaagcttacaggagctatccagaaaaaggtccggtttgttataatggggaaccttttctgctccagctacgcgatccacaggcgcttcgacctgaaagggtcctcgcatggtcgcatgactgacaaacccatcgatcagatcagcgagcacacaacgttgaaggatctcgatcttaatttcatcttccggctgccagggacctggtttgaggaattctgcaggcaagtggacaaagactgcgaattactggaggcggagaggatcatggattatagtcttttggtcggtattcacttcaaggacagatgcaaagacagcagcaatggtgacaatgggacgtcacagaatgctgaagattctgaagaaaacagaaaaggaccattgagactagggatctgcatgccctcgagggtggagaacgtagtgaagaaccctgagagtgaatctccgctcattggcgagcccacaggcgagttccaggacgtcatcctgttctttggaatcatcgacatcctgcaggactacgatatcagtaagaagctggagcacgcttacaaatccatgcagtacgaccccaactccatatcagctgttgacccgaagcaatactgcaagcggttcagggacttcatttttaaggctttcgccgacgatgtacagtaactagctaatttgacagaacagggagccgtttaactaaggcaattaacacttcttaatttggctggtgttcttttttcccacacaacaacagtgttccttttaggtaaaatcgttgatgcaatctgttgtagataaaaacacttcaatagtgcagcaatttcaccctttttttctttcttgtagcatttgtaaattttaaacattttttgtgtaattaaaactagaataacacttcagttttgatgttctatgattgaactggattgtttatatagtcttctaatacaacaatgctcagttttgtccttcatttggacactatgtggaatatcatc

SEQ ID NO: 215441 - DNA, 788 bp, Zea Mays
gtggacagcaagcaagtggacaaagactgcgaattactggaggcggagaggatcatggattatagtcttttggtcggtattcacttcaaggacagatgcaaagacagcagcaatggtgacaatgggacgtcacagaatgctgaagattctgaagaaaacagaaaaggaccattgagactagggatctgcatgccctcgagggtggagaacgtagtgaagaaccctgagagtgaatctccgctcattggcgagcccacaggcgagttccaggacgtcatcctgttctttggaatcatcgacatcctgcaggactacgatatcagtaagaagctggagcacgcttacaaatccatgcagtacgaccccaactccatatcagctgttgacccgaagcaatactgcaagcggttcagggacttcatttttaaggctttcgccgacgatgtacagtaactagctaatttgacagaacagggagccgtttaactaaggcaattaacacttcttaatttggctggtgttcttttttcccacacaacaacagtgttccttttaggtaaaatcgttgatgcaatctgttgtagataaaaacacttcaatagtgcagcaatttcaccctttttttctttcttgtagcatttgtaaattttaaacattttttgtgtaattaaaactagaataacacttcagttttgatgttctatgattgaactggattgtttatatagtcttctaatacaacaatgctcagttttgtccttcatttggacactatgtggaatatcatc

SEQ ID NO: 215442 - DNA, 2987 bp, Zea Mays
gtcccctcctcttgagtcttgacgaaagagagacagggaaagagggagaggcaagagtcgcagcctcgcagctctagacccagaccgcctccgcctccgccggtgatcgagtcgcgtcggcgctacattcaagctagaagacaataagcttcggcattcggaagccatgttcggctccaccaatccatttgggcagtcatccacaagcccatttggtaacaacaactcgtttggaactccccagggatttggccagtcttccactgctgccaacaatccctttgccccaaaaccatttggcagcccgaccacgccttttggggcacagactggaagctcgctctttgcaactacatctactggtgccttcggtcagcagcaatccgctcccgcatttggcacaacatccactggtgcctttggtcagcagcaatccactcccacgtttggcaccccatcctcctctcagttcgggagctctacaccagccttcggtgcatcccccactcctgcctttggtgccacatcctctgggtctttgttcggacagaagccaagttttgggggttttggatcatctcctagccagtcaagtccttttggtagcacgttccagcaaacacaaccaacatttggaacgacgccggcatttggtaccatgactactcctgcatttggtacaagtacaccagcctttggcaccacaactgcaccagccttcggtgccacgactaccccagcatttggttcaacatcaacatctttattcggtgcttctagcaccccagtgtttggttctacagcctttggcacatctgctactggttttggaacttcagggactacagcattcggtgtgagtagtactactacaggttttggatcttcaagcacaccttcatttggcacatcagctagcgtgttcggttttggttcttcaccatcttttggacaaacaacagtttcttctggcagcactccctttggaacaactccttcaccctttggtgcaccagttcctgcatttggctcgcagacagcagcaccagcttttggacaacctcagtttgctaatcaagctggaggaaccagaataaaaccttattctcaaacaccagatgttgacagtgctactagtggtactcagcctgctgcaaaacttgattccatatcggcaatgcctgaatacaaagacaagagtcatgaagaattgaggtgggaagactaccagcgtggagataagggtggaccaaacacttctggaactcaagcagtggcacctagctttccgtcactaatacaacagaatgctccaaacccattttcgacaagcaatccattttcaacaaacaatccatttgctcctaagcctgctccaactattacttcaccattcaacacctcatttaacaatgcatcagttacaagttcgagcccattcacatcatcccctagtaccacaatgtttgggcaaacagcatttgctcaaccgacatcaagtacaccggctttctcctctggcagcctatttggctcaactaatccgggcagtctgtttagcagcagcggtccttcacttttttcaacaccaacatttcaaccatcggcccctgctcaaacttcgaacttattctccttccaacctccaattcaaccagcttctacaggtggattccctggtttttccaatactacaaaccaagccttgatgggacagccaactcctaccctgtccagtatggtcatgcagcctgctcctgtttcaaatccatttgggatgcttccagcaatgcctcacatgtccattggaaatggtggatcttcaccttcagttcaatatggaatatcaagtttgccggttgtggagaagcttcttccaagtagatcattgtccatggcgtttcctaggcatttggcacagagaaggataaaactgctgccgagaaaatataatccaatatctgatggcaaggttccattctttgctgatgatgaagaatctccagcaacaccaaaggcagacgctttttttgtccctagagagaacccaaggaatctggtaattcgtccaattgagcagtggccttcgcggagagaaactgaccgacaattgactgtgaagaatgctactgatttgaacaaatatgaagatgcttccattgaaagtgagcgtggtaagtctgcctctgccatgtcaccaagcagcaggcctcctgcagtggaaaatgacaatcagcatgaggctagggccatggctcaacatgggaatgggaatgctacttcagtcgagaggttattgcctaagcttccacgtgcagattacttcacagagcctagtatagaggagcttgcggccaaagaacgtgcggaggcaggctactgcggtcgagtgagggactttgttgtggggcgacatggctacggcagcatcatttttcttggggagacggacgtgaggtgcctggatctggagtcaatagtggagtttaacaaccgggaggtggttgtttacaaggacgacagcaagaagccccctgtgggtgaggggctgaacaaggctgcggaggtgactctactgaacatcaagtgcgtaaataagaagactggggaggagtactgtgaggggacaagggtggagaggtacagggagatgctgatgaagaaggcggaggagcagggcgcggagtttgtgtcctttgatgctgccaagggagagtggaagttcagggtgaagcatttcagcgcctatgggctcccttgttgttaagtattctgtttgttttgatggagcagtgataactaagttgcacgctttacgctcttgtcaaatagtatcatgcttgattctgttgtgctgctttgtacaatgttgctgctgttaaaatgcttgcaaattgcactgctctgctgctgagaacgtattctaattataagacgttttagtttttctaaacacatgattttttccctaaacacatgaattttgc

SEQ ID NO: 215443 - DNA, 3494 bp, Zea Mays
gtcccctcctcttgagtcttgacgaaagagagacagggaaagagggagaggcaagagtcgcagcctcgcagctctagacccagaccgcctccgcctccgccggtgatcgagtcgcgtcggcgctacattcaagctagaagacaataagcttcggcattcggaagccatgttcggctccaccaatccatttgggcagtcatccacaagcccatttggtaacaacaactcgtttggaactccccagggatttggccagtcttccactgctgccaacaatccctttgccccaaaaccatttggcagcccgaccacgccttttggggcacagactggaagctcgctctttgcaactacatctactggtgccttcggtcagcagcaatccgctcccgcatttggcacaacatccactggtgcctttggtcagcagcaatccactcccacgtttggcaccccatcctcctctcagttcgggagctctacaccagccttcggtgcatcccccactcctgcctttggtgccacatcctctgggtctttgttcggacagaagccaagttttgggggttttggatcatctcctagccagtcaagtccttttggtagcacgttccagcaaacacaaccaacatttggaacgacgccggcatttggtaccatgactactcctgcatttggtacaagtacaccagcctttggcaccacaactgcaccagccttcggtgccacgactaccccagcatttggttcaacatcaacatctttattcggtgcttctagcaccccagtgtttggttctacagcctttggcacatctgctactggttttggaacttcagggactacagcattcggtgtgagtagtactactacaggttttggatcttcaagcacaccttcatttggcacatcagctagcgtgttcggttttggttcttcaccatcttttggacaaacaacagtttcttctggcagcactccctttggaacaactccttcaccctttggtgcaccagttcctgcatttggctcgcagacagcagcaccagcttttggacaacctcagtttgctaatcaagctggaggaaccagaataaaaccttattctcaaacaccagatgttgacagtgctactagtggtactcagcctgctgcaaaacttgattccatatcggcaatgcctgaatacaaagacaagagtcatgaagaattgaggtgggaagactaccagcgtggagataagggtggaccaaacacttctggaactcaagcagtggcacctagctttccgtcactaatacaacagaatgctccaaacccattttcgacaagcaatccattttcaacaaacaatccatttgctcctaagcctgctccaactattacttcaccattcaacacctcatttaacaatgcatcagttacaagttcgagcccattcacatcatcccctagtaccacaatgtttgggcaaacaggtgtttctacactttcagcaagtaattcgccatcattgtttggaaataccaatccagctcctgttacatcatcattatttgccacatcagtgacaaataatccaagtccattcggcactggctcattattcgctaacactcaatcagccccattatttccctcagcatttgctcaaccgacatcaagtacaccggctttctcctctggcagcctatttggctcaactaatccgggcagtctgtttagcagcagcggtccttcacttttttcaacaccaacatttcaaccatcggcccctgctcaaacttcgaacttattctccttccaacctccaattcaaccagcttctacaggtggattccctggtttttccaatactacaaaccaagccttgatgggacagccgtatgatcttctgctacttttcaaatgcacaccattattcctttcctatttagtaatttcttttgatgttttaaaacgctgatgagttataacaaggtgaaggaaaaacaatattatgatcagtctaatgtggagaatggtgtaggcaaagaagggaaaaaaccttgatggttcatggagactagcttatatttgatgccatgagactgctggattgttattttatatctgtagtctaagagcatggttttggcatagatcataattcagaaatgagtttttggcaatgattcctgtttttttttcttttaacatggtctatcctgctgcatttttacccagaactcctaccctgtccagtatggtcatgcagcctgctcctgtttcaaatccatttgggatgcttccagcaatgcctcacatgtccattggaaatggtggatcttcaccttcagttcaatatggaatatcaagtttgccggttgtggagaagcttcttccaagtagatcattgtccatggcgtttcctaggcatttggcacagagaaggataaaactgctgccgagaaaatataatccaatatctgatggcaaggttccattctttgctgatgatgaagaatctccagcaacaccaaaggcagacgctttttttgtccctagagagaacccaaggaatctggtaattcgtccaattgagcagtggccttcgcggagagaaactgaccgacaattgactgtgaagaatgctactgatttgaacaaatatgaagatgcttccattgaaagtgagcgtggtaagtctgcctctgccatgtcaccaagcagcaggcctcctgcagtggaaaatgacaatcagcatgaggctagggccatggctcaacatgggaatgggaatgctacttcagtcgagaggttattgcctaagcttccacgtgcagattacttcacagagcctagtatagaggagcttgcggccaaagaacgtgcggaggcaggctactgcggtcgagtgagggactttgttgtggggcgacatggctacggcagcatcatttttcttggggagacggacgtgaggtgcctggatctggagtcaatagtggagtttaacaaccgggaggtggttgtttacaaggacgacagcaagaagccccctgtgggtgaggggctgaacaaggctgcggaggtgactctactgaacatcaagtgcgtaaataagaagactggggaggagtactgtgaggggacaagggtggagaggtacagggagatgctgatgaagaaggcggaggagcagggcgcggagtttgtgtcctttgatgctgccaagggagagtggaagttcagggtgaagcatttcagcgcctatgggctcccttgttgttaagtattctgtttgttttgatggagcagtgataactaagttgcacgctttacgctcttgtcaaatagtatcatgcttgattctgttgtgctgctttgtacaatgttgctgctgttaaaatgcttgcaaattgcactgctctgctgctgagaacgtattctaattataagacgttttagtttttctaaacacatgattttttccctaaacacatgaattttgc

SEQ ID NO: 215444 - DNA, 3197 bp, Zea Mays
ccgctctagacgctgacacgccctcgtacgagatctgcgccccctgtgccccctccgctccatccacgaccgcgccccccaagcgagtcgccgccatttcgccgattcccggctgctgcctagggttttggtgccagcgcggtcggagggttgtgcctgtgggtcgcgttcccagtgtcgcgcgcggcggcagaaggtggagggagtgtcggttctccggagaggaggtggaggaggttgaggtggtgggtctccacggagcgagattatcagatgccgcggcggcctttgaggaggtagtggctgtgtggtcgtgtggagcgaacaactggcagcggcggcgggactggtggaggcagccctgttttttcagcaggctcgatgactcgcccatgttcaggaagcaggtgcaccttgtgttgttaggctatactgatacatacaaacatgtgtcgaactttggccggccctttgctgtgtttcttcttttgccaattctctatgaagatatgcaaggatgtggtgtctgcaatcacctctctctctttctttgtgctgaccataataagctactcccaggatggagtcactttgcgcaatttacaatagctctaattaataaagaccctaagaaatctaagtattcggaaagagcatgattgggggtggaaaaagtttatggagctgtcagaattacatcgatggctttattgcacaggatgttcttaccatcaaagccaaacttcaagtcattagggagaagatagaccgtccatttcgttgccttgatggccagtaccgaagggaactaattagggtgtatctatcaaatgtggaacaaatttatcggcgttttattgatgaaaaaagaaggacgttcagcaggctgattgaggataaactcgggtggtccagagacttgaactcgctatcaactttcagtagacctactaaggagcgatctccgtccaattatctgccaatgaatttatgcattgagggaggaagagcagcttgtgtattggtggagagaggatccttggttgaaagtgatgtttctccatatctttataaggttaaggaagagcagttggggttcctgtgaaacatggattgtatgaggtctataatttttttatgctctatcattacttgaatgaatcatgtatcactggcaagcaacttcagctcatactatgtaggaattctaattcacattgcattctatttaattgtttgttttatgttccgttcacacgaccatgatttttgtttgcacaaatcactatatatatcctcgttgaattaaaagtctagctttgtgtcataagcatattgtctatttccccttttggctattgcaaatagcaagtatggtttgttgtttaaatgttagtctattctgtttcaagaaaaaaaagaatgcgccatcgctggggatgggtatgatgatcaagatcgtcgaacgacgaagggcaccaaggtgttcgttggcgggctgccaatgtcggccacagaaagcatgctcctctctcatcttcgcaccatgcagtagctgctgcccatagcatgtaatgcaatggaataagttatcaaggcaactaacaccgaacatacgtcgaggcacggtatctgcccacgccgttgtcggggcctcccgcgggtacccatgctcgacctacttcattgaagatggcaagattgaatgaagggctgtcattatttgatgcaatactgattgttccaatgtttcaaattacttggaccttcttctctatttgtataggatttgtttactttcaagaatatcaagtatttgatacactcaggataattatgtttgtgttaggcatgacatttgtctttgttgggatctccttgctagcacccgatgatagtaaaggtgatacgaaagatggttcaagcaccgccgaggactccataattgacatagacatgttctattccacgaacttgtagaaagtttcaagatttgctctattgcattttgtgttcagtattgcattcagtgttttgatatataatctagacactgcagaaatggaaagatgctgatggaggagacagacacagatgatagcatctcttttgttacttctgtaaaagtaaatgcaaaacgtgtactttcaaaggcaaagtctgcatgctccatgtcccttggccttggggagagcaccataagcgcttcatcggtgcttgccatgcctatggtctcgtcaagaacaaccggcttcagaggaatcgaaaatgaccgtccaaattgctacctgtatggcgcctcttctgttgcgtccacttctagctggtgaatctgagatggatgaagtatttgatatggatggtgacgattctgcgcagcttcttgctgcagcaaacgcagcaaacagtgctcaaggaattgtcgcaactctcttggaggaatatgagggcatttttcatgatgaacacctcagatgttccttgtcacctgaatctcaaattgaagatagtggtattgaagcatcaactgttgatggtaatttggaagccaagggcaatggatttcatgatgtagatcaagaattggatgatgacaatggcgtggagcgtatacttagtgggaaattgagtgagagcagtggatatgctggcagtgacctctatgactacaagaatggcaatatcatgattgatgaaaagaccaacgtgctgaccatcattaaaatggccatcggtgtccctaaaaagcggaacgacaaatggatggctaatcagcttttgaagctacatctggagtaaaaagctttgaaggatgctcatcttcagtttatgcgctactatttgttgactgacatggacttgcaaaagcgcacttaatacttgtcagttttggatccatttgttgcattggtcgatgtcttcggcgaaacaatctcagttagggatatttccttctgatttgttagtgttcaacattataagaagtggtttattagttttgttcagatttttgtaattatttatgacatagtaaccttcatcaatcatacatgcatgtcatcgcttcgttcaactacacaacgtgcatctgttaagttctgtaagttttgaatgtgcacatcataaattgatcattgtcttatcttattgtgagcttgacagttttgaatgtgcagattaatgcacttttgtttcct

SEQ ID NO: 215445 - DNA, 2631 bp, Zea Mays
atcagatgccgcggcggcctttgaggaggtagtggctgtgtggtcgtgtggagcgaacaactggcagcggcggcgggactggtggaggcagccctgttttttcagcaggctcgatgactcgcccatgttcaggaagcaggtgcaccttgtgttgttaggctatactgatacatacaaacatgtgtcgaactttggccggccctttgctgtgtttcttcttttgccaattctctatgaagatatgcaaggatgtggtgtctgcaatcacctctctctctttctttgtgctgaccataataagctactcccaggatggagtcactttgcgcaatttacaatagctctaattaataaagaccctaagaaatctaagtattcggagcatgattgggggtggaaaaagtttatggagctgtcagaattacatcgatggctttattgcacaggatgttcttaccatcaaagccaaacttcaagtcattagggagaagatagaccgtccatttcgttgccttgatggccagtaccgaagggaactaattagggtgtatctatcaaatgtggaacaaatttatcggcgttttattgatgaaaaaagaaggacgttcagcaggctgattgaggataaactcgggtggtccagagacttgaactcgctatcaactttcagtagacctactaaggagcgatctccgtccaattatctgccaatgaatttatgcattgagggaggaagagcagcttgtgtattggtggagagaggatccttggttgaaagtgatgtttctccatatctttataaggttaaggaagagcagttggggttcctgtgaaacatggattgtatgaggtctataatttttttatgctctatcattacttgaatgaatcatgtatcactggcaagcaacttcagctcatactatgtaggaattctaattcacattgcattctatttaattgtttgttttatgttccgttcacacgaccatgatttttgtttgcacaaatcactatatatatcctcgttgaattaaaagtctagctttgtgtcataagcatattgtctatttccccttttggctattgcaaatagcaagtatggtttgttgtttaaatgttagtctattctgtttcaagaaaaaaaagaatgcgccatcgctggggatgggtatgatgatcaagtggcgggttcttgggctccttggcagcgtcgaggcacggtatctgcccacgccgttgtcggggcctcccgcgggtacccatgctcgacctacttcattgaagcaccagcttattgagacttctgtcttagatgtggtatggacaaatatacatgccactttctagatgaagtgaagagaccaaatgtggatgtcaatcaatctctagatgaaggaatgaaaggaaggagctaagttattgcactggatgtacagggtctagaaaagatggcaagattgaatgaagggctgtcattatttgatgcaatactgattgttccaatgtttcaaattacttggaccttcttctctatttgtataggatttgtttactttcaagaatatcaagtatttgatacactcaggataattatgtttgtgttaggcatgacatttgtctttgttgggatctccttgctagcacccgatgatagtaaaggttggtaaaacgttgattttcatgtgtttgcacatagaatattttgactcttggtgaactgtcggcaggtgatacgaaagatggttcaagcaccgccgaggactccataattgacatagacatgttctattccacgaacttgtagaaagtttcaagatttgctctattgcattttgtgttcagtattgcattcagtgttttgatatataatctagacactgcagaaatggaaagatgctgatggaggagacagacacagatgatagcatctcttttgttacttctgtaaaagtaaatgcaaaacgtgtactttcaaaggcaaaggtcatttttgtttcttcctagatctgattgtaccatataaatctgtcacaagtcttgcctctctcacctgatcttatttgtagtctgcatgctccatgtcccttggccttggggagagcaccataagcgcttcatcggtgcttgccatgcctatggtctcgtcaagaacaaccggcttcagaggaatcgaaaatgaccgtccaaattgctacctgtatggcgcctcttctgttgcgtccacttctagctggtgaatctgagatggatgaagtatttgatatggatggtgacgattctgcgcagcttcttgctgcagcaaacgcagcaaacagtgctcaaggaattgtcgcaactctcttggaggaatatgagggcatttttcatgatgaacacctcagatgttccttgtcacctgaatctcaaattgaagatagtggtattgaagcatcaactgttgatggtaatttggaagccaagggcaatggatttcatgatgtagatcaagaattggatgatgacaatggcgtggagcgtatacttagtgggaaattgagtgagagcagtggatatgctggcagtgacctctatgactacaagaatggcaatatcatgattgatgaaaagaccaacgtgctgaccatcatt

SEQ ID NO: 215446 - DNA, 2922 bp, Zea Mays
cgccctcgtacgagatctgcgccccctgtgccccctccgctccatccacgaccgcgccccccaagcgagtcgccgccatttcgccgattcccggctgctgcctagggttttggtgccagcgcggtcggagggttgtgcctgtgggtcgcgttcccagtgtcgcgcgcggcggcagaaggtggagggagtgtcggttctccggagaggaggtggaggaggttgaggtggtgggtctccacggagcgagattatcagatgccgcggcggcctttgaggaggtagtggctgtgtggtcgtgtggagcgaacaactggcagcggcggcgggactggtggaggcagccctgttttttcagcaggctcgatgactcgcccatgttcaggaagcaggtgcaccttgtgttgttaggctatactgatacatacaaacatgtgtcgaactttggccggccctttgctgtgtttcttcttttgccaattctctatgaagatatgcaaggatgtggtgtctgcaatcacctctctctctttctttgtgctgaccataataagctactcccaggatggagtcactttgcgcaatttacaatagctctaattaataaagaccctaagaaatctaagtattcggaaagagcatgattgggggtggaaaaagtttatggagctgtcagaattacatcgatggctttattgcacaggatgttcttaccatcaaagccaaacttcaagtcattagggagaagatagaccgtccatttcgttgccttgatggccagtaccgaagggaactaattagggtgtatctatcaaatgtggaacaaatttatcggcgttttattgatgaaaaaagaaggacgttcagcaggctgattgaggataaactcgggtggtccagagacttgaactcgctatcaactttcagtagacctactaaggagcgatctccgtccaattatctgccaatgaatttatgcattgagggaggaagagcagcttgtgtattggtggagagaggatccttggttgaaagtgatgtttctccatatctttataaggttaaggaagagcagttggggttcctgtgaaacatggattgtatgaggtctataatttttttatgctctatcattacttgaatgaatcatgtatcactggcaagcaacttcagctcatactatgtaggaattctaattcacattgcattctatttaattgtttgttttatgttccgttcacacgaccatgatttttgtttgcacaaatcactatatatatcctcgttgaattaaaagtctagctttgtgtcataagcatattgtctatttccccttttggctattgcaaatagcaagtatggtttgttgtttaaatgttagtctattctgtttcaagaaaaaaaagaatgcgccatcgctggggatgggtatgatgatcaagatcgtcgaacgacgaagggcaccaaggtgttcgttggcgggctgccaatgtcggccacagaaagcatgctcctctctcatcttcgcaccatgcagtagctgctgcccatagcatgtaatgcaatggaataagttatcaaggcaactaacaccgaacatacgtcgaggcacggtatctgcccacgccgttgtcggggcctcccgcgggtacccatgctcgacctacttcattgaagatgtggtatggacaaatatacatgccactttctagatgaagtgaagagaccaaatgtggatgtcaatcaatctctagatgaaggaatgaaaggaaggagctaagttattgcactggatgtacagggtctagaaaagatggcaagattgaatgaagggctgtcattatttgatgcaatactgattgttccaatgtttcaaattacttggaccttcttctctatttgtataggatttgtttactttcaagaatatcaagtatttgatacactcaggataattatgtttgtgttaggcatgacatttgtctttgttgggatctccttgctagcacccgatgatagtaaaggtgatacgaaagatggttcaagcaccgccgaggactccataattgacatagacatgttctattccacgaacttgtagaaagtttcaagatttgctctattgcattttgtgttcagtattgcattcagtgttttgatatataatctagacactgcagaaatggaaagatgctgatggaggagacagacacagatgatagcatctcttttgttacttctgtaaaagtaaatgcaaaacgtgtactttcaaaggcaaaggtcatttttgtttcttcctagatctgattgtaccatataaatctgtcacaagtcttgcctctctcacctgatcttatttgtagtctgcatgctccatgtcccttggccttggggagagcaccataagcgcttcatcggtgcttgccatgcctatggtctcgtcaagaacaaccggcttcagaggaatcgaaaatgaccgtccaaattgctacctgtatggcgcctcttctgttgcgtccacttctagctggtgaatctgagatggatgaagtatttgatatggatggtgacgattctgcgcagcttcttgctgcagcaaacgcagcaaacagtgctcaaggaattgtcgcaactctcttggaggaatatgagggcatttttcatgatgaacacctcagatgttccttgtcacctgaatctcaaattgaagatagtggtattgaagcatcaactgttgatggtaatttggaagccaagggcaatggatttcatgatgtagatcaagaattggatgatgacaatggcgtggagcgtatacttagtgggaaattgagtgagagcagtggatatgctggcagtgacctctatgactacaagaatggcaatatcatgattgatgaaaagaccaacgtgctgaccatcatt

SEQ ID NO: 215447 - DNA, 3026 bp, Zea Mays
cgccctcgtacgagatctgcgccccctgtgccccctccgctccatccacgaccgcgccccccaagcgagtcgccgccatttcgccgattcccggctgctgcctagggttttggtgccagcgcggtcggagggttgtgcctgtgggtcgcgttcccagtgtcgcgcgcggcggcagaaggtggagggagtgtcggttctccggagaggaggtggaggaggttgaggtggtgggtctccacggagcgagattatcagatgccgcggcggcctttgaggaggtagtggctgtgtggtcgtgtggagcgaacaactggcagcggcggcgggactggtggaggcagccctgttttttcagcaggctcgatgactcgcccatgttcaggaagcaggtgcaccttgtgttgttaggctatactgatacatacaaacatgtgtcgaactttggccggccctttgctgtgtttcttcttttgccaattctctatgaagatatgcaaggatgtggtgtctgcaatcacctctctctctttctttgtgctgaccataataagctactcccaggatggagtcactttgcgcaatttacaatagctctaattaataaagaccctaagaaatctaagtattcggaaagagcatgattgggggtggaaaaagtttatggagctgtcagaattacatcgatggctttattgcacaggatgttcttaccatcaaagccaaacttcaagtcattagggagaagatagaccgtccatttcgttgccttgatggccagtaccgaagggaactaattagggtgtatctatcaaatgtggaacaaatttatcggcgttttattgatgaaaaaagaaggacgttcagcaggctgattgaggataaactcgggtggtccagagacttgaactcgctatcaactttcagtagacctactaaggagcgatctccgtccaattatctgccaatgaatttatgcattgagggaggaagagcagcttgtgtattggtggagagaggatccttggttgaaagtgatgtttctccatatctttataaggttaaggaagagcagttggggttcctgtgaaacatggattgtatgaggtctataatttttttatgctctatcattacttgaatgaatcatgtatcactggcaagcaacttcagctcatactatgtaggaattctaattcacattgcattctatttaattgtttgttttatgttccgttcacacgaccatgatttttgtttgcacaaatcactatatatatcctcgttgaattaaaagtctagctttgtgtcataagcatattgtctatttccccttttggctattgcaaatagcaagtatggtttgttgtttaaatgttagtctattctgtttcaagaaaaaaaagaatgcgccatcgctggggatgggtatgatgatcaagatcgtcgaacgacgaagggcaccaaggtgttcgttggcgggctgccaatgtcggccacagaaagcatgctcctctctcatcttcgcaccatgcagtagctgctgcccatagcatgtaatgcaatggaataagttatcaaggcaactaacaccgaacatatggcgggttcttgggctccttggcagcgtcgaggcacggtatctgcccacgccgttgtcggggcctcccgcgggtacccatgctcgacctacttcattgaaggtaaaactttgactatttgggatctccatttcattattcagatatgctcaattctgaactagaacagatgcataataacttttagaaaccagaacaatttcaagacatttcatcattctacttttttctatagcaccagcttattgagacttctgtcttagatgtggtatggacaaatatacatgccactttctagatgaagtgaagagaccaaatgtggatgtcaatcaatctctagatgaaggaatgaaaggaaggagctaagttattgcactggatgtacagggtctagaaaagatggcaagattgaatgaagggctgtcattatttgatgcaatactgattgttccaatgtttcaaattacttggaccttcttctctatttgtataggatttgtttactttcaagaatatcaagtatttgatacactcaggataattatgtttgtgttaggcatgacatttgtctttgttgggatctccttgctagcacccgatgatagtaaaggtgatacgaaagatggttcaagcaccgccgaggactccataattgacatagacatgttctattccacgaacttgtagaaagtttcaagatttgctctattgcattttgtgttcagtattgcattcagtgttttgatatataatctagacactgcagaaatggaaagatgctgatggaggagacagacacagatgatagcatctcttttgttacttctgtaaaagtaaatgcaaaacgtgtactttcaaaggcaaagtctgcatgctccatgtcccttggccttggggagagcaccataagcgcttcatcggtgcttgccatgcctatggtctcgtcaagaacaaccggcttcagaggaatcgaaaatgaccgtccaaattgctacctgtatggcgcctcttctgttgcgtccacttctagctggtgaatctgagatggatgaagtatttgatatggatggtgacgattctgcgcagcttcttgctgcagcaaacgcagcaaacagtgctcaaggaattgtcgcaactctcttggaggaatatgagggcatttttcatgatgaacacctcagatgttccttgtcacctgaatctcaaattgaagatagtggtattgaagcatcaactgttgatggtaatttggaagccaagggcaatggatttcatgatgtagatcaagaattggatgatgacaatggcgtggagcgtatacttagtgggaaattgagtgagagcagtggatatgctggcagtgacctctatgactacaagaatggcaatatcatgattgatgaaaagaccaacgtgctgaccatcatt

SEQ ID NO: 215448 - DNA, 2334 bp, Zea Mays
ctagacgctgacacgccctcgtacgagatctgcgccccctgtgccccctccgctccatccacgaccgcgccccccaagcgagtcgccgccatttcgccgattcccggctgctgcctagggttttggtgccagcgcggtcggagggttgtgcctgtgggtcgcgttcccagtgtcgcgcgcggcggcagaaggtggagggagtgtcggttctccggagaggaggtggaggaggttgaggtggtgggtctccacggagcgagattatcagatgccgcggcggcctttgaggaggtagtggctgtgtggtcgtgtggagcgaacaactggcagcggcggcgggactggtggaggcagccctgttttttcagcaggctcgatgactcgcccatgttcaggaagcaggtgcaccttgtgttgttaggctatactgatacatacaaacatgtgtcgaactttggccggccctttgctgtgtttcttcttttgccaattctctatgaagatatgcaaggatgtggtgtctgcaatcacctctctctctttctttgtgctgaccataataagctactcccaggatggagtcactttgcgcaatttacaatagctctaattaataaagaccctaagaaatctaagtattcggaaagagcatgattgggggtggaaaaagtttatggagctgtcagaattacatcgatggctttattgcacaggatgttcttaccatcaaagccaaacttcaagtcattagggagaagatagaccgtccatttcgttgccttgatggccagtaccgaagggaactaattagggtgtatctatcaaatgtggaacaaatttatcggcgttttattgatgaaaaaagaaggacgttcagcaggctgattgaggataaactcgggtggtccagtttcagtggattttggcgagccatttttcatctttgattttatctgaacagagacttgaactcgctatcaactttcagtagacctactaaggagcgatctccgtccaattatctgccaatgaatttatgcattgagggaggaagagcagcttgtgtattggtggagagaggatccttggttgaaagtgatgtttctccatatctttataaggttaaggaagagcagttggggttcctgtgaaacatggattgtatgaggtctataatttttttatgctctatcattacttgaatgaatcatgtatcactggcaagcaacttcagctcatactatgtaggaattctaattcacattgcattctatttaattgtttgttttatgttccgttcacacgaccatgatttttgtttgcacaaatcactatatatatcctcgttgaattaaaagtctagctttgtgtcataagcatattgtctatttccccttttggctattgcaaatagcaagtatggtttgttgtttaaatgttagtctattctgtttcaagaaaaaaaagaatgcgccatcgctggggatgggtatgatgatcaagtggcgggttcttgggctccttggcagcgtcgaggcacggtatctgcccacgccgttgtcggggcctcccgcgggtacccatgctcgacctacttcattgaagatggcaagattgaatgaagggctgtcattatttgatgcaatactgattgttccaatgtttcaaattacttggaccttcttctctatttgtataggatttgtttactttcaagaatatcaagtatttgatacactcaggataattatgtttgtgttaggcatgacatttgtctttgttgggatctccttgctagcacccgatgatagtaaaggtgatacgaaagatggttcaagcaccgccgaggactccataattgacatagacatgttctattccacgaacttgtagaaagtttcaagatttgctctattgcattttgtgttcagtattgcattcagtgttttgatatataatctagacactgcagaaatggaaagatgctgatggaggagacagacacagatgatagcatctcttttgttacttctgtaaaagtaaatgcaaaacgtgtactttcaaaggcaaagtctgcatgctccatgtcccttggccttggggagagcaccataagcgcttcatcggtgcttgccatgcctatggtctcgtcaagaacaaccggcttcagaggaatcgaaaatgaccgtccaaagtatgtccctttaagaaccactgattggagtaacctatagctgatggtaatatataggtacacaggaaaggtctttgtttttttatgttgcctagcggatggcagtgaagttttttgttgcttccagaggcgcaactgtt

SEQ ID NO: 215449 - DNA, 2550 bp, Zea Mays
ccgctctagacgctgacacgccctcgtacgagatctgcgccccctgtgccccctccgctccatccacgaccgcgccccccaagcgagtcgccgccatttcgccgattcccggctgctgcctagggttttggtgccagcgcggtcggagggttgtgcctgtgggtcgcgttcccagtgtcgcgcgcggcggcagaaggtggagggagtgtcggttctccggagaggaggtggaggaggttgaggtggtgggtctccacggagcgagattatcagatgccgcggcggcctttgaggaggtagtggctgtgtggtcgtgtggagcgaacaactggcagcggcggcgggactggtggaggcagccctgttttttcagcaggctcgatgactcgcccatgttcaggaagcaggtgcaccttgtgttgttaggctatactgatacatacaaacatgtgtcgaactttggccggccctttgctgtgtttcttcttttgccaattctctatgaagatatgcaaggatgtggtgtctgcaatcacctctctctctttctttgtgctgaccataataagctactcccaggatggagtcactttgcgcaatttacaatagctctaattaataaagaccctaagaaatctaagtattcggatacactgcatcggttttggaagaaagagcatgattgggggtggaaaaagtttatggagctgtcagaattacatcgatggctttattgcacaggatgttcttaccatcaaagccaaacttcaagtcattagggagaagatagaccgtccatttcgttgccttgatggccagtaccgaagggaactaattagggtgtatctatcaaatgtggaacaaatttatcggcgttttattgatgaaaaaagaaggacgttcagcaggctgattgaggataaactcgggtggtccagagacttgaactcgctatcaactttcagtagacctactaaggagcgatctccgtccaattatctgccaatgaatttatgcattgagggaggaagagcagcttgtgtattggtggagagaggatccttggttgaaagtgatgtttctccatatctttataaggttaaggaagagcagttggggttcctgtgaaacatggattgtatgaggtctataatttttttatgctctatcattacttgaatgaatcatgtatcactggcaagcaacttcagctcatactatgtaggaattctaattcacattgcattctatttaattgtttgttttatgttccgttcacacgaccatgatttttgtttgcacaaatcactatatatatcctcgttgaattaaaagtctagctttgtgtcataagcatattgtctatttccccttttggctattgcaaatagcaagtatggtttgttgtttaaatgttagtctattctgtttcaagaaaaaaaagaatgcgccatcgctggggatgggtatgatgatcaagatcgtcgaacgacgaagggcaccaaggtgttcgttggcgggctgccaatgtcggccacagaaagcatgctcctctctcatcttcgcaccatgcagtagctgctgcccatagcatgtaatgcaatggaataagttatcaaggcaactaacaccgaacatagtaagaaaagaaaccaaacgtgaatatgtctcattttgtgttattggtctccctgggattctcgctcttattggtcacagtggcgggttcttgggctccttggcagcgtcgaggcacggtatctgcccacgccgttgtcggggcctcccgcgggtacccatgctcgacctacttcattgaagatggcaagattgaatgaagggctgtcattatttgatgcaatactgattgttccaatgtttcaaattacttggaccttcttctctatttgtataggatttgtttactttcaagaatatcaagtatttgatacactcaggataattatgtttgtgttaggcatgacatttgtctttgttgggatctccttgctagcacccgatgatagtaaaggtgatacgaaagatggttcaagcaccgccgaggactccataattgacatagacatgttctattccacgaacttgtagaaagtttcaagatttgctctattgcattttgtgttcagtattgcattcagtgttttgatatataatctagacactgcagaaatggaaagatgctgatggaggagacagacacagatgatagcatctcttttgttacttctgtaaaagtaaatgcaaaacgtgtactttcaaaggcaaagtctgcatgctccatgtcccttggccttggggagagcaccataagcgcttcatcggtgcttgccatgcctatggtctcgtcaagaacaaccggcttcagaggaatcgaaaatgaccgtccaaagtatgtccctttaagaaccactgattggagtaacctatagctgatggtaatatataggtacacaggaaaggtctttgtttttttatgttgcctagcggatggcagtgaagttttttgttgcttccagaggcgcaactgtt

SEQ ID NO: 215450 - DNA, 1067 bp, Zea Mays
gtttggttttgcctatgcttattactgcaccgccgtggtagtcctcttcatcccgagcgctgacgtgcatctgcgattggaagagtaggtcttcagaacccatcgccttcaaaatcctgcaccgagagaaggtgaataaggtttttgggaagcgtctacacgtgactgctcgcgctcttctccatagctactgtcgacgtcgtcgaccctctcgcttccacgctgtcaatcacatgaaatgtgtgattgaaagatacagcgaggcaagagaggaacaccgtcagactatgagcgcaagtgctgaggccaaggcagttgttgggtcagcagctttctggcctgaacgtgggagatttgcagaatttagagaataagctggagacgagcctaagaaatattcgtctgaaaaaggaccaacttattttttatcagattcaagaattaaacaggaagggaagcctcatgcaccaggaaagcatggaactatacaacaaagttaaccttcttcatcaacataacactgaattacggagaaaggtgtatggacaaggagtaaataatgagcaaacaagtactactgttagacacagtactcggaatacagagaatcttccgatcaatcttgagctaagtgtgcaaagggacaaatcagaaacaccaagtgtagggtgagatttttgtccaaacttcaggataactcagagtcagtaaaccagatgatttaataaagaacactgaaagtgccataagactttaaatacagtgaggataactaaaccgagtgataagaaatggatatcgttggttgaattgcaagacctaacagctaaactttaagctgctagatgcgattgtttatgtattaagaagaatgttgattttaattttgcttttcatataagcttgccatgtatgctattgtaaattgtactctgaattataagtcctcttggttttctaggtacatagttttttctatacacctagatatactatgtctcttgagctaaaaccgcttataatttagaatggagtaacttcaaaagatagttataagttaaatattg

SEQ ID NO: 215451 - DNA, 1205 bp, Zea Mays
gtgagcttatcgatccgtggatgcggtcctatataagacgctagacaaccatcaccagaaaccatccccaacacaagtttggttttgcctatgcttattactgcaccgccgtggtagtcctcttcatcccgagcgctgacgtgcatctgcgattggaagagtaggtcttcagaacccatcgccttcaaaatcctgcaccgagagaaggtgaataaggtttttgggaagcgtctacacgtgactgctcgcgctcttctccatagctactgtcgacgtcgtcgaccctctcgcttccacgctgtcaatcacatgaaatgtgtgattgaaagatacagcgaggcaagagaggaacaccgtcagactatgagcgcaagtgctgaggccaagctctggcaaagcgaggcagaaagcttgaggcagcaactgcataacttagaagagcaccatcggcagttgttgggtcagcagctttctggcctgaacgtgggagatttgcagaatttagagaataagctggagacgagcctaagaaatattcgtctgaaaaaggaccaacttattttttatcagattcaagaattaaacaggaagggaagcctcatgcaccaggaaagcatggaactatacaacaaagttaaccttcttcatcaacataacactgaattacggagaaaggtgtatggacaaggagtaaataatgagcaaacaagtactactgttagacacagtactcggaatacagagaatcttccgatcaatcttgagctaagtgtgcaaagggacaaatcagaaacaccaagtgtagggtgagatttttgtccaaacttcaggataactcagagtcagtaaaccagatgatttaataaagaacactgaaagtgccataagactttaaatacagtgaggataactaaaccgagtgataagaaatggatatcgttggttgaattgcaagacctaacagctaaactttaagctgctagatgcgattgtttatgtattaagaagaatgttgattttaattttgcttttcatataagcttgccatgtatgctattgtaaattgtactctgaattataagtcctcttggttttctaggtacatagttttttctatacacctagatatactatgtctcttgagctaaaaccgcttataatttagaatggagtaacttcaaaagatagttataagttaaatattg

SEQ ID NO: 215452 - DNA, 2920 bp, Zea Mays
catctctaccggggccgggcctacggactcggagtcacgaggcagcccacaatcagaatataacccaaccggctcctccctcgcttctcacctcaccccgtccggattgcggatctgacgcgcgagcacgaagcctcgacctagccaggcttcccttgccctactttgcgccgccgccgccgccgatccagccggcctctccccgcccgccggccgcgatgtacaacggcatcgggctgcagaccgcgcgggggtcgggcaccaacgggtacgtccagaccaacaagttcttcatcaagccccgctccacatccggcgggggcccgggcggaccccacaggccgccgctccccgacgccaccggcgcggatggcggcgggctcggcgggatgcgcaagcccaacaaggagatcctcgagcacgaccgcaagcgccaggtcgagctcaatctgctcgtgctcagggacgcgctcgaggagcagggctacaccgaagacgagatcgaggagcgcgtagaggaggcgcgcaaggctgctgaggcagaggcggccgcggtcgcggcagcggaggaagcagggagcgttagcggcgccggtcgaccgcctctacccggcagagggtttacagacacacagagccaccatgttgcagcacggaaggagaaacaacttgagactctaagggctgctttagggctgaacgtggaggatgcaaagaagggggatgtagaaagtgatgtagaatctggggagcttgttcctggtaagtactatgaggaactggttactgttggggaaaataatagtaaggattcaaagaatgcaaagaagagcaagaagaaaaaagagaatgacaaaaggcgtcaacccaaaagttcgagaaagagcaagtatgactcagacttggatcacgatcataacacaaaaacgaagaagagttctcaccatgattcagatgatgattcagagactgattatgatgagaaaaaggaaaagaaatacaacaagaaacatcgtcttggttctgatgatgattctgaaaatgatcgaaagaaggcaaagcgtggaaagaactctggttctgagtctgatacagatagtggccatggcaaaaagaaaactaaacatgtaaagagtgatcagggtgggagaaagaagatacaagtgaagaactctcatcacgattccgagtctgacacagatagtagctatggcaagaaaacagaacatgcaaggaatgataggggtgagagaaagaagataccggtaaataattctcgtcatgatttcaaatctgatatagatagtggatatggcaagaaaacagaagatgcaaagagtgaacactatgagagaaagaagttattggtgaagagctctcgtcatgattctgagtctgatacagacagtggttatggcaagaagaaaatggaacatataaagaatgaacgcgatgagagaaagaaggtaccggtgaagagttctcgttatgattctgagtctgatactgatagtggctatggcaagaagaaaatggagcaaacaaagaatgtacgtgatgagaaaaggaaggtaccattgaagagttctcatcatgattctgagtctgatgcagatattgactataggaagaagaaaatagaacatacagagggtattcgtgatgagagaaagaagataccagcgagaagctctcgccatgattctgactctggtgcagataataatgggaaaaacaagagaccattgcaaagctctcgtcatgatttggaggatgagaagcctagatcgagaaattataattatggctctcgggcttccgagcatgagaaacatatgttgaaaaaggatgtgcaagagaaaagaaaagtagctacctcaagtgatagttcagattacagcagcagcctcagcagtagtgattctgacacgagtgcagatagctatgaggaacagaaaaggagtcaagctggagggagaagaaatgagctgactacacaaaggcagaaagaggaggaaagaaaagagcttgaaaagcaacagaagagagaggtagagaagaaagagctggataagcaaaagcaaagggaggaagagaggatggagatggagaaggagaagaaaaggcagcgagagagggaggaagagagacagagggagagagagcaatacgaaaggaaaggtggaaatgatgtggagagggacaacaaaaggaaactgatagatgatcggtatgatccaaattcaagtagagatagagaagagggatacagagactctcagaacagagatgacaatagaaggcaggaagagcatggtcaacacaatagatatatggatagtcatgattccaagaggtcaaggcatgactcgcattaccattcaaggagggattttgaacaacgctattctagagacgaacatagagacagaaggcgtcactaaatcttggaagaatgccgctctaggtggacaacttattctcagctatcacccataagttccagtcccagatcttttctgcggcagcaagaccaacccatcagtacctccgctgcagcattaatatctgcttttgtttgtatcatactttggattttactatgcaaagagcgaagtctgcaatatgtaatatgttgtggaacagacatgaacggtaggattttttttgttggaatttgtggtgcgcatgttgctgatcataattatgataagttttcttaagcttatatttgatgagctccaggtttttcaaaatttggtgcgcatgttagggttcttttcatgtttcatgtgtactgctcaagcctttagataagccttgatgtttgcaggccactttagattagaaaaacagcaccaagtttaatacgtgctactctttcaagtggtaaccaagcataaaaaaacctgaaaaagag

SEQ ID NO: 215453 - DNA, 1466 bp, Zea Mays
gcctgctaccgcggatccggcctcaaacatcgccgcccctgcccccgcttcgttgtcttccctgacgaccctccccacacggccacaccgtctactgctgctgctgaccaccgtacacgcggggaagaatcagactgccaaacgattcactccactgaattaaaagacaaaggttgggccggtccactaacagtctaccactcataggcaggacaacggcatggcacatccgaggccgtggttttcctaagcccattcctcgctcaacagcagctgagcagattaggcatgcatgttcttcgatgccgctcgggttggggcgaattgcgtcatactgcactcaccgctctgggccttccaggtcctccctgccatgcatgtcgggcgcttgcgatgcaataacctcagcaaacaggctgattgggaagcacctgcgtgctggcagggtggatgctgtgcgggaggtgttcgacaaaatgccgcagcgggacatcgtgtcctggaactccctcatggctgtgtatgcccgttctggggtgcatgacagtgcagttactgcgttcctcaagatgagacgtgaggggttctgcgcagaccacacctccttctccactgtgctgtcggcctgcgcaaggatggagactctagctctagggaggtgcatccatgggcttgcgaccaagaccagatcttcgttgaacgtgtttgtggggtcctccttgatcacgatgtatgccaactgtggggtgtatagctgcctggagtggattgtggatgatgtcgacagtccaaacctggccttatggaatgctctcatatcaggtcttgtggtgaaccatagggtagaggatgctcgcagggtattcgatcagatgccagagcacaatgttgtgtcctggactgtgatgatcaaaggatattttactgtgcatgaggtggggcgggcattggagctgtttaaccttatgcctacaaagaattctgtgtcatggtgcgtcatgatcggaggccttgtcaaccacaagcgattcagagaagttaatgaactattcaacactttgatgagctgtagagaaatagtgacaaatgcaatcctcgttaagattgttaatgcctgtgctggtttgaaaagtattggaggaggcaggtgtgtccatgggtttgctgtgaagtctgggtttatccatgaccacatcatcgaggcatcattagttgtgatgtactgtaactccttagatattgatgaggcacagttagaattttgtaaaatggaaagaaagcatgttggctcatgcaagatcgatgaggctagaaagattttttattctatggatggcagagataagatctcgtggaatttgatggtcgatggctatgtaaagcatggaaaaattcatgacgctattgagttgtactcaaagatgcctgaaaagaatttggaagcttctactactttgatgtcttgt

SEQ ID NO: 215454 - DNA, 1616 bp, Zea Mays
cttacatgccgccgccgccgcctcccgattcctgacgtccgagcgcggcacggcggcagtcgcgggagccccaaactcgagcgcggcgacccaagcgctggcctctaccctttctccctcgactcgttttcccggctggcctgctaccgcggatccggcctcaagtcgggtgcaaaacatcgccgcccctgcccccgcttcgttgtcttccctgacgaccctccccacacggccacaccgtctactgctgctgctgaccaccgtacacgcggggaagaatcagactgccaaacgattcactccactgaattaaaagacaaaggttgggccggtccactaacagtctaccactcataggcaggacaacggcatggcacatccgaggccgtggttttcctaagcccattcctcgctcaacagcagctgagcagattaggcatgcatgttcttcgatgccgctcgggttggggcgaattgcgtcatactgcactcaccgctctgggccttccaggtcctccctgccatgcatgtcgggcgcttgcgatgcaataacctcagcaaacaggctgattgggaagcacctgcgtgctggcagggtggatgctgtgcgggaggtgttcgacaaaatgccgcagcgggacatcgtgtcctggaactccctcatggctgtgtatgcccgttctggggtgcatgacagtgcagttactgcgttcctcaagatgagacgtgaggggttctgcgcagaccacacctccttctccactgtgctgtcggcctgcgcaaggatggagactctagctctagggaggtgcatccatgggcttgcgaccaagaccagatcttcgttgaacgtgtttgtggggtcctccttgatcacgatgtatgccaactgtggggtgtatagctgcctggagtggattgtggatgatgtcgacagtccaaacctggccttatggaatgctctcatatcaggtcttgtggtgaaccatagggtagaggatgctcgcagggtattcgatcagatgccagagcacaatgttgtgtcctggactgtgatgatcaaaggatattttactgtgcatgaggtggggcgggcattggagctgtttaaccttatgcctacaaagaattctgtgtcatggtgcgtcatgatcggaggccttgtcaaccacaagcgattcagagaagttaatgaactattcaacactttgatgagctgtagagaaatagtgacaaatgcaatcctcgttaagattgttaatgcctgtgctggtttgaaaagtattggaggaggcaggtgtgtccatgggtttgctgtgaagtctgggtttatccatgaccacatcatcgaggcatcattagttgtgatgtactgtaactccttagatattgatgaggcacagttagaattttgtaaaatggaaagaaagcatgttggctcatgcaagatcgatgaggctagaaagattttttattctatggatggcagagataagatctcgtggaatttgatggtcgatggctatgtaaagcatggaaaaattcatgacgctattgagttgtactcaaagatgcctgaaaagaatttggaagcttctactactttgatgtcttgt

SEQ ID NO: 215455 - DNA, 2571 bp, Zea Mays
ctagcagagagagaacataaatccaaagatgggctggagaccacacgttgtctctgtgtcatcttctgcactactagtgctgcttcagctcctcgtgctactgatgctgcccgctgatgcgtcgtcatcaagccaaacgacgacgacgacgatctacgtcgtgtacatgggcgagaagaagcacgacgacccttccctcgtcgtggcgtcgcaccacgccacgctggcctccgttcttgggagcaaggatgaagcactcagctccatagtctacagctacaagcacggattctccggtttcgcggcgaagctcacccagccccaagcggaggagcttaaaaaataccctggagttgtgagcgtgaagccaaacacgtaccaccacgtccacacgactcggagctgggattttcttggcatgagctacggccaacagcagtcgtcgtcgtggtcgtcgtcgtcgcggctccttaggaaggccaagtacggcgaagatgtcatcgtcggcgtcatagactcaggcatctggccggaatcccggagcttcgacgacagcgggtacggctacggccccgtgccgaaacggtggaaaggcgtgtgccagacaggccaggcgttcaacgcgagcaactgcaaccggaaggtcatcggcgcgcggtggtacgccgccgacgtcagcgaggaggacctcaagaacgaatacaggtcgccacgggacgccaacggccacggcacgcacaccgcctccacgatcgccggctcgcccgtgcggaacgcgagccaccacggcggcggcctggccgccggcatagcgcgcggcggggcgccgcgcgcgcggctggcaatatacaaggcctgccacgctgtcggcggcagcgcgagctgcggcgacgcctcgatcctcgcggccctcgatgccgccattggggacggcgtcgacctagtgtccctgtcgctgggaggcttaggcgagatctaccagtcgttgcacgccgtggcggccgggatcaccgtggtgctcgctgcagggaacgatggccccgtggagcagtccctcaacaatgccctgccgtggggcatcacggtggccgccgccaccatggaccgcaccttcccgacagtggtcacgctgggcgacggagagaagctggtggggcaatcactgtattaccacaaccgctcagcggcggcatcgacgagcgacgacgacgacttcgcttggcgccatttgatattattccctagctgcgacgagaagaatctggggtcggaaaacatcaccgggaaaatcgtcatatgccgtgcgccggtgttctggtccgactatcctcctccgcggcagcttagcagggccagccgagccgccatcgccggcggggccaagggcatcatcttcgagcagtacagtaccaacagccttgacacccaggtcgtctgccaaggccacctgccatgcgtcgtggtggacagagaatccatattcacgatccaaagtagcgacagtaccttgccgactgtgtatcctctgccagcaatgtggccaagatttcgccggcggcgaccatggtcggatcccaggtcgcctcgccgagaatcgcgacgttctcgtcgaggggccccagtgctgagtttccctccgtactcaagcccgacatagcagcccctggagtgagcatcttggcagccatgcgtgactcgtacgtgctcctgtccgggacatccatggcatgccctcacgtctccgccgtcgtcgccttgctcaagtcggtccacccggactggtcgcctgccatgatcaagtctgccattgtcaccacagcatcggtgaccgaccgattcggcctgccgatccaagccaactcggtgcagaggaagccggccgacgccttcgacatgggcggcggcctcatagcgccggacagggccatggaccccggcctggtgtacgacatccagccggaggagtacacaagattggacgaccgcgccgaccgcctcaacctcccgtccatcgccgtgtccgacctcaagaactccgtcacggtctcgcgcaccgtcaccaacgtcgggccggcggaggtggcgacgtaccgggccgtggtcgaggcgccggccggcgtcacgatggacgtggagcctccggtgatcgccttcgagagaggcggcgccaggaacgccacgttcagggtgacgttcgtggcgaagcagcgggtgcagggcggctacgcgttcgggagcctgacgtggctggacgacgccaagcggcactcggtgaggatccccgtcgccgttcggaccgtcgtccgggacctcgtcgccgatgtagcttgatggtcgagttcggtttctgggcacgcacatacatgtgttccgcgttgtttacgtgctgtgtttgtctcgcggcgccgattcgatcgggttcttgtaataagaaagatggcgtggaaggaaaaaaatttggtgcagcactgctgcaaactagagtggtttgcagctcctcacaaaaaagaggatagaccccacccgcagcaacaataatacaactaaaacgttatctgctggacctacagg

SEQ ID NO: 215456 - DNA, 2903 bp, Zea Mays
agtaatttaattttttttctttataaaactaatccctgctacattttttatcccaacatggattgcataattaaaaaaacaaatcgcacacatcctagtcctacctcacgcgaggatgagcggacaccctgtcctccactggtttcgtctcacgttttgtttacttccgctgagtagtgagctatgcttcagcttgcagtgttcaagcaacaaggtctgtcgtgttatcacctaggcatgccaagggatcttggaatggacaaggaccggacctccggagccgaacttggaaacatcacgttgagcctgtgcatcaagacgtcggccttggatggtatctcgttcaggaggaactgctggacaatcggcttcttaaaccactccagtaccgagtcgccgggtgcccgcaagacgactttgctcacctcaaacggcgactccagcgacgccagcacctgtgccaccaccatcttcagtgtcggcccagtcaccagcttgatgcgccgtggcacaaccccgtagtagagcatccgcttcctgaaccgatgcagtgtgtgcacggtagccacgagagctgcgcccacggataagctcctgacatccagggaccaggcgatgtgctggtcaaaaacgattgccttggcgaacagcttattctcgtaggcgaccttccaaacacagcgggcacggttcatctgccccatgagcaccaggtagttgagcaggacgttcacaaagtacctggctgcactctcctcgttgtcgtagtcgatgccctggaagaactcgcgcacgaaagagagcacgggctgcttccgctgctccggaccagtgaacagcccgcacatgaagtcatgtgctttgtgcttgctggtgcccaggatgtccatgattgtacgctcgctgctctcgtcctggcaccggaccaagtgcgcgaggatggatgtgtagagaatcaagtccaccttggctgccccagcgacataagcctcaagcaacgaccgcgctgagtcatacagccccgtcttcatgcaagactcaaacagctgcctaatgatgaagttgttggtccttatgccagccgaacccatgaaccgtagccaccggagtgcaaggtcagttgacccatccttgatgtagatcatcagcaggtcacttgcggtcacctctatcgggaaacctgacgccttcatctccaacagcacctttgcagccaaatccagcagactcttattcgccagcattgtgagcaacgctgtaaacgtgctaagccctggccttgtccctgaattcgccatggagtgatacaaccgcattgctgcatccacctgccctgcggaggcatgcatttccaccagacaggcatatgtggccggcgtagggaaaaagccagacttctccatgtcaccgaacaacttggcggccatgtccaaccttccagaccgtgcattggcctcgaccaccatcgtgtacaagccaaagcttggtcggagccctcccctcctcatctcctcccaaagctccatcccagcatccagcttcccagatctcaccagtgcctccaccatggcggtgctcactgctgtgcttacccgatgcccgaccaccaccatctctctgtacattcccatggccgcatcaagcctccctgccttggccagcacgtccaccatcaccgaatacacgcccaccggcgcccgcccaattccctccctttgcttcatttcatcgaacatcttgcgggcggcgtcgatcctcccggcgcgcgccagcgcaggcaccgcgagctggtatgtgccctcgtcgagggcgcagcccgaggtcgccatttcgtcgagcacttcgaaggccttgaatgcaagccccctggtggaggtggacattcggcaacggcaagcgcgattcaacggtccagattgcaaaggatcctcccatcccatgaatgacagaatgagcgaggtagcccaaacagaaattttggcccattcgagacggcctactgttgtggtccagtgatccagtctgcgtctctttccccgtcgtggtgggttccgatccaatcgacgtcgacgactccgcagccaccgctcctctcctctcgtcgcttcttctatctctcggcgtcgaatctcatccggccagtgaccacactctactagccgcccggaaggagttcttccgggattcgagccgttgctgccctcacctctgcaggcccagcgtcgagcggagatccaatcggaaattgaactgacttcatcttttgtcgcatcccagtcaggagaagcaatgtcaggagtgatcacaaagttcgcggttacatccatggtgatgtggatggcccctgttgcgatcatgtatgggttttactaccaggtgtttccaggtgtgagtcagatgtcatcctcggcgcagacacttgccagtgggttcctggctgtcatatcagttaatctagtgatcggcttttacatattcatggcgatgaaggagactccacaccaagagccacagccagatcccaccttcctggagaaagccaaagcgagtatcaaccagccaacatcctctcgagtgagtgatgattccaaggggaagggaaaggtcgagtaagctgtagcatgttggcttaggtctcgtgtatgttaagtgcatgttatttaggaggaatagttatgccacaccatcacaaggaccgcaacctttcacaatttatgattttgctgtaaatcttgacagttatggctatggagcaatatgaagttgaaccttttgtacctatttgatttggaaactctgttcaatgttgttttagtcaggatactcatcagaactactgctggttgtattttggtcctttttggttttttggtactccctcctttcttttttatttgtcacgg

SEQ ID NO: 215457 - DNA, 2077 bp, Zea Mays
cacgcgcggtgttctgcctccagtcggtcgcgatagcgctctccatcctgccgccgccgcctaccatttctgccattcctgtctattcccatcgttgaaaccgctcgccctctccacgtgacatccaaacgcgaccgccccctccccacccccaccagccgcccgcctcctctgcgtcgcatccgccgcgagctcggggcgggacagcctccacggcggcggggtcacgctgaacagggagccgctgcagggccggcgcctgcacgccatctccgtgtatgtgagcgggatgctgaccgtgcgcgagacgctgctgttcgccgctgagttctgcctgccctgcgcgctttcctcagagcggaagcgcgcgcgcgtcgaccagctcggcctcttctacgctgccgacaccatcaacggctggcggcagcggcgttcctatcgcagccatgcgccgtcgacgtcgtctacggggaggtgtgggcaggacggctggcactgccggtggtgaacggggaagagctgtttgcacgcgggctgttgggtgtcgagctcgccccgatgacgttccgtcgttcgcagcaaagccagactggtgccctgtgttccttcgggcatcactacggcaatttgaggggctagaggacgccgccgacgtgctcgtcaactcattccacgagatcgaacccaaggaggcagattatatggccctaacatggcatgcaaagacaataggcccaacattgccatcattttatcttgatgatgactgtttgccgttgaacaagacttacggtttcaacctcttcaacagcagtgagtcatgtctggcttggctcgacaaacagcttccgtgttctgttgttcttgtatcctatggtactgtctctgattatgatgaagcacagttagaggagcttggcaatggattgtacaattctggcaaaccattcatttgggttgtgaggtcaaacgaagaacataagttgtccaatgaactccgtgacaagtgcaaggaacgtggccttattgtttcttagtgcccccagctggaagttctagcacataaagctacaggttgtttcttcacacattgcggatggaactcaacattggaagcaattgttaatggtgtgccaatggtggcaataccacactgggcagactagccgaccatatcaaaatatatggagagcatgtggggcttgggtgtccgggtgcgcaaggatgagaaaggcttggtgacgagggacaaggtggaaaggtgcatcaaggatgtcatggatggtgatagtaaggataagtataggaagagtgccactatgtggatgcaaaaggccaaggcagctatgcagaatggagggagttcggacaagaatattacagaattcatcgctaagtattctttaagttaattttcaaagatttcgtaaaaaagttaattttcaaaggcgtccacacgccgcgagctcggggcgggacagcctccacggtggcggggtcacgctgaacagggagccgctgcagggccggcacctgcacgccatctccgtgtatgtgagcaggatactgaccgtgcgcgagacgttgctgttcgctgccgagttccgcctgccctgcgcgctttcctcagagcggaagcgcgtgggcgtcgaccagctcggcctcttctacaccgccgacaccatcatcggcaacaggggccaccacggcacgtcctcggcagcggcgacctgtacgcggtgtgtgctggtgatgcaagtggcggcgtgggcgtgggcgtgggcggcctatacgaggtcgtgtacaacaacgtcgttagtctatgtgtcaaggccattgggtggaggcccgagcggaggttcaagtggaagctcctcgacggctcgacggggagaagaggagcgcccacttccctatggtcctggtccagatgcccatgtataacgagctggaggtgagaacaggccaccacaaaaaagtcgctaaaatcgtataggaatatgttaactattcatccatggattgttattcctcttgttactttgtgagatcaaatattattttgatgaggtgcgct

SEQ ID NO: 215458 - DNA, 3372 bp, Zea Mays
gtctttccttcttccatttccacaagacccttgcgtgctctctctctctcctcttggcgacgactgggtggcaggtgcccaggtcttcttgggacccttcgccggcgacaagcaccaccaggttcagtcatgagtgggcttctcatgagcttccctaagtgatgcttcatatgttttctaacatgtaacatctcccgatgttatccatgtactggatatatccttagaagtcagagatgcagaagtctgatcatcatgagcagaagctaacttcaccaagagggttaatccataagatacttcgtcgtacaaatagcaggcgttctcccactgcagctgaccaacaaccttctcctgtatctccagaaacaagcaactcatcaatattctcaaagcaaaaggatgttgatgatgccatcaaggattcagaaaagctgagcacacatactatcagaattgaagatgagaaatctgatttgctagggtctgaaatttattctggaaagcttacattagataacaaaacaaaaagttcatcaaatgaacagtctggatcaggatctagtagcaattgctttgatgctaggctcagcactgaagccctaatatggggttctaacatccttaagcttgaggatattgtatctgtatcatataattctggtctccggtatttcaccgtgcatgcttgtcctcttgaaaaaatatccagtggactatcctgctttatgaagcctagaagaacccaaacggacttgaagttcgtatcctcttctccgcacgaggcctttcggtgggttaatagttttgcggaccagcaatgttacgtaaacctgttgcctcaccccatggcatctagcaagaagcattcttctgaactcattcagtttgatgccatgtttgatccttatgttaaatgtcggtctccaccaaagatacttgtcatcttgaatcctcgatctggacatggtagatctagcaaagtttttcatggaaaagtggaacccatatttaaggtttcaagatggaagtggtaaaaactacacatgctgggcatgcaaaatctcttgtatcaactattgattttagtacctgtcctgatggtattgtatgtgtgggtggtgatggaattgtaaatgaggtcctcaatggtcttctatgcagagatgatcaaaatatgtctgcctctgtaccaataggtataatacctgctgggtctgataactcacttatttggacagtcttgggtgtcaaggatccaatttctgcagcattgtcaattgtcaggggaggtcttacacctattgatgttttttctgttgaatggattcaaagtgggactatgcattatggtacaaccgtatcatattttggttttgttagcgatgttcttgagctctcagagaagtatcagaagcattttggtcctttacgatactttgtagctggttttctcaaattcctgtgtttgccaaagtacagttttgaattggaatatcttccagtatcagatgttaatggcgccgagcataaaattttggtaggacaagaaaaggttgacgcgtctgatctatatgatgatgtaattcggagatcaagagcagaatgtttaccacgcgcctcaagtttatctagcattgattcaataatgtctacaggcatcatgtctggggcagagctggaggtttgtagtcctcgtgcaaataatgaaccttctgaggttgttcgtggacttgatccgaaatcaaagcgcttatcgttaggaagagctagtacatttaaagaaccagaagaagtgctccatccccactcccatggtacatctactcccagctggcgtagatctaagtcaaaatcaaggactgaaaaggcaaagccaggcttgtctgctacacacgatgcaaaatcttctaaggttaatgcagacaaagaggacacatcatccacaatttctgatcctggacctgtggctgtatgggattcaggaccaaagtgggacgatgaacctaaatgggataatcaacctaactgggaacccgagacttcaattgagctccatagccctcgcgaggatattgagcttggtctgactaaggagctggtacctagtttagatgaaaggtggacagttaggaaaggacgctatcttggtgtactggtgtgcaaccattcatgcaagactgtgcagagtctgagctctcaggttgttgctcccaaggctgaatatgatgacaattgtttggacctgctgttagttggtggaagtggaagactgagattactgaggtttttggtgcttttgcagtttggaaagcacatatctcttccaaatgtagaatatgtaaaggtgaaatctgtgaggctcaaagcaggcccaaatacacacgacggatgtggtatcgatggcgaactactccatgtcaaggggcaagttcgctgtagtttgttgcctcaacaatgtcaattgatgggcaggccagtgaaaaaccctgtacagtagctgtaaatacactatgcggactgtctgcagctctgaggtcagcccagaatcttgcacctgtggtgtgtacaagcggcgaaccatggattttcgtctgcatccacatgtcagtaattatattcagaagtgagaacatgaacatcctagctggcactcagctccagagatgtacatttgtggttgacgagcagaaggtgctgagtgggtgctgtttcatccatatgtaaagccaaagcctatctcggacagcagcttgttgcgcacctcttgcttttgcctttttctcgtccgatagaatgcatctactatacagccatcctgatgagtgtacttggttgctccagaacatagtgtccacctccaccagccgggtgtctttggaggttccctgatgccggccacttgatactcattgtagggacaacaccccagtgcccgtgtccttgatcagtctgttgtgtttgcgaagtgtgaataagatataggactgtttgattcccggtacagcgcagggtttcagcagaaagggctggatggatgatgttttgtggcgatgctgcctcgttgagtctttaaaacgggtgtaactcttcttcttttgtgagtcgtgatgatgtatgaaccgtgtactgatttgtaaaccttgcctggcaggcatacaactgtttctgaggtgtggtattctctgccggggaataagcagcgtagcttctcctttcgtacgctgccagcaaagcagcgctcgtgctagtatgaacaacttacaccaggcaaattttgtgatgggttttgtgagaaagattgctggcgcgagtaacgtgcgccgatttggctctctcaagcagggaaggaaacacacggctgttcaaggc

SEQ ID NO: 215459 - DNA, 3177 bp, Zea Mays
ccctgtctttccttcttccatttccacaagacccttgcgtgctctctctctctcctcttggcgacgactgggtggcaggtgcccaggtcttcttgggacccttcgccggcgacaagcaccaccagaagtcagagatgcagaagtctgatcatcatgagcagaagctaacttcaccaagagggttaatccataagatacttcgtcgtacaaatagcaggcgttctcccactgcagctgaccaacaaccttctcctgtatctccagaaacaagcaactcatcaatattctcaaagcaaaaggatgttgatgatgccatcaaggattcagaaaagctgagcacacatactatcagaattgaagatgagaaatctgatttgctagggtctgaaatttattctggaaagcttacattagataacaaaacaaaaagttcatcaaatgaacagtctggatcaggatctagtagcaattgctttgatgctaggctcagcactgaagccctaatatggggttctaacatccttaagcttgaggatattgtatctgtatcatataattctggtctccggtatttcaccgtgcatgcttgtcctcttgaaaaaatatccagtggactatcctgctttatgaagcctagaagaacccaaacggacttgaagttcgtatcctcttctccgcacgaggcctttcggtgggttaatagttttgcggaccagcaatgttacgtaaacctgttgcctcaccccatggcatctagcaagaagcattcttctgaactcattcagtttgatgccatgtttgatccttatgttaaatgtcggtctccaccaaagatacttgtcatcttgaatcctcgatctggacatggtagatctagcaaagtttttcatggaaaagtggaacccatatttaagcttgcaggtttcaagatggaagtggtaaaaactacacatgctgggcatgcaaaatctcttgtatcaactattgattttagtacctgtcctgatggtattgtatgtgtgggtggtgatggaattgtaaatgaggtcctcaatggtcttctatgcagagatgatcaaaatatgtctgcctctgtaccaataggtataatacctgctgggtctgataactcacttatttggacagtcttgggtgtcaaggatccaatttctgcagcattgtcaattgtcaggttcttgagctctcagagaagtatcagaagcattttggtcctttacgatactttgtagctggttttctcaaattcctgtgtttgccaaagtacagttttgaattggaatatcttccagtatcagatgttaatggcgccgagcataaaattttggtaggacaagaaaaggttgacgcgtctgatctatatgatgatgtaattcggagatcaagagcagaatgtttaccacgcgcctcaagtttatctagcattgattcaataatgtctacaggcatcatgtctggggcagagctggaggtttgtagtcctcgtgcaaataatgaaccttctgaggttgttcgtggacttgatccgaaatcaaagcgcttatcgttaggaagagctagtacatttaaagaaccagaagaagtgctccatccccactcccatggtacatctactcccagctggcgtagatctaagtcaaaatcaaggactgaaaaggcaaagccaggcttgtctgctacacacgatgcaaaatcttctaaggttaatgcagacaaagaggacacatcatccacaatttctgatcctggacctgtggctgtatgggattcaggaccaaagtgggacgatgaacctaaatgggataatcaacctaactgggaacccgagacttcaattgagctccatagccctcgcgaggatattgagcttggtctgactaaggagctggtacctagtttagatgaaaggtggacagttaggaaaggacgctatcttggtgtactggtgtgcaaccattcatgcaagactgtgcagagtctgagctctcaggttgttgctcccaaggctgaatatgatgacaattgtttggacctgctgttagttggtggaagtggaagactgagattactgaggtttttggtgcttttgcagtttggaaagcacatatctcttccaaatgtagaatatgtaaaggtgaaatctgtgaggctcaaagcaggcccaaatacacacgacggatgtggtatcgatggcgaactactccatgtcaaggggcaagttcgctgtagtttgttgcctcaacaatgtcaattgatgggcaggccagtgaaaaaccctgtacagtagctgtaaatacactatgcggactgtctgcagctctgaggtcagcccagaatcttgcacctgtggtgtgtacaagcggcgaaccatggattttcgtctgcatccacatgtcagtaattatattcagaagtgagaacatgaacatcctagctggcactcagctccagagatgtacatttgtggttgacgagcagaaggtgctgagtgggtgctgtttcatccatatgtaaagccaaagcctatctcggacagcagcttgttgcgcacctcttgcttttgcctttttctcgtccgatagaatgcatctactatacagccatcctgatgagtgtacttggttgctccagaacatagtgtccacctccaccagccgggtgtctttggaggttccctgatgccggccacttgatactcattgtagggacaacaccccagtgcccgtgtccttgatcagtctgttgtgtttgcgaagtgtgaataagatataggactgtttgattcccggtacagcgcagggtttcagcagaaagggctggatggatgatgttttgtggcgatgctgcctcgttgagtctttaaaacgggtgtaactcttcttcttttgtgagtcgtgatgatgtatgaaccgtgtactgatttgtaaaccttgcctggcaggcatacaactgtttctgaggtgtggtattctctgccggggaataagcagcgtagcttctcctttcgtacgctgccagcaaagcagcgctcgtgctagtatgaacaacttacaccaggcaaattttgtgatgggttttgtgagaaagattgctggcgcgagtaacgtgcgccgatttggctctctcaagcagggaaggaaacacacggctgttcaaggc

SEQ ID NO: 215460 - DNA, 3298 bp, Zea Mays
gcaaccctgtctttccttcttccatttccacaagacccttgcgtgctctctctctctcctcttggcgacgactgggtggcaggtgcccaggtcttcttgggacccttcgccggcgacaagcaccaccaggttcagtcatgagtgggcttctcatgagcttccctaagtgatgcttcatatgttttctaacatgtaacatctcccgatgttatccatgtactggatatatccttagaagtcagagatgcagaagtctgatcatcatgagcagaagctaacttcaccaagagggttaatccataagatacttcgtcgtacaaatagcaggcgttctcccactgcagctgaccaacaaccttctcctgtatctccagaaacaagcaactcatcaatattctcaaagcaaaaggatgttgatgatgccatcaaggattcagaaaagctgagcacacatactatcagaattgaagatgagaaatctgatttgctagggtctgaaatttattctggaaagcttacattagataacaaaacaaaaagttcatcaaatgaacagtctggatcaggatctagtagcaattgctttgatgctaggctcagcactgaagccctaatatggggttctaacatccttaagcttgaggatattgtatctgtatcatataattctggtctccggtatttcaccgtgcatgcttgtcctcttgaaaaaatatccagtggactatcctgctttatgaagcctagaagaacccaaacggacttgaagttcgtatcctcttctccgcacgaggcctttcggtgggttaatagttttgcggaccagcaatgttacgtaaacctgttgcctcaccccatggcatctagcaagaagcattcttctgaactcattcagtttgatgccatgtttgatccttatgttaaatgtcggtctccaccaaagatacttgtcatcttgaatcctcgatctggacatggtagatctagcaaagtttttcatggaaaagtggaacccatatttaagcttgcaggtttcaagatggaagtggtaaaaactacacatgctgggcatgcaaaatctcttgtatcaactattgattttagtacctgtcctgatggtattgtatgtgtgggtggtgatggaattgtaaatgaggtcctcaatggtcttctatgcagagatgatcaaaatatgtctgcctctgtaccaatagggaggtcttacacctattgatgttttttctgttgaatggattcaaagtgggactatgcattatggtacaaccgtatcatattttggttttgttagcgatgttcttgagctctcagagaagtatcagaagcattttggtcctttacgatactttgtagctggttttctcaaattcctgtgtttgccaaagtacagttttgaattggaatatcttccagtatcagatgttaatggcgccgagcataaaattttggtaggacaagaaaaggttgacgcgtctgatctatatgatgatgtaattcggagatcaagagcagaatgtttaccacgcgcctcaagtttatctagcattgattcaataatgtctacaggcatcatgtctggggcagagctggaggtttgtagtcctcgtgcaaataatgaaccttctgaggttgttcgtggacttgatccgaaatcaaagcgcttatcgttaggaagagctagtacatttaaagaaccagaagaagtgctccatccccactcccatggtacatctactcccagctggcgtagatctaagtcaaaatcaaggactgaaaaggcaaagccaggcttgtctgctacacacgatgcaaaatcttctaaggttaatgcagacaaagaggacacatcatccacaatttctgatcctggacctgtggctgtatgggattcaggaccaaagtgggacgatgaacctaaatgggataatcaacctaactgggaacccgagacttcaattgagctccatagccctcgcgaggatattgagcttggtctgactaaggagctggtacctagtttagatgaaaggtggacagttaggaaaggacgctatcttggtgtactggtgtgcaaccattcatgcaagactgtgcagagtctgagctctcaggttgttgctcccaaggctgaatatgatgacaattgtttggacctgctgttagttggtggaagtggaagactgagattactgaggtttttggtgcttttgcagtttggaaagcacatatctcttccaaatgtagaatatgtaaaggtgaaatctgtgaggctcaaagcaggcccaaatacacacgacggatgtggtatcgatggcgaactactccatgtcaaggggcaagttcgctgtagtttgttgcctcaacaatgtcaattgatgggcaggccagtgaaaaaccctgtacagtagctgtaaatacactatgcggactgtctgcagctctgaggtcagcccagaatcttgcacctgtggtgtgtacaagcggcgaaccatggattttcgtctgcatccacatgtcagtaattatattcagaagtgagaacatgaacatcctagctggcactcagctccagagatgtacatttgtggttgacgagcagaaggtgctgagtgggtgctgtttcatccatatgtaaagccaaagcctatctcggacagcagcttgttgcgcacctcttgcttttgcctttttctcgtccgatagaatgcatctactatacagccatcctgatgagtgtacttggttgctccagaacatagtgtccacctccaccagccgggtgtctttggaggttccctgatgccggccacttgatactcattgtagggacaacaccccagtgcccgtgtccttgatcagtctgttgtgtttgcgaagtgtgaataagatataggactgtttgattcccggtacagcgcagggtttcagcagaaagggctggatggatgatgttttgtggcgatgctgcctcgttgagtctttaaaacgggtgtaactcttcttcttttgtgagtcgtgatgatgtatgaaccgtgtactgatttgtaaaccttgcctggcaggcatacaactgtttctgaggtgtggtattctctgccggggaataagcagcgtagcttctcctttcgtacgctgccagcaaagcagcgctcgtgctagtatgaacaacttacaccaggcaaattttgtgatgggttttgtgagaaagattgctggcgcgagtaacgtgcgccgatttggctctctcaagcagggaaggaaacacacggctgttcaaggc

SEQ ID NO: 215461 - DNA, 3184 bp, Zea Mays
cacgggcctgcctaaacgctgcaaccctgtctttccttcttccatttccacaagacccttgcgtgctctctctctctcctcttggcgacgactgggtggcaggtgcccaggtcttcttgggacccttcgccggcgacaagcaccaccaggttcagtcatgagtgggcttctcatgagcttccctaagtgatgcttcatatgttttctaacatgtaacatctcccgatgttatccatgtactggatatatccttagaagtcagagatgcagaagtctgatcatcatgagcagaagctaacttcaccaagagggttaatccataagatacttcgtcgtacaaatagcaggcgttctcccactgcagctgaccaacaaccttctcctgtatctccagaaacaagcaactcatcaatattctcaaagcaaaaggatgttgatgatgccatcaaggattcagaaaagctgagcacacatactatcagaattgaagatgagaaatctgatttgctagggtctgaaatttattctggaaagcttacattagataacaaaacaaaaagttcatcaaatgaacagtctggatcaggatctagtagcaattgctttgatgctaggctcagcactgaagccctaatatggggttctaacatccttaagcttgaggatattgtatctgtatcatataattctggtctccggtatttcaccgtgcatgcttgtcctcttgaaaaaatatccagtggactatcctgctttatgaagcctagaagaacccaaacggacttgaagttcgtatcctcttctccgcacgaggcctttcgcttgcaggtttcaagatggaagtggtaaaaactacacatgctgggcatgcaaaatctcttgtatcaactattgattttagtacctgtcctgatggtattgtatgtgtgggtggtgatggaattgtaaatgaggtcctcaatggtcttctatgcagagatgatcaaaatatgtctgcctctgtaccaataggtataatacctgctgggtctgataactcacttatttggacagtcttgggtgtcaaggatccaatttctgcagcattgtcaattgtcaggggaggtcttacacctattgatgttttttctgttgaatggattcaaagtgggactatgcattatggtacaaccgtatcatattttggttttgttagcgatgttcttgagctctcagagaagtatcagaagcattttggtcctttacgatactttgtagctggttttctcaaattcctgtgtttgccaaagtacagttttgaattggaatatcttccagtatcagatgttaatggcgccgagcataaaattttggtaggacaagaaaaggttgacgcgtctgatctatatgatgatgtaattcggagatcaagagcagaatgtttaccacgcgcctcaagtttatctagcattgattcaataatgtctacaggcatcatgtctggggcagagctggaggtttgtagtcctcgtgcaaataatgaaccttctgaggttgttcgtggacttgatccgaaatcaaagcgcttatcgttaggaagagctagtacatttaaagaaccagaagaagtgctccatccccactcccatggtacatctactcccagctggcgtagatctaagtcaaaatcaaggactgaaaaggcaaagccaggcttgtctgctacacacgatgcaaaatcttctaaggttaatgcagacaaagaggacacatcatccacaatttctgatcctggacctgtggctgtatgggattcaggaccaaagtgggacgatgaacctaaatgggataatcaacctaactgggaacccgagacttcaattgagctccatagccctcgcgaggatattgagcttggtctgactaaggagctggtacctagtttagatgaaaggtggacagttaggaaaggacgctatcttggtgtactggtgtgcaaccattcatgcaagactgtgcagagtctgagctctcaggttgttgctcccaaggctgaatatgatgacaattgtttggacctgctgttagttggtggaagtggaagactgagattactgaggtttttggtgcttttgcagtttggaaagcacatatctcttccaaatgtagaatatgtaaaggtgaaatctgtgaggctcaaagcaggcccaaatacacacgacggatgtggtatcgatggcgaactactccatgtcaaggggcaagttcgctgtagtttgttgcctcaacaatgtcaattgatgggcaggccagtgaaaaaccctgtacagtagctgtaaatacactatgcggactgtctgcagctctgaggtcagcccagaatcttgcacctgtggtgtgtacaagcggcgaaccatggattttcgtctgcatccacatgtcagtaattatattcagaagtgagaacatgaacatcctagctggcactcagctccagagatgtacatttgtggttgacgagcagaaggtgctgagtgggtgctgtttcatccatatgtaaagccaaagcctatctcggacagcagcttgttgcgcacctcttgcttttgcctttttctcgtccgatagaatgcatctactatacagccatcctgatgagtgtacttggttgctccagaacatagtgtccacctccaccagccgggtgtctttggaggttccctgatgccggccacttgatactcattgtagggacaacaccccagtgcccgtgtccttgatcagtctgttgtgtttgcgaagtgtgaataagatataggactgtttgattcccggtacagcgcagggtttcagcagaaagggctggatggatgatgttttgtggcgatgctgcctcgttgagtctttaaaacgggtgtaactcttcttcttttgtgagtcgtgatgatgtatgaaccgtgtactgatttgtaaaccttgcctggcaggcatacaactgtttctgaggtgtggtattctctgccggggaataagcagcgtagcttctcctttcgtacgctgccagcaaagcagcgctcgtgctagtatgaacaacttacaccaggcaaattttgtgatgggttttgtgagaaagattgctggcgcgagtaacgtgcgccgatttggctctctcaagcagggaaggaaacacacggctgttcaaggc

SEQ ID NO: 215462 - DNA, 3038 bp, Zea Mays
cacgggcctgcctaaacgctgcaaccctgtctttccttcttccatttccacaagacccttgcgtgctctctctctctcctcttggcgacgactgggtggcaggtgcccaggtcttcttgggacccttcgccggcgacaagcaccaccaggttcagtcatgagtgggcttctcatgagcttccctaagtgatgcttcatatgttttctaacatgtaacatctcccgatgttatccatgtactggatatatccttagaagtcagagatgcagaagtctgatcatcatgagcagaagctaacttcaccaagagggttaatccataagatacttcgtcgtacaaatagcaggcgttctcccactgcagctgaccaacaaccttctcctgtatctccagaaacaagcaactcatcaatattctcaaagcaaaaggatgttgatgatgccatcaaggattcagaaaagctgagcacacatactatcagaattgaagatgagaaatctgatttgctagggtctgaaatttattctggaaagcttacattagataacaaaacaaaaagttcatcaaatgaacagtctggatcaggatctagtagcaattgctttgatgctaggctcagcactgaagccctaatatggggttctaacatccttaagcttgaggatattgtatctcttgcaggtttcaagatggaagtggtaaaaactacacatgctgggcatgcaaaatctcttgtatcaactattgattttagtacctgtcctgatggtattgtatgtgtgggtggtgatggaattgtaaatgaggtcctcaatggtcttctatgcagagatgatcaaaatatgtctgcctctgtaccaataggtataatacctgctgggtctgataactcacttatttggacagtcttgggtgtcaaggatccaatttctgcagcattgtcaattgtcaggggaggtcttacacctattgatgttttttctgttgaatggattcaaagtgggactatgcattatggtacaaccgtatcatattttggttttgttagcgatgttcttgagctctcagagaagtatcagaagcattttggtcctttacgatactttgtagctggttttctcaaattcctgtgtttgccaaagtacagttttgaattggaatatcttccagtatcagatgttaatggcgccgagcataaaattttggtaggacaagaaaaggttgacgcgtctgatctatatgatgatgtaattcggagatcaagagcagaatgtttaccacgcgcctcaagtttatctagcattgattcaataatgtctacaggcatcatgtctggggcagagctggaggtttgtagtcctcgtgcaaataatgaaccttctgaggttgttcgtggacttgatccgaaatcaaagcgcttatcgttaggaagagctagtacatttaaagaaccagaagaagtgctccatccccactcccatggtacatctactcccagctggcgtagatctaagtcaaaatcaaggactgaaaaggcaaagccaggcttgtctgctacacacgatgcaaaatcttctaaggttaatgcagacaaagaggacacatcatccacaatttctgatcctggacctgtggctgtatgggattcaggaccaaagtgggacgatgaacctaaatgggataatcaacctaactgggaacccgagacttcaattgagctccatagccctcgcgaggatattgagcttggtctgactaaggagctggtacctagtttagatgaaaggtggacagttaggaaaggacgctatcttggtgtactggtgtgcaaccattcatgcaagactgtgcagagtctgagctctcaggttgttgctcccaaggctgaatatgatgacaattgtttggacctgctgttagttggtggaagtggaagactgagattactgaggtttttggtgcttttgcagtttggaaagcacatatctcttccaaatgtagaatatgtaaaggtgaaatctgtgaggctcaaagcaggcccaaatacacacgacggatgtggtatcgatggcgaactactccatgtcaaggggcaagttcgctgtagtttgttgcctcaacaatgtcaattgatgggcaggccagtgaaaaaccctgtacagtagctgtaaatacactatgcggactgtctgcagctctgaggtcagcccagaatcttgcacctgtggtgtgtacaagcggcgaaccatggattttcgtctgcatccacatgtcagtaattatattcagaagtgagaacatgaacatcctagctggcactcagctccagagatgtacatttgtggttgacgagcagaaggtgctgagtgggtgctgtttcatccatatgtaaagccaaagcctatctcggacagcagcttgttgcgcacctcttgcttttgcctttttctcgtccgatagaatgcatctactatacagccatcctgatgagtgtacttggttgctccagaacatagtgtccacctccaccagccgggtgtctttggaggttccctgatgccggccacttgatactcattgtagggacaacaccccagtgcccgtgtccttgatcagtctgttgtgtttgcgaagtgtgaataagatataggactgtttgattcccggtacagcgcagggtttcagcagaaagggctggatggatgatgttttgtggcgatgctgcctcgttgagtctttaaaacgggtgtaactcttcttcttttgtgagtcgtgatgatgtatgaaccgtgtactgatttgtaaaccttgcctggcaggcatacaactgtttctgaggtgtggtattctctgccggggaataagcagcgtagcttctcctttcgtacgctgccagcaaagcagcgctcgtgctagtatgaacaacttacaccaggcaaattttgtgatgggttttgtgagaaagattgctggcgcgagtaacgtgcgccgatttggctctctcaagcagggaaggaaacacacggctgttcaaggc

SEQ ID NO: 215463 - DNA, 3151 bp, Zea Mays
aaacgctcaaaactacacgggcctgcctaaacgctgcaaccctgtctttccttcttccatttccacaagacccttgcgtgctctctctctctcctcttggcgacgactgggtggcaggtgcccaggtcttcttgggacccttcgccggcgacaagcaccaccaggttcagtcatgagtgggcttctcatgagcttccctaagtgatgcttcatatgttttctaacatgtaacatctcccgatgttatccatgtactggatatatccttagaagtcagagatgcagaagtctgatcatcatgagcagaagctaacttcaccaagagggttaatccataagatacttcgtcgtacaaatagcaggcgttctcccactgcagctgaccaacaaccttctcctgtatctccagaaacaagcaactcatcaatattctcaaagcaaaaggatgttgatgatgccatcaaggattcagaaaagctgagcacacatactatcagaattgaagatgagaaatctgatttgctagggtctgaaatttattctggaaagcttacattagataacaaaacaaaaagttcatcaaatgaacagtctggatcaggatctagtagcaattgctttgatgctaggctcagcactgaagccctaatatggggttctaacatccttaagcttgaggatattgtatctgtatcatataattctggtctccggtatttcaccgtgcatgcttgtcctcttgaaaaaatatccagtggactatcctgctttatgaagcctagaagaacccaaacggacttgaagttcatacttgtcatcttgaatcctcgatctggacatggtagatctagcaaagtttttcatggaaaagtggaacccatatttaagcttgcaggtttcaagatggaagtggtaaaaactacacatgctgggcatgcaaaatctcttgtatcaactattgattttagtacctgtcctgatggtattgtatgtgtgggtggtgatggaattgtaaatgaggtcctcaatggtcttctatgcagagatgatcaaaatatgtctgcctctgtaccaataggtataatacctgctgggtctgataactcacttatttggacagtcttgggtgtcaaggatccaatttctgcagcattgtcaattgtcaggttcttgagctctcagagaagtatcagaagcattttggtcctttacgatactttgtagctggttttctcaaattcctgtgtttgccaaagtacagttttgaattggaatatcttccagtatcagatgttaatggcgccgagcataaaattttggtaggacaagaaaaggttgacgcgtctgatctatatgatgatgtaattcggagatcaagagcagaatgtttaccacgcgcctcaagtttatctagcattgattcaataatgtctacaggcatcatgtctggggcagagctggaggtttgtagtcctcgtgcaaataatgaaccttctgaggttgttcgtggacttgatccgaaatcaaagcgcttatcgttaggaagagctagtacatttaaagaaccagaagaagtgctccatccccactcccatggtacatctactcccagctggcgtagatctaagtcaaaatcaaggactgaaaaggcaaagccaggcttgtctgctacacacgatgcaaaatcttctaaggttaatgcagacaaagaggacacatcatccacaatttctgatcctggacctgtggctgtatgggattcaggaccaaagtgggacgatgaacctaaatgggataatcaacctaactgggaacccgagacttcaattgagctccatagccctcgcgaggatattgagcttggtctgactaaggagctggtacctagtttagatgaaaggtggacagttaggaaaggacgctatcttggtgtactggtgtgcaaccattcatgcaagactgtgcagagtctgagctctcaggttgttgctcccaaggctgaatatgatgacaattgtttggacctgctgttagttggtggaagtggaagactgagattactgaggtttttggtgcttttgcagtttggaaagcacatatctcttccaaatgtagaatatgtaaaggtgaaatctgtgaggctcaaagcaggcccaaatacacacgacggatgtggtatcgatggcgaactactccatgtcaaggggcaagttcgctgtagtttgttgcctcaacaatgtcaattgatgggcaggccagtgaaaaaccctgtacagtagctgtaaatacactatgcggactgtctgcagctctgaggtcagcccagaatcttgcacctgtggtgtgtacaagcggcgaaccatggattttcgtctgcatccacatgtcagtaattatattcagaagtgagaacatgaacatcctagctggcactcagctccagagatgtacatttgtggttgacgagcagaaggtgctgagtgggtgctgtttcatccatatgtaaagccaaagcctatctcggacagcagcttgttgcgcacctcttgcttttgcctttttctcgtccgatagaatgcatctactatacagccatcctgatgagtgtacttggttgctccagaacatagtgtccacctccaccagccgggtgtctttggaggttccctgatgccggccacttgatactcattgtagggacaacaccccagtgcccgtgtccttgatcagtctgttgtgtttgcgaagtgtgaataagatataggactgtttgattcccggtacagcgcagggtttcagcagaaagggctggatggatgatgttttgtggcgatgctgcctcgttgagtctttaaaacgggtgtaactcttcttcttttgtgagtcgtgatgatgtatgaaccgtgtactgatttgtaaaccttgcctggcaggcatacaactgtttctgaggtgtggtattctctgccggggaataagcagcgtagcttctcctttcgtacgctgccagcaaagcagcgctcgtgctagtatgaacaacttacaccaggcaaattttgtgatgggttttgtgagaaagattgctggcgcgagtaacgtgcgccgatttggctctctcaagcagggaaggaaacacacggctgttcaaggc

SEQ ID NO: 215464 - DNA, 3234 bp, Zea Mays
caaacgctcaaaactacacgggcctgcctaaacgctgcaaccctgtctttccttcttccatttccacaagacccttgcgtgctctctctctctcctcttggcgacgactgggtggcaggtgcccaggtcttcttgggacccttcgccggcgacaagcaccaccaggttcagtcatgagtgggcttctcatgagcttccctaagtgatgcttcatatgttttctaacatgtaacatctcccgatgttatccatgtactggatatatccttagaagtcagagatgcagaagtctgatcatcatgagcagaagctaacttcaccaagagggttaatccataagatacttcgtcgtacaaatagcaggcgttctcccactgcagctgaccaacaaccttctcctgtatctccagaaacaagcaactcatcaatattctcaaagcaaaaggatgttgatgatgccatcaaggattcagaaaagctgagcacacatactatcagaattgaagatgagaaatctgatttgctagggtctgaaatttattctggaaagcttacattagataacaaaacaaaaagttcatcaaatgaacagtctggatcaggatctagtagcaattgctttgatgctaggctcagcactgaagccctaatatggggttctaacatccttaagcttgaggatattgtatctgtatcatataattctggtctccggtatttcaccgtgcatgcttgtcctcttgaaaaaatatccagtggactatcctgctttatgaagcctagaagaacccaaacggacttgaagttcgtatcctcttctccgcacgaggcctttcggtgggttaatagttttgcggaccagcaatgttacgtaaacctgttgcctcaccccatggcatctagcaagaagcattcttctgaactcattcagtttgatgccatgtttgatccttatgttaaatgtcggtctccaccaaagatacttgtcatcttgaatcctcgatctggacatggtagatctagcaaagtttttcatggaaaagtggaacccatatttaagcttgcaggtttcaagatggaagtggtaaaaactacacatgctgggcatgcaaaatctcttgtatcaactattgattttagtacctgtcctgatggtattgtatgtgtgggtggtgatggaattgtaaatgaggtcctcaatggtcttctatgcagagatgatcaaaatatgtctgcctctgtaccaatagttcttgagctctcagagaagtatcagaagcattttggtcctttacgatactttgtagctggttttctcaaattcctgtgtttgccaaagtacagttttgaattggaatatcttccagtatcagatgttaatggcgccgagcataaaattttggtaggacaagaaaaggttgacgcgtctgatctatatgatgatgtaattcggagatcaagagcagaatgtttaccacgcgcctcaagtttatctagcattgattcaataatgtctacaggcatcatgtctggggcagagctggaggtttgtagtcctcgtgcaaataatgaaccttctgaggttgttcgtggacttgatccgaaatcaaagcgcttatcgttaggaagagctagtacatttaaagaaccagaagaagtgctccatccccactcccatggtacatctactcccagctggcgtagatctaagtcaaaatcaaggactgaaaaggcaaagccaggcttgtctgctacacacgatgcaaaatcttctaaggttaatgcagacaaagaggacacatcatccacaatttctgatcctggacctgtggctgtatgggattcaggaccaaagtgggacgatgaacctaaatgggataatcaacctaactgggaacccgagacttcaattgagctccatagccctcgcgaggatattgagcttggtctgactaaggagctggtacctagtttagatgaaaggtggacagttaggaaaggacgctatcttggtgtactggtgtgcaaccattcatgcaagactgtgcagagtctgagctctcaggttgttgctcccaaggctgaatatgatgacaattgtttggacctgctgttagttggtggaagtggaagactgagattactgaggtttttggtgcttttgcagtttggaaagcacatatctcttccaaatgtagaatatgtaaaggtgaaatctgtgaggctcaaagcaggcccaaatacacacgacggatgtggtatcgatggcgaactactccatgtcaaggggcaagttcgctgtagtttgttgcctcaacaatgtcaattgatgggcaggccagtgaaaaaccctgtacagtagctgtaaatacactatgcggactgtctgcagctctgaggtcagcccagaatcttgcacctgtggtgtgtacaagcggcgaaccatggattttcgtctgcatccacatgtcagtaattatattcagaagtgagaacatgaacatcctagctggcactcagctccagagatgtacatttgtggttgacgagcagaaggtgctgagtgggtgctgtttcatccatatgtaaagccaaagcctatctcggacagcagcttgttgcgcacctcttgcttttgcctttttctcgtccgatagaatgcatctactatacagccatcctgatgagtgtacttggttgctccagaacatagtgtccacctccaccagccgggtgtctttggaggttccctgatgccggccacttgatactcattgtagggacaacaccccagtgcccgtgtccttgatcagtctgttgtgtttgcgaagtgtgaataagatataggactgtttgattcccggtacagcgcagggtttcagcagaaagggctggatggatgatgttttgtggcgatgctgcctcgttgagtctttaaaacgggtgtaactcttcttcttttgtgagtcgtgatgatgtatgaaccgtgtactgatttgtaaaccttgcctggcaggcatacaactgtttctgaggtgtggtattctctgccggggaataagcagcgtagcttctcctttcgtacgctgccagcaaagcagcgctcgtgctagtatgaacaacttacaccaggcaaattttgtgatgggttttgtgagaaagattgctggcgcgagtaacgtgcgccgatttggctctctcaagcagggaaggaaacacacggctgttcaaggc

SEQ ID NO: 215465 - DNA, 1749 bp, Zea Mays
cacaagatgtataaatgtattgcaaaaaaacaatcaaagccataacctgctattgacactagtgacatgtgttcccatcatcccatgtcaaaagtacgaaaaggtctcaacggtactcatggatatattgtcgaccagactaccataacatggtggcattccagtaaattttacatcaaatgattaatgagggtgtgcattcatgctactccgtttgtcaaatgtatatgtccaactacaaataggagcatacatcattttcgttacaccctatcctttgtacgcacaacacatgtacaacacaggtaacaaagtagccgagcaacggacatttacattaaccggactgctggtaattgaaggcataatgctcaccacacctccgctccttttgtggcgccaagcagcacagcaattgcagcaagcgaggcctgtccatggcaccaaaaaagtttgggggcaaagttagcgcaacctttgtgcattaatttggaagagaaggcacaggtctacagtaacaatggctactaaacatcacatcacatggtcagatagtaacaaacactttcaccatgtagtgccaagctaaatttatgcagcgcattccatagaattgtatttagttgaactgacatatgcttcccatccaagtaagagatgataccaaaagcttccatcgggaaaaaaaagagataccaaaagctatgttgaaatccattaaacccttacaaagttctttttttgtctttttggaaacataaagagcatgcacttcttcaactatacgatgtggtaagtctttttatttgaatatccatctccaatagctttataggggctattgaaatgcaatggtgtagtttagtgacaggagttgactctgtatttgcagcagcagttcgtgtgtgtaaaactgttaaataaccctgatattggccctaaattctcacatgcttaatggatgttttgcatctaaaatccattaacaaatagctggcggaaacatatgagcaatgcatacattgctaggaaggacttacagcaatagtgcaagcaacatatcctggtttctccctgtaatcacgtactcggacacaaatcagcacaaaagctccaagataccatggaatggcagcaaagaagaacccaattataaacctaaaccaccccatgccaaggccacaacatggaagaggacggattctaacaggccttccttcaacaacaggaatataaccttgagcgatctggtagccttgggcgtagtacggcgcggcggccgagtagggttgctgcgggggtgggtagacggcatacgacgccggaggaggctgcgggtagtgctgcatcccaggcggcgccgccggctgggggaacccgaccgccggctgcggaaactccccggaggctccggatgggggaccaaaggtgccgtactggtgctgcggcggcgccgacggcgggtacccgtaagaggacgaggagtccgccgagcgggccttcccgtcggcgtccggcatctggccacccatggtggctcccgcggtggcaaaggttagttaggtttggggaattgcccagttgggacgcaggagaggagggaaggcggtcacgagagaactagggaattgcgcgttgtttgtttgtttgttgatgaagacgattaacgtgtgcctccagcctggacggcggtgttggggcttaacctctctgtgtgcccgtttgtaccattgttagtctggattctca

SEQ ID NO: 215466 - DNA, 3385 bp, Zea Mays
caaagtttgacgccttccaacattggtgttgcccgaagcccacccgacccgactcctccctcccagttccaaatttccaatcctcctcgatcccaccagtagaaccctccgcttgtttcttgctcccggttcttggatcgcggaactgctccaaaccttttcttggatcgcggaaccactccaaacctgcaaaagtttgatctttgtcgactgcttcgggttctaggacctgccgagtggtatttaggcaaagaaggctctgtcggcagtagccgtccttgtgattggttccgggacttgggttttagctcccaaacgagacccccaggcgcgtctgcggcgagctggttgctaaagaaggtggacagatacctattactacaggtgcaaaaggggagatggagtgggctactatggtgacaggagctcaggatcaagtgggaacaaaagcataaagctggaaaggtatctccacgactcaccaaggttaaggtgtctcctacaagagaggtcagaaaggagtttgttgctgaaggctgaagctaaagatacaagggaggagccatggtgaagaagaagctgaagaaactgtatggccgggatgctcgggagttctttaaccaggtcatggtggagcaacctttgctgcccttcctgatcccgcttggcctctttgcgtggttcatcgaacggtgggttgtgccattctcgaactgggttcccctcgctgctgccgtttgggcaaccattcagtatgggaggattaagaggaggacaactgtagaagatttgaacaaaagatggaagcatcttatactgaatacaacacccaccacaccaatcgagccttgcgaatggttgaacaaacttttgttagaagtttggcctaattacatggagccaaaactatcgaagaggtttcagtctaccgtcgagagacgtttaaagaatcgaaaaccaaaattaatagataaaatagaattacaggaattctcacttggttcttgtccacctaccttgggagatcagggcatgcgttggattacttctggtgaccagcaagtcatgtgcttgggatttgattggaatagccacgagatgagtgtaatgtttttggcgaaattagcgaagccactgattgggacttgtcgaattgttataaacagcattcacatcaagggagatcttctactatcacccatacttgatggggaagctatactctattcttttgaatcaaccccagaagtcaggattggggtagcatttggaagtggtggaagtcaagcaattcctggtatggagttaccaggtgtctcgacatggctggtgaagcttttgactgaaaccttagggaaaacaatggttgaacctcgccggctatgtttttctttgccatcagtagatctaaggaaacgagcagttggaggtgttctctcagttactgttgtatcagctagtaacctctgtaagagcacagctaatgatatagggaactgccaaagctcaaatggaggggccacgtatggaattgctgataacaaggtatcacagacatttgttgaggtagaagttggcaatttgatgagaaaaacaagtaccagtaagggtctaaatcctacatggaacagtacatttaacatggtacttcatggagagacaggcattgtcaagtttcttctgtatgaattggattctggcggtgtcaaattcaattacttgacaagctgtgagataaaggtaaagtatgttcatgatggttcaacaatattttgggctataggacataactctggtgttgttgcaaagcatactgagcattgtggacaagaagttggaatggttgttccatttgaggatataaatggcgagttaactgtaagccttgtgctaaaagaatggcagttctctgatggatcggttacattgagtaattctctgggcaatggacttcaaagctcatttgatggatcgacaaagcttcagtccacaacaggaaggaaagttagggtcagagttgttgagggcagggcacttacagctaatagtaaatctggaaaatgtgacccttatgtgaaactccagtatggaaaggctctataccgaacaaaaacactgacacatacggtccgaccagtttggaatcacaagtttgagtttgatgagatctctggtggtgaatatctgaagatcaaatgctataatgcagatatgtttggtgatgaaagcattggtagtgcgagagttaatttggagggacttttagagggtgctacccgtgatgtttgggtcccacttgaaaaagtagattcaggagagataaggcttgaaatagaggcaataaagaatgatcacaacaatagcttgcagagctcaagcagtaaagctggatctggttggattgagctagtcataatcgaagccagagatcttgttgctgcggatctgagaggcactagtgatccttatgtcagggtgcactatgggagcaagaagaaacgaaccaaggtcatttacaaaacactgtctccacagtggaaccagacattcgagttcctggaaaccggagaacccctgattttgcatgtgaaggaccacaacgccgtccttccaaccgccagtatcggccattgcaccgtcgagtacagcatgctgtctccaaaccaatccgctgagaaatggataccgctccaaggcgtaaaaagcggagagatccatgtaagggtggcactgaaggtatcagtaccaggttcggagaagaagaacatgctcggggcaggtccgttcggcaaggggcacaagatgtcgacacagatgagagacagcctgaagagattcacgggcttgatcgacgacggcggtgacccggaggcactggcactagccgtggcggagatggaaggcatccagggcgagcaggaagagtacgtcgaaaccctggagcgggagaaggcgatgctgttgcacaagataaatgagcttggttccgaaatcattaggacagcatctggtcctccaaggacgccgtactagttagatctgcaaatgcacacccccccactactgaatgaacacgcatttatttatcggcaggcgaagacctggttgtacgtagaactctatagtgtgcatgtacaagtgagcagtacagctcgtgtaagtaggccaggcgtgtaggaagcacaggtgtatcttgtagtgattgataaaaactgctcaagcatcaaccggctggaagcttacagaagttggtcgactttgtacacagttagggcatgtttgggaacaatgtttttttaaaaccacattttataataccacagtttactgaatgttagaacaagactatggtatatattttacatcacctgttttggaggaagta

SEQ ID NO: 215467 - DNA, 3324 bp, Zea Mays
caaagtttgacgccttccaacattggtgttgcccgaagcccacccgacccgactcctccctcccagttccaaatttccaatcctcctcgatcccaccagtagaaccctccgcttgtttcttgctcccggttcttggatcgcggaactgctccaaaccttttcttggatcgcggaaccactccaaacctgcaaaagtttgatctttgtcgactgcttcgggttctaggacctgccgagtggtatttaggcaaagaaggctctgtcggcagtagccgtccttgtgattggttccgggacttgggttttagctcccaaacgagacccccaggcgcgtctgcggcgagctggttgctaaagaaggtaggtgtctcgggggctattacaggaatctacaacaccggcctcgcaccattggtggacagatacctattactacaggtgcaaaaggggagatggagtgggctactatggtgacaggagctcaggatcaagtgggaacaaaagcataaagctggaaaggtatctccacgactcaccaaggttaaggtgtctcctacaagagaggtcagaaaggagtttgttgctgaaggctgaagctaaagatacaagggaggagccatggtgaagaagaagctgaagaaactgtatggccgggatgctcgggagttctttaaccaggtcatggtggagcaacctttgctgcccttcctgatcccgcttggcctctttgcgtggttcatcgaacggtgggttgtgccattctcgaactgggttcccctcgctgctgccgtttgggcaaccattcagtatgggaggattaagaggaggacaactgtagaagatttgaacaaaagatggaagcatcttatactgaatacaacacccaccacaccaatcgagccttgcgaatggttgaacaaacttttgttagaagtttggcctaattacatggagccaaaactatcgaagaggtttcagtctaccgtcgagagacgtttaaagaatcgaaaaccaaaattaatagataaaatagaattacaggaattctcacttggttcttgtccacctaccttgggagatcagggcatgcgttggattacttctggtgaccagcaagtcatgtgcttgggatttgattggaatagccacgagatgagtgtaatgtttttggcgaaattagcgaagccactgattgggacttgtcgaattgttataaacagcattcacatcaagggagatcttctactatcacccatacttgatggggaagctatactctattcttttgaatcaaccccagaagtcaggattggggtagcatttggaagtggtggaagtcaagcaattcctggtatggagttaccaggtgtctcgacatggctggtgaagcttttgactgaaaccttagggaaaacaatggttgaacctcgccggctatgtttttctttgccatcagtagatctaaggaaacgagcagttggaggtgttctctcagttactgttgtatcagctagtaacctctgtaagagcacagctaatgatatagggaactgccaaagctcaaatggaggggccacgtatggaattgctgataacaaggtatcacagacatttgttgaggtagaagttggcaatttgatgagaaaaacaagtaccagtaagggtctaaatcctacatggaacagtacatttaacatggtacttcatggagagacaggcattgtcaagtttcttctgtatgaattggattctggcggtgtcaaattcaattacttgacaagctgtgagataaaggtaaagtatgttcatgatggttcaacaatattttgggctataggacataactctggtgttgttgcaaagcatactgagcattgtggacaagaagttggaatggttgttccatttgaggatataaatggcgagttaactgtaagccttgtgctaaaagaatggcagttctctgatggatcggttacattgagtaattctctgggcaatggacttcaaagctcatttgatggatcgacaaagcttcagtccacaacaggaaggaaagttagggtcagagttgttgagggcagggcacttacagctaatagtaaatctggaaaatgtgacccttatgtgaaactccagtatggaaagatatgtttggtgatgaaagcattggtagtgcgagagttaatttggagggacttttagagggtgctacccgtgatgtttgggtcccacttgaaaaagtagattcaggagagataaggcttgaaatagaggcaataaagaatgatcacaacaatagcttgcagagctcaagcagtaaagctggatctggttggattgagctagtcataatcgaagccagagatcttgttgctgcggatctgagaggcactagtgatccttatgtcagggtgcactatgggagcaagaagaaacgaaccaaggtcatttacaaaacactgtctccacagtggaaccagacattcgagttcctggaaaccggagaacccctgattttgcatgtgaaggaccacaacgccgtccttccaaccgccagtatcggccattgcaccgtcgagtacagcatgctgtctccaaaccaatccgctgagaaatggataccgctccaaggcgtaaaaagcggagagatccatgtaagggtggcactgaaggtatcagtaccaggttcggagaagaagaacatgctcggggcaggtccgttcggcaaggggcacaagatgtcgacacagatgagagacagcctgaagagattcacgggcttgatcgacgacggcggtgacccggaggcactggcactagccgtggcggagatggaaggcatccagggcgagcaggaagagtacgtcgaaaccctggagcgggagaaggcgatgctgttgcacaagataaatgagcttggttccgaaatcattaggacagcatctggtcctccaaggacgccgtactagttagatctgcaaatgcacacccccccactactgaatgaacacgcatttatttatcggcaggcgaagacctggttgtacgtagaactctatagtgtgcatgtacaagtgagcagtacagctcgtgtaagtaggccaggcgtgtaggaagcacaggtgtatcttgtagtgattgataaaaactgctcaagcatcaaccggctggaagcttacagaagttggtcgactttgtacacagttagggcatgtttgggaacaatgtttttttaaaaccacattttataataccacagtttactgaatgttagaacaagactatggtatatattttacatcacctgttttggaggaagta

SEQ ID NO: 215468 - DNA, 3439 bp, Zea Mays
caaagtttgacgccttccaacattggtgttgcccgaagcccacccgacccgactcctccctcccagttccaaatttccaatcctcctcgatcccaccagtagaaccctccgcttgtttcttgctcccggttcttggatcgcggaactgctccaaaccttttcttggatcgcggaaccactccaaacctgcaaaagtttgatctttgtcgactgcttcgggttctaggacctgccgagtggtatttaggcaaagaaggctctgtcggcagtagccgtccttgtgattggttccgggacttgggttttagctcccaaacgagacccccaggcgcgtctgcggcgagctggttgctaaagaaggtaggtgtctcgggggctattacaggaatctacaacaccggcctcgcaccattggtggacagatacctattactacaggtgcaaaaggggagatggagtgggctactatggtgacaggagctcaggatcaagtgggaacaaaagcataaagctggaaaggtatctccacgactcaccaaggttaaggtgtctcctacaagagaggtcagaaaggagtttgttgctgaaggctgaagctaaagatacaagggaggagccatggtgaagaagaagctgaagaaactgtatggccgggatgctcgggagttctttaaccaggtcatggtggagcaacctttgctgcccttcctgatcccgcttggcctctttgcgtggttcatcgaacggtgggttgtgccattctcgaactgggttcccctcgctgctgccgtttgggcaaccattcagtatgggaggattaagaggaggacaactgtagaagatttgaacaaaagatggaagcatcttatactgaatacaacacccaccacaccaatcgagccttgcgaatggttgaacaaacttttgttagaagtttggcctaattacatggagccaaaactatcgaagaggtttcagtctaccgtcgagagacgtttaaagaatcgaaaaccaaaattaatagataaaatagaattacaggaattctcacttggttcttgtccacctaccttgggagatcagggcatgcgttggattacttctggtgaccagcaagtcatgtgcttgggatttgattggaatagccacgagatgagtgtaatgtttttggcgaaattagcgaagccactgattgggacttgtcgaattgttataaacagcattcacatcaagggagatcttctactatcacccatacttgatggggaagctatactctattcttttgaatcaaccccagaagtcaggattggggtagcatttggaagtggtggaagtcaagcaattcctggtatggagttaccaggtgtctcgacatggctggtgaagcttttgactgaaaccttagggaaaacaatggttgaacctcgccggctatgtttttctttgccatcagtagatctaaggaaacgagcagttggaggtgttctctcagttactgttgtatcagctagtaacctctgtaagagcacagctaatgatatagggaactgccaaagctcaaatggaggggccacgtatggaattgctgataacaaggtatcacagacatttgttgaggtagaagttggcaatttgatgagaaaaacaagtaccagtaagggtctaaatcctacatggaacagtacatttaacatggtacttcatggagagacaggcattgtcaagtttcttctgtatgaattggattctggcggtgtcaaattcaattacttgacaagctgtgagataaaggtaaagtatgttcatgatggttcaacaatattttgggctataggacataactctggtgttgttgcaaagcatactgagcattgtggacaagaagttggaatggttgttccatttgaggatataaatggcgagttaactgtaagccttgtgctaaaagaatggcagttctctgatggatcggttacattgagtaattctctgggcaatggacttcaaagctcatttgatggatcgacaaagcttcagtccacaacaggaaggaaagttagggtcagagttgttgagggcagggcacttacagctaatagtaaatctggaaaatgtgacccttatgtgaaactccagtatggaaaggctctataccgaacaaaaacactgacacatacggtccgaccagtttggaatcacaagtttgagtttgatgagatctctggtggtgaatatctgaagatcaaatgctataatgcagatatgtttggtgatgaaagcattggtagtgcgagagttaatttggagggacttttagagggtgctacccgtgatgtttgggtcccacttgaaaaagtagattcaggagagataaggcttgaaatagaggcaataaagaatgatcacaacaatagcttgcagagctcaagcagtaaagctggatctggttggattgagctagtcataatcgaagccagagatcttgttgctgcggatctgagaggcactagtgatccttatgtcagggtgcactatgggagcaagaagaaacgaaccaaggtcatttacaaaacactgtctccacagtggaaccagacattcgagttcctggaaaccggagaacccctgattttgcatgtgaaggaccacaacgccgtccttccaaccgccagtatcggccattgcaccgtcgagtacagcatgctgtctccaaaccaatccgctgagaaatggataccgctccaaggcgtaaaaagcggagagatccatgtaagggtggcactgaaggtatcagtaccaggttcggagaagaagaacatgctcggggcaggtccgttcggcaaggggcacaagatgtcgacacagatgagagacagcctgaagagattcacgggcttgatcgacgacggcggtgacccggaggcactggcactagccgtggcggagatggaaggcatccagggcgagcaggaagagtacgtcgaaaccctggagcgggagaaggcgatgctgttgcacaagataaatgagcttggttccgaaatcattaggacagcatctggtcctccaaggacgccgtactagttagatctgcaaatgcacacccccccactactgaatgaacacgcatttatttatcggcaggcgaagacctggttgtacgtagaactctatagtgtgcatgtacaagtgagcagtacagctcgtgtaagtaggccaggcgtgtaggaagcacaggtgtatcttgtagtgattgataaaaactgctcaagcatcaaccggctggaagcttacagaagttggtcgactttgtacacagttagggcatgtttgggaacaatgtttttttaaaaccacattttataataccacagtttactgaatgttagaacaagactatggtatatattttacatcacctgttttggaggaagta

SEQ ID NO: 215469 - DNA, 3361 bp, Zea Mays
caaagtttgacgccttccaacattggtgttgcccgaagcccacccgacccgactcctccctcccagttccaaatttccaatcctcctcgatcccaccagtagaaccctccgcttgtttcttgctcccggttcttggatcgcggaactgctccaaaccttttcttggatcgcggaaccactccaaacctgcaaaagtttgatctttgtcgactgcttcgggttctaggacctgccgagtggtatttaggcaaagaaggctctgtcggcagtagccgtccttgtgattggttccgggacttgggttttagctcccaaacgagacccccaggcgcgtctgcggcgagctggttgctaaagaaggtaggtgtctcgggggctattacaggaatctacaacaccggcctcgcaccattgatacctattactacaggtgcaaaaggggagatggagtgggctactatggtgacaggagctcaggatcaagtgggaacaaaagcataaagctggaaaggctgaagctaaagatacaagggaggagccatggtgaagaagaagctgaagaaactgtatggccgggatgctcgggagttctttaaccaggtcatggtggagcaacctttgctgcccttcctgatcccgcttggcctctttgcgtggttcatcgaacggtgggttgtgccattctcgaactgggttcccctcgctgctgccgtttgggcaaccattcagtatgggaggattaagaggaggacaactgtagaagatttgaacaaaagatggaagcatcttatactgaatacaacacccaccacaccaatcgagccttgcgaatggttgaacaaacttttgttagaagtttggcctaattacatggagccaaaactatcgaagaggtttcagtctaccgtcgagagacgtttaaagaatcgaaaaccaaaattaatagataaaatagaattacaggaattctcacttggttcttgtccacctaccttgggagatcagggcatgcgttggattacttctggtgaccagcaagtcatgtgcttgggatttgattggaatagccacgagatgagtgtaatgtttttggcgaaattagcgaagccactgattgggacttgtcgaattgttataaacagcattcacatcaagggagatcttctactatcacccatacttgatggggaagctatactctattcttttgaatcaaccccagaagtcaggattggggtagcatttggaagtggtggaagtcaagcaattcctggtatggagttaccaggtgtctcgacatggctggtgaagcttttgactgaaaccttagggaaaacaatggttgaacctcgccggctatgtttttctttgccatcagtagatctaaggaaacgagcagttggaggtgttctctcagttactgttgtatcagctagtaacctctgtaagagcacagctaatgatatagggaactgccaaagctcaaatggaggggccacgtatggaattgctgataacaaggtatcacagacatttgttgaggtagaagttggcaatttgatgagaaaaacaagtaccagtaagggtctaaatcctacatggaacagtacatttaacatggtacttcatggagagacaggcattgtcaagtttcttctgtatgaattggattctggcggtgtcaaattcaattacttgacaagctgtgagataaaggtaaagtatgttcatgatggttcaacaatattttgggctataggacataactctggtgttgttgcaaagcatactgagcattgtggacaagaagttggaatggttgttccatttgaggatataaatggcgagttaactgtaagccttgtgctaaaagaatggcagttctctgatggatcggttacattgagtaattctctgggcaatggacttcaaagctcatttgatggatcgacaaagcttcagtccacaacaggaaggaaagttagggtcagagttgttgagggcagggcacttacagctaatagtaaatctggaaaatgtgacccttatgtgaaactccagtatggaaaggctctataccgaacaaaaacactgacacatacggtccgaccagtttggaatcacaagtttgagtttgatgagatctctggtggtgaatatctgaagatcaaatgctataatgcagatatgtttggtgatgaaagcattggtagtgcgagagttaatttggagggacttttagagggtgctacccgtgatgtttgggtcccacttgaaaaagtagattcaggagagataaggcttgaaatagaggcaataaagaatgatcacaacaatagcttgcagagctcaagcagtaaagctggatctggttggattgagctagtcataatcgaagccagagatcttgttgctgcggatctgagaggcactagtgatccttatgtcagggtgcactatgggagcaagaagaaacgaaccaaggtcatttacaaaacactgtctccacagtggaaccagacattcgagttcctggaaaccggagaacccctgattttgcatgtgaaggaccacaacgccgtccttccaaccgccagtatcggccattgcaccgtcgagtacagcatgctgtctccaaaccaatccgctgagaaatggataccgctccaaggcgtaaaaagcggagagatccatgtaagggtggcactgaaggtatcagtaccaggttcggagaagaagaacatgctcggggcaggtccgttcggcaaggggcacaagatgtcgacacagatgagagacagcctgaagagattcacgggcttgatcgacgacggcggtgacccggaggcactggcactagccgtggcggagatggaaggcatccagggcgagcaggaagagtacgtcgaaaccctggagcgggagaaggcgatgctgttgcacaagataaatgagcttggttccgaaatcattaggacagcatctggtcctccaaggacgccgtactagttagatctgcaaatgcacacccccccactactgaatgaacacgcatttatttatcggcaggcgaagacctggttgtacgtagaactctatagtgtgcatgtacaagtgagcagtacagctcgtgtaagtaggccaggcgtgtaggaagcacaggtgtatcttgtagtgattgataaaaactgctcaagcatcaaccggctggaagcttacagaagttggtcgactttgtacacagttagggcatgtttgggaacaatgtttttttaaaaccacattttataataccacagtttactgaatgttagaacaagactatggtatatattttacatcacctgttttggaggaagta

SEQ ID NO: 215470 - DNA, 3447 bp, Zea Mays
caaagtttgacgccttccaacattggtgttgcccgaagcccacccgacccgactcctccctcccagttccaaatttccaatcctcctcgatcccaccagtagaaccctccgcttgtttcttgctcccggttcttggatcgcggaactgctccaaaccttttcttggatcgcggaaccactccaaacctgcaaaagtttgatctttgtcgactgcttcgggttctaggacctgccgagtggtatttaggcaaagaaggctctgtcggcagtagccgtccttgtgattggttccgggacttgggttttagctcccaaacgagacccccaggcgcgtctgcggcgagctggttgctaaagaaggtaggtgtctcgggggctattacaggaatctacaacaccggcctcgcaccattggtggacagatacctattactacaggtgcaaaaggggagatggagtgggctactatggtgacaggagctcaggatcaagtgggaacaaaagcataaagctggaaaggtatctccacgactcaccaaggttaaggtgtctcctacaagagaggtcagaaaggagtttgttgctgaaggctgaagctaaagatacaagggaggagccatggtgaagaagaagctgaagaaactgtatggccgggatgctcgggagttctttaaccaggtcatggtggagcaacctttgctgcccttcctgatcccgcttggcctctttgcgtggttcatcgaacggtgggttgtgccattctcgaactgggttcccctcgctgctgccgtttgggcaaccattcagtatgggaggattaagaggaggacaactgtagaagatttgaacaaaagatggaagcatcttatactgaatacaacacccaccacaccaatcgagccttgcgaatggttgaacaaacttttgttagaagtttggcctaattacatggagccaaaactatcgaagaggtttcagtctaccgtcgagagacgtttaaagaatcgaaaaccaaaattaatagataaaatagaattacaggaattctcacttggttcttgtccacctaccttgggagatcagggcatgcgttggattacttctggtgaccagcaagtcatgtgcttgggatttgattggaatagccacgagatgagtgtaatgtttttggcgaaattagcgaagccactgattgggacttgtcgaattgttataaacagcattcacatcaagggagatcttctactatcacccatacttgatggggaagctatactctattcttttgaatcaaccccagaagtcaggattggggtagcatttggaagtggtggaagtcaagcaattcctggtatggagttaccaggtgtctcgacatggctggtgaagcttttgactgaaaccttagggaaaacaatggttgaacctcgccggctatgtttttctttgccatcagtagatctaaggaaacgagcagttggaggtgttctctcagttactgttgtatcagctagtaacctctgtaagagcacagctaatgatatagggaactgccaaagctcaaatggaggggccacgtatggaattgctgataacaaggtatcacagacatttgttgaggtagaagttggcaatttgatgagaaaaacaagtaccagtaagggtctaaatcctacatggaacagtacatttaacatggtacttcatggagagacaggcattgtcaagtttcttctgtatgaattggattctggcggtgtcaaattcaattacttgacaagctgtgagataaaggtaaagtatgttcatgatggttcaacaatattttgggctataggacataactctggtgttgttgcaaagcatactgagcattgtggacaagaagttggaatggttgttccatttgaggatataaatggcgagttaactgtaagccttgtgctaaaagaatggcagttctctgatggatcggttacattgagtaattctctgggcaatggacttcaaagctcatttgatggatcgacaaagcttcagtccacaacaggaaggaaagttagggtcagagttgttgagggcagggcacttacagctaatagtaaatctggaaaatgtgacccttatgtgaaactccagtatggaaaggctctataccgaacaaaaacactgacacatacggtccgaccagtttggaatcacaagtttgagtttgatgagatctctggtggtgaatatctgaagatcaaatgctataatgcagatatgtttggtgatgaaagcattggtagtgcgagagttaatttggagggacttttagagggtgctacccgtgatgtttgggtcccacttgaaaaagtagattcaggagagataaggcttgaaatagaggcaataaagaatgatcacaacaatagcttgcagagctcaagcagtaaagctggatctggttggattgagctagtcataatcgaagccagagatcttgttgctgcggatctgagaggcactagtgatccttatgtcagggtgcactatgggagcaagaagaaacgaaccaaggtcagatggtcatttacaaaacactgtctccacagtggaaccagacattcgagttcctggaaaccggagaacccctgattttgcatgtgaaggaccacaacgccgtccttccaaccgccagtatcggccattgcaccgtcgagtacagcatgctgtctccaaaccaatccgctgagaaatggataccgctccaaggcgtaaaaagcggagagatccatgtaagggtggcactgaaggtatcagtaccaggttcggagaagaagaacatgctcggggcaggtccgttcggcaaggggcacaagatgtcgacacagatgagagacagcctgaagagattcacgggcttgatcgacgacggcggtgacccggaggcactggcactagccgtggcggagatggaaggcatccagggcgagcaggaagagtacgtcgaaaccctggagcgggagaaggcgatgctgttgcacaagataaatgagcttggttccgaaatcattaggacagcatctggtcctccaaggacgccgtactagttagatctgcaaatgcacacccccccactactgaatgaacacgcatttatttatcggcaggcgaagacctggttgtacgtagaactctatagtgtgcatgtacaagtgagcagtacagctcgtgtaagtaggccaggcgtgtaggaagcacaggtgtatcttgtagtgattgataaaaactgctcaagcatcaaccggctggaagcttacagaagttggtcgactttgtacacagttagggcatgtttgggaacaatgtttttttaaaaccacattttataataccacagtttactgaatgttagaacaagactatggtatatattttacatcacctgttttggaggaagta

SEQ ID NO: 215471 - DNA, 1186 bp, Zea Mays
gcgcatgcagccgttatgtttgttttggtgggtggttgtggctgggcggtgctgcgcggcgagccacgcgattgaatcgaatcgggagctctttggattggaatcgcggcgcgctagcttctgtgaacgtactagaccggaggagattactgctagaatgctcccaatccgagctttttgggattatgatcctcccgtccgctggcttcgccccgctggtactccgcagcgcgtcgtcgctcctctggtcttctcgagctcgccaactcgccggtaagcgccgtcaagctccttcatcggagatcctccttccctgcaatgtcgtcgagggggaagaagaggctagtggtcgaggtggatctcgatttagatcctgcagctgaggtcaccgccgccttcgatcgactctgtgtttccgtagtgaacaagccgccaccagctgccgccgttggtaaggattcagcctcctccaccttggtcaacagtgtagcctttggtaaggattcttcctcctccgctcgatctcctccgacgatgtccaccgaacagcctcactcatggagcactccggccgtcaccactccattgtcagcagcatcaactgtgccgtatgccaggtacaaagaggtctataatggccttaatgacgccattgaagagatgcagaaagtagcgatgaatttgaaggcattgtctactgagtacattgttcctgagccttcttcgggtaaagagatcttggtgaaccaattaatgtggcgctttcatgagcttgcgcagtcactagatgaagcattgtatcgatctctactcgctcaggccggtccttcaccacccttgtctgagtattttgacaacgacagatcagattatgaagcccacatgatgagtggtggggattgggctctggaagatgttaattttgaagagattcgggatcgtatgaggaactagaatttgggaggcagtgcttagcccatcaactggttgtagtaatttgtaatgtagtatttgtgatgtaatacatctagtaagtcttttgtcggcaacaagagactaccatatttgttcgttgttctgtcaagtatgtgtcagttcgagtatgtgtttgttcaagtatgtgtatgttctagtatttgacagattaatgtgagaacaatgtgtgtgttcgagcatttgtcagcac

SEQ ID NO: 215472 - DNA, 2590 bp, Zea Mays
ctgctccgctcttgtcctgccacccacgcacgccatggacgcctgggaggccaccaaggtggtgttcgaccgggtgcgggcgctggacccggagaacgcctccaagatgatgggcctgctgctcattcaggacaacagcgacaaggagctgatccgcctcgccttcggcccggagcacctgctccactccttcgtcgccaccgcgcgcgccgagctcgccgccaagcccgcgtccccgccgtcgcccgtgctcggcccgctgcagtccggcgcgccctggggcctcccgagccccggctctggagccggcggcggcggcggcggcgaccaccaccaccactcgcccttcgccgccgctgaccagctcgggtacgacggcggcgccgacgcgttctacgccgacgagtacgactgctggtcccccgcgggcgccgccggcgcccaccgccggagcttctcgctcagcgacgccgaggcggccgcttcgtggaggccctgcatgtactacgcgcgcgggtactgcaagaacggctcctcctgccgcttcctccacggcgtgcccgaagacgacgccgcggagcgggagatggccgtcatgcgcgccaaggccctggccgccgcgccgccgacgcagcagcagcagctcatggcgtccgcgtaccccttctcgccgtcgcccaagggaggcgtgagcctcagcttcctgctccagcagcagcagcagagcgagacccaaagggcggcggcgggcatgctgctcggcggcgaggacatgcacaggttcccggtgcgctccccgcggatggaccgcggcgacctcatcggcagccccgccgcgcggcagatctacctgacgttcccggccgactccaccttcagcgaggaggacgtgtccaactacttcagcatgtttgggccggtgcaggatgtgcgcatcccgtaccagcagaagcgcatgttcgggttcgtcaccttcgtgtacgccgagacggtgaaggccatcctgagcaagggcaacccgcacttcgtgtgcgacgcccgcgtgctcgtcaagccctacaaggagaagggcaaggtccccgacaggttcaggtccgttctcccttcttctccgttgcatattgcattgccattgcctgcctgcgcatgcatcgcattctcatcgttctctcttcagtcacattgcaatgcactgcacgttgcgttgcttgtttgtttcgatagcttccgttgccacctaaaaaaagcttcttttttcggttttatcgttttgtctggttgcaggaagctgcagcacacgcaccatggcggagccgagttcgtcggttgtgcgtcgcccaccggattgctggattccagggacccgtacgatctccagcagcctcagatcggatcaaggatgatgtacgggaacatagctaaccagcacgaggcgttcctgaggaggaagctggaggaggagcaggcagccgagctgcagcaagccatagagctggaggggcgccgcttcatggggctgcagctcctcgatctcaagagcaggggccaccaccatctcggttcaggcgcgcccatgcctctgcggcaagccaccgatggcaaaggcagcggcatcaacgggaacggcaacgcgtcccatttggaggatgccatctgcatccaagataagaggatgatgagcagccttgcaatgagtgctcctgctgctgctgatgcggaaggcgagcacgaggagcagcaggaagagggcggtggtggctgtgatggcagcagcagcagcagccccaagcaggcagtcaaccctggggaagaggaggtggtggaatctggtcctgtgacagcgacgcccaacgctgcttgtggattccaagaaagctatggcgtggtggaggtggagctcgtcttgcctgacagccccttcgcgtcccccaccaaggaggaggcctcatacgctgacgctgtcactactgcagccgctcggaacggtagcatcagcagcagccctcgccatgtggcccttttcgcacccgcgtcttccaccaccctcgagctgcccccctacagctcctcctccttctttcaggtgcccaggttttctcgtgggcatgaagccattgggctgtgatgtgaggtgcacagagcaaaaaagggggagggggccctccattcctctaatctgggaggactaatggctatgattggccccatcaaccaggcgtagagaagctttgacaaagaaaaaagaaatacctttggagaggtgtaatcttcttcagagagtgggaggagggaggggacagtgaagacagcaacagaagaagaaacaagtctaggttgtttttttagctcttaggcctatgataagtatatgatagtaagtgtgagtgagtgagtagtaggcataaataatagtagtagtagttaattagtcgtttattagcagctcctatgctcgtttgtggcatggatggatctcactgttgtgatgatacaggtgattaaactaaaccgtagtagaatggtgtaagctctgccagttgtagttgcgaggctgcatacatcagacatggcatccaaaagaaagaaaata

SEQ ID NO: 215473 - DNA, 2647 bp, Zea Mays
ccaactccgccgcttttcattttcaccttcccttcctcccttcgcttccccttgagtgcagcaggacccccacctgataagagcggactgctccgctcttgtcctgccacccacgcacgccatggacgcctgggaggccaccaaggtggtgttcgaccgggtgcgggcgctggacccggagaacgcctccaagatgatgggcctgctgctcattcaggacaacagcgacaaggagctgatccgcctcgccttcggcccggagcacctgctccactccttcgtcgccaccgcgcgcgccgagctcgccgccaagcccgcgtccccgccgtcgcccgtgctcggcccgctgcagtccggcgcgccctggggcctcccgagccccggctctggagccggcggcggcggcggcggcgaccaccaccaccactcgcccttcgccgccgctgaccagctcgggtacgacggcggcgccgacgcgttctacgccgacgagtacgactgctggtcccccgcgggcgccgccggcgcccaccgccggagcttctcgctcagcgacgccgaggcggccgcttcgtggaggccctgcatgtactacgcgcgcgggtactgcaagaacggctcctcctgccgcttcctccacggcgtgcccgaagacgacgccgcggagcgggagatggccgtcatgcgcgccaaggccctggccgccgcgccgccgacgcagcagcagcagctcatggcgtccgcgtaccccttctcgccgtcgcccaagggaggcgtgagcctcagcttcctgctccagcagcagcagcagagcgagacccaaagggcggcggcgggcatgctgctcggcggcgaggacatgcacaggttcccggtgcgctccccgcggatggaccgcggcgacctcatcggcagccccgccgcgcggcagatctacctgacgttcccggccgactccaccttcagcgaggaggacgtgtccaactacttcagcatgtttgggccggtgcaggatgtgcgcatcccgtaccagcagaagcgcatgttcgggttcgtcaccttcgtgtacgccgagacggtgaaggccatcctgagcaagggcaacccgcacttcgtgtgcgacgcccgcgtgctcgtcaagccctacaaggagaagggcaaggtccccgacaggttcaggtccgttctcccttcttctccgttgcatattgcattgccattgcctgcctgcgcatgcatcgcattctcatcgttctctcttcagtcacattgcaatgcactgcacgttgcgttgcttgtttgtttcgatagcttccgttgccacctaaaaaaagcttcttttttcggttttatcgttttgtctggttgcaggaagctgcagcacacgcaccatggcggagccgagttcgtcggttgtgcgtcgcccaccggattgctggattccagggacccgtacgatctccagcagcctcagatcggatcaaggatgatgtacgggaacatagctaaccagcacgaggcgttcctgaggaggaagctggaggaggagcaggcagccgagctgcagcaagccatagagctggaggggcgccgcttcatggggctgcagctcctcgatctcaagagcaggggccaccaccatctcggttcaggcgcgcccatgcctctgcggcaagccaccgatggcaaaggcagcggcatcaacgggaacggcaacgcgtcccatttggaggatgccatctgcatccaagataagaggatgatgagcagccttgcaatgagtgctcctgctgctgctgatgcggaaggcgagcacgaggagcagcaggaagagggcggtggtggctgtgatggcagcagcagcagcagccccaagcaggcagtcaaccctggggaagaggaggtggtggaatctggtcctgtgacagcgacgcccaacgctgcttgtggattccaagaaagcagctatggcgtggtggaggtggagctcgtcttgcctgacagccccttcgcgtcccccaccaaggaggaggcctcatacgctgacgctgtcactactgcagccgctcggaacggtagcatcagcagcagccctcgccatgtggcccttttcgcacccgcgtcttccaccaccctcgagctgcccccctacagctcctcctccttctttcaggtgcccaggttttctcgtgggcatgaagccattgggctgtgatgtgaggtgcacagagcaaaaaagggggagggggccctccattcctctaatctgggagcgtagagaagctttgacaaagaaaaaagaaatacctttggagaggtgtaatcttcttcagagagtgggaggagggaggggacagtgaagacagcaacagaagaagaaacaagtctaggttgtttttttagctcttaggcctatgataagtatatgatagtaagtgtgagtgagtgagtagtaggcataaataatagtagtagtagttaattagtcgtttattagcagctcctatgctcgtttgtggcatggatggatctcactgttgtgatgatacaggtgattaaactaaaccgtagtagaatggtgtaagctctgccagttgtagttgcgaggctgcatacatcagacatggcatccaaaagaaagaaaata

SEQ ID NO: 215474 - DNA, 1551 bp, Zea Mays
ataaaaatgcggccaccgcccaccgccctccgcctcccacctccacctgacctcccgtcccgcattcgggacgaagccaccaacgacgagctcagcagcgccgacgccgcaacgacaaccagagcaccccgcactgtggagaattcatgtaaattatattaaaaggtagcaatgtggcgccgctgttgctgcaattgccaagtggatgaatccgaccagcatgaaaatgggcatgtcaaggccacaatcaacaacattgatggggcaataatggggttgaaagattctactactggaaaagtcgagccgcaggatgctgctccccaaattgatatccctgttctatccttggatgaactgatagaaaaaactgatgactttggttcaacggctttgataggaagaaaaggagttcaaggtgctcaacctggcctggcgcttgattggatgcagcgagtgcaaattgctgttgatgcggcaaaaggacttgaatatcttcatgagaaagttcagccttccattgtccatagggatattagatcaagtaatatcctcttgtttgaagatttcaaggcaaagatagcagactttaatctctcaaatcaggctccagatatggctgcccggttgcattcaactcgtgtcttgggaacctttggatatcatgctccagagtatgcaatgaccggtcaactaacccagaaaagtgatgtatatagcttcggagtagttcttttggagcttttgacaggtagaaagccagtagaccatacaatgcctagagggcagcagagcctagtaacttgggctaccccaaggttaactgaagacaaggtgaagcagtgtgtagatccacggttgatgggggaatatccggcgaaaggactcgctaagcttgctgctgtagcagctttgtgtgtgcaatatgaagctgaattcgcccaaatatgagcattgtggttaaggctctgtctccactactcgtaacaaagcagactccatcacctgttgttgacagttgacgtacaaaattaacctaagttgcaaatatgagcggcaacagttgggacactacggacatttgatcggttcacctcagtcacagatttcaaacactaactgcatggagatggagggcatctttagtactgcattaacaactttgcatctgcggttctacagcatgtgcaaggcaacaatattccttttcatctctcagtaaatgccagtatcaaggagactactgaaatattcagtgatcaacattgagacttttttttttttgcaaagatgcggaatggtaaaagacccttcttttggtgtcacaaacagcaatgggatctcccagtatacatgttcgactcagaaaccgtaacggtaaaaaaattccactgtgaatcggaagacatgcaaagcaaacaacgtagcaattagtcatttcgctctaatttgaaaaacgtgcaaagctcagtaatcagtaaacacgccgtagtatctctcatgcatcacgcacatacaggaatgagatctccggtagacatgcgcgatcag

SEQ ID NO: 215475 - DNA, 1625 bp, Zea Mays
ccacctccacctgacctcccgtcccgcattcgggacgaagccaccaacgacgagctcagcagcgccgacgccgcaacgacaaccagagcaccccgcactgtggagaattcatgtaaattatattaaaaggtagcaatgtggcgccgctgttgctgcaattgccaagtggatgaatccgaccagcatgaaaatgggcatgtcaaggccacaatcaacaacattgatggggcaataatggggttgaaagattctactactggaaaagtcgagccgcaggatgctgctccccaaattgatatccctgttctatccttggatgaactgatagaaaaaactgatgactttggttcaacggctttgataggtgaaggttcttatgggagagtgtactatgcgattcttgataatggaacaaaaatggcagtaaagaaacttgattctactgaaaatgaacccactgctgaattcttgacccaggtttcattggtttcaagattgaaacatgaaaactttgttgacatgttggggtactgtatggagcgtaatcttcgcatagtagcctatgaattcgccaccatgggttctctgcatgatgtactacatggaagaaaaggagttcaaggtgctcaacctggcctggcgcttgattggatgcagcgagtgcaaattgctgttgatgcggcaaaaggacttgaatatcttcatgagaaagttcagccttccattgtccatagggatattagatcaagtatgcaatgaccggtcaactaacccagaaaagtgatgtatatagcttcggagtagttcttttggagcttttgacaggtagaaagccagtagaccatacaatgcctagagggcagcagagcctagtaacttgggctaccccaaggttaactgaagacaaggtgaagcagtgtgtagatccacggttgatgggggaatatccggcgaaaggactcgctaagcttgctgctgtagcagctttgtgtgtgcaatatgaagctgaattcgcccaaatatgagcattgtggttaaggctctgtctccactactcgtaacaaagcagactccatcacctgttgttgacagttgacgtacaaaattaacctaagttgcaaatatgagcggcaacagttgggacactacggacatttgatcggttcacctcagtcacagatttcaaacactaactgcatggagatggagggcatctttagtactgcattaacaactttgcatctgcggttctacagcatgtgcaaggcaacaatattccttttcatctctcagtaaatgccagtatcaaggagactactgaaatattcagtgatcaacattgagacttttttttttttgcaaagatgcggaatggtaaaagacccttcttttggtgtcacaaacagcaatgggatctcccagtatacatgttcgactcagaaaccgtaacggtaaaaaaattccactgtgaatcggaagacatgcaaagcaaacaacgtagcaattagtcatttcgctctaatttgaaaaacgtgcaaagctcagtaatcagtaaacacgccgtagtatctctcatgcatcacgcacatacaggaatgagatctccggtagacatgcgcgatcag

SEQ ID NO: 215476 - DNA, 3114 bp, Zea Mays
ccactctcgccgcactcacccggagtcggagcggagcatccgatcctccaccagtccaccaccgagtgcactcagccacacaccagctgttgtgccctgtgcggcgctctactgagcgatacgcggacttggcggcggccatgccactctcggagccgtcggcgccggccgtgctcgcggcgctgccgcgggcgctctccctcgcggccgcggccgtcgcggccgcaaccgcgaccctcctcctcatctccgccgtcttctccaccccccaccacgcggcgtcctcctcgtcccctcagctttccccgtccgccagcgcctccaccgcggcgcctgtggccccggcgcccgcacacgcgcccgactccggcccaggccacccccaccccccgcctcccgttcccccgtgccctcccaacgccacccacgacgtcccctgccacgagcctccctcgcgcgagcgccactgccccccgcgcccgccgccgccgccgcctcttcttcctcacccgccaaaggacccgccgccgcaccctccgccgcactgccgcgtcccgccgccgcccaggtaccgcccgcccccgccgtggcccgcgcgccgcgaccgcgcgaggtacgccaacgtggacctcccgccgctgcccccggttaaggcggcggatggacagcagcaggaccccgttcacggtcgcggggagtggctgctgttcaccgacggggtgcagggttatgtcgagcggctggagcgcgtcgtgccgctccgcgacggcgtggtgcacacggcgctcgacatcggatgcggggtgtgttgtactcgcatcgcatgaaagcttgccgattcagaaactactcgttggaagtctctctgttcacgtgtcgatgtgtgtccctgacaggtcgcgagctttggggactatctgctcaactatggcgtactgaccatgtccattgctccgagggatagatttgaaccgcaggtgcagctcgccttggagcgtggactgcctgcaatgatcggagcgcttgttgcccacaggctaccgtatccatcgaggtccttcgacatggtgcactgtgcggactgccgtgtcccatggactgctcatgatgggctctacatgctggaaatcgaccgtcttctccaacctggtggctattgggttttctctaagccacccgtcaactggaaatctacatacaacatttcgaatcaagggaccatagacaagcaggacaatcaagtagctatggatgacatgtcgaaaaggcttcgttggacgaaggtgtctgaagagggcacaatttctgtttggagaaagccttcttgtaatctccattgcgaccaagaagcaaatgcaaagcttgctggattgccaccactctgcacaggagaagacccagatagtgcctggtatgcgaatatttcgacagtacaatcttgctaaatataacttttgttacggtgcaggtatgcaaatatttcaatgtgtatgacatgtattccaagagctgaaacttttaatggctgtgctggtggtgccatgaaaaaatggcctaaaagacttggtgcagtgccaccaaggatagccagtggggaaatcgagtggctgtccattcagagatatagatacgacactctggtttgggagaaaagggttaacttctatctcacgtatctaaattttttgtctaatggaacctacagaaatgtcatggacatgagtgccggttctggtggctttgccgctgctatgtccaagcatcctgtctgggtcatgaatgtggttcctgcaaatacgacagagaacgcccttggtgtcatctatgagcgtggtttgattggaacatacactgactggtgcgaggccttctctacttatccacgaacatacgatctgatacatggtaatggaatcttcagctcccatattcacaagtaagtgacccgctaacttggcgatgttaaaaagccactgaaagagaacaacaaaaggcatagactgcgatctgcgaagcaagtgaacaattcaagtagcacacactagtcccttgcagttaaattaagtcccggctcagccatccatcttgacacgaaactattctctgtcaggtgtgggattatcgacatcctggttgagatggatcgtattctccggccagggggtgccgtcatagttcgggacagagccgacgtcgttctcagagtcaagaaggacgccgaccgtctacgatggcatagccgagttgtcgacactgaaaatgggcctctggatccagagaagctcctcattgtggacaattccctgccactcccagggagctgaatagaagtgagagcactagcaagaacccgcaggatcagatcaggcttctaggtgacggtctgctcatgtttcgggaaagagccggtggtctggtctgcgaccttactacctgttacagtatgtcttttcggtttaagaagatctcactacatgtgcagcagaggtacagatgaagggtctacaggcgactgggatgtttattacatgtacagacaggtgttggagaaacaaaatgctacgtattacctttacagaggaagggttcaaggctattggctatcgtacagcgagagattcagaattgcatgcaggtgtacctacatatatgaccagtggtccaatatattggagtcagtgacgactccagtggatgccatttcttagctccaatatgatatgcagcctgatttctcatgctcgaacgactagctgtgcagttagaactatccggtctcgattctgtagagtatgtctacgttgagtgtacctttttttttggtaaatccattcatgtacatttgtataggttgttgtattgtagatcttgtgagctgtgttgtttggtcgctaagcaatctacggcgtattatactgcggcatagagtgtacaggggaggccagattacacctgtgtctgtgtgtgtctctgtccttccaactttcccggttcaggctgcggtgccgagagtgggattgtgttatttggggtgttgtacaagccaagtgaatgtgcagatcgagtatggacatgatttctttcttatacagtggccgttgtcataattttcac

SEQ ID NO: 215477 - DNA, 2676 bp, Zea Mays
ctcacccggagtcggagcggagcatccgatcctccaccagtccaccaccgagtgcactcagccacacaccagctgttgtgccctgtgcggcgctctactgagcgatacgcggacttggcggcggccatgccactctcggagccgtcggcgccggccgtgctcgcggcgctgccgcgggcgctctccctcgcggccgcggccgtcgcggccgcaaccgcgaccctcctcctcatctccgccgtcttctccaccccccaccacgcggcgtcctcctcgtcccctcagctttccccgtccgccagcgcctccaccgcggcgcctgtggccccggcgcccgcacacgcgcccgactccggcccaggccacccccaccccccgcctcccgttcccccgtgccctcccaacgccacccacgacgtcccctgccacgagcctccctcgcgcgagcgccactgccccccgcgcccgccgccgccgccgcctcttcttcctcacccgccaaaggacccgccgccgcaccctccgccgcactgccgcgtcccgccgccgcccaggtaccgcccgcccccgccgtggcccgcgcgccgcgaccgcgcgaggtacgccaacgtggacctcccgccgctgcccccggttaaggcggcggatggacagcagcaggaccccgttcacggtcgcggggagtggctgctgttcaccgacggggtgcagggttatgtcgagcggctggagcgcgtcgtgccgctccgcgacggcgtggtgcacacggcgctcgacatcggatgcggggtcgcgagctttggggactatctgctcaactatggcgtactgaccatgtccattgctccgagggatagatttgaaccgcaggtgcagctcgccttggagcgtggactgcctgcaatgatcggagcgcttgttgcccacaggctaccgtatccatcgaggtccttcgacatggtgcactgtgcggactgccgtgtcccatggactgctcatgctgattccagatgggctctacatgctggaaatcgaccgtcttctccaacctggtggctattgggttttctctaagccacccgtcaactggaaatctacatacaacatttcgaatcaagggaccatagacaagcaggacaatcaagtagctatggatgacatgtcgaaaaggcttcgttggacgaaggtgtctgaagagggcacaatttctgtttggagaaagccttcttgtaatctccattgcgaccaagaagcaaatgcaaagcttgctggattgccaccactctgcacaggagaagacccagatagtgcctggtatgcaaatatttcaatgtgtatgacatgtattccaagagctgaaacttttaatggctgtgctggtggtgccatgaaaaaatggcctaaaagacttggtgcagtgccaccaaggatagccagtggggaaatcgagtggctgtccattcagagatatagatacgacactctggtttgggagaaaagggttaacttctatctcacgtatctaaattttttgtctaatggaacctacagaaatgtcatggacatgagtgccggttctggtggctttgccgctgctatgtccaagcatcctgtctgggtcatgaatgtggttcctgcaaatacgacagagaacgcccttggtgtcatctatgagcgtggtttgattggaacatacactgactggtgcgaggccttctctacttatccacgaacatacgatctgatacatggtaatggaatcttcagctcccatattcacaagtgtgggattatcgacatcctggttgagatggatcgtattctccggccagggggtgccgtcatagttcgggacagagccgacgtcgttctcagagtcaagaaggacgccgaccgtctacgatggcatagccgagttgtcgacactgaaaatgggcctctggatccagagaagctcctcattgtggacaattccctgccactcccagggagctgaatagaagtgagagcactagcaagaacccgcaggatcagatcaggcttctagaggtacagatgaagggtctacaggcgactgggatgtttattacatgtacagacaggtgttggagaaacaaaatgctacgtattacctttacagaggaagggttcaaggctattggctatcgtacagcgagagattcagaattgcatgcaggtgtacctacatatatgaccagtggtccaatatattggagtcagtgacgactccagtggatgccatttcttagctccaatatgatatgcagcctgatttctcatgctcgaacgactagctgtgcagttagaactatccggtctcgattctgtagagtatgtctacgttgagtgtacctttttttttggtaaatccattcatgtacatttgtataggttgttgtattgtagatcttgtgagctgtgttgtttggtcgctaagcaatctacggcgtattatactgcggcatagagtgtacaggggaggccagattacacctgtgtctgtgtgtgtctctgtccttccaactttcccggttcaggctgcggtgccgagagtgggattgtgttatttggggtgttgtacaagccaagtgaatgtgcagatcgagtatggacatgatttctttcttatacagtggccgttgtcataattttcac

SEQ ID NO: 215478 - DNA, 1271 bp, Zea Mays
ttttatgtcaactaactaaattattgatttagaaagccttttagagaactactggagttgctcttagggcctgtagctattccctaaagggctccttgtaccttttctttcgtgtgtcttaatcctcttcagttgtacattacagtttactccacagctgataagataaatgcattttttcccttattacttcaggcaaggaaatcaagtgcagaaaacggcatagaagaaagcagtatgtggatcaagagccatgcattatgaggggggtttatttcaaaaatatgaaatggcaggctgccataaaagttgacagaaacagattcacttgggtactgttgggacacaggacgaagcagcccggctttatgatagggctgcttttatgtgtggaagggagccaaacttcgtgctttctgaggaagagaagcaggagctacggaggtacacctgggaggacttcttagcagtgactcgcaacacgataaccagcaaaaaacaaaggaaagtcggatcactaaggcgtagcaaggcagacctgttcatgggacagagtgacggcgacaccgagatggccaatggtggcggttcatcgaattccgacaatggcgacgcggggacgtcggcgtcatagatcgctcccaggggttctgccgttgtggcaactcaaagtggagtcctccagcacattcatcccggtcatgcatgatacgagctccgtctaggattttgttctctcaataattaatttccatgtgcataaggccccgttggtctaatcaaatcaaaggttagggaaaccatgccatctcagacgagaattagaggtggtccattgttagaaaacagttcatctgaatagtaatgtataccggttctgaaaactgtgtatatctaccgataggttcaccttacattttgcccagtgtaattagtttaccttataatttaccaaaaaggaataatttttccctttccgttaataccatctctatactagtgggaagaaaatctgcctggaactctgagagtcgtcttttcagtttacaagtttcgaattgatgctgtatcttttttgagtgtattgacccagcttgaggtatgcttgaagttggaaagaagaaacgcacaataaaaggtcatgcagtgtaccagaaattcagttgactacagaatccaccatacacacgagatgccatacacgtccttgtctgagtagggatggcaatttgatttatggatttcgatatccatctgttatccaacctgac

SEQ ID NO: 215479 - DNA, 4382 bp, Zea Mays
gtttcttcatgaggcctccctgcatgaataaaagtttcaagtttccaaggtattatggaaaatgttactaaaaaataacagagaacaattgaaacaatcaaaagtgtatatttatgagagactatccttcggtagaagtagtggaaaatacatgccctattcaaaagttgactcctttctaaaggtatggatctttgcacattttccttctagacgattcggttctattaatatatttttgagcgaaattcttgattttaacttcatgtgttcaatatttttgttaacttgaagtgcattaattttggtaaaagtgaacaaatacaaatctttcaaaacatttttcccatttgaggagcttgaatgaagctttctttccacgaatgcgtacgaagcatattcctagcatgaattccgttgcaagtagccagtctgatgagtttgatccgtgtaaattgtctgtggtgcatgaaatgctctgtcaatacttgtgcatgaggaaatctaaaaaaactactattgaatctgctagtgatggtgttttgtactacttccttgtgagttacatgtgctctactgactaacattgctgcaatgaaactgaagaagcattagctatagctacaaatctgtcgacctttgcctttttgctctgaacttccctgttttttccatgcttatctacctattttagatcaactgtattctgtacaagctcctagtaaaaagttgtactccctctagtaaaaaaaattacttgactcatttgactttgcacgatcttcgatgatatctttggccactaatttcttctgaaatatatcgcaaatttatgtgcttttgtaattattcttcaactcactttttatacatataactcacatgtttttcaaactaaatttttgtgttttaagctttgactagatattgtcctaaatgacatgctctgatgacggaactggtaacatacataaattggattaaattcgtttctgtgataagaataggtgcaggatcttgcttagtgtcctaatcctgcataaagccaacttttaggtgaagaaaacacccaacaaaaatattccaatggtgctaagtttggacctggtggaaatttaactgctgcaagataatggtctctcttgtatacccatggcctagacctagaagcatggcagacatagatgtgttggtgcatttatgttttcttcctacactacattggtatatttggttgatactaaaagtcttgaagcacgaagcagtcacatatactttactggcttagtttacatttcttctgaaacggttgcttgagaattagtaatctctgttcttttcagatatgtcaaatccttgggttagctggaattgatctgtttaccccttctgatgtggtcgaaaaaagaaatgttcggaaagtctgtatatgcatacgatcggtgtctaaaaagtcactcatcttgcacctaaatgtgcctgattttgatgtagtcacctacacaatatccatgccaaactatgttgttggaggtattcgtagaaatctggagcagacacagtacagctcatccagttcaagtggatacagtccatgtgcccgttctaaagtactacagcaacagaatgaccagcacgaggacacacattatgactctgatgaagcagaaagcaaactctctcttctagaacctgaggactcagttaatgaagataattttgcggctgtgctttcacaatttaacgatgcccacaacaaaggaagtgaaggctatggagaaagtggatgtggcaagcatggagaaaaatctctagctgaatcagtgggatcacttaacattggcattattgattttgagttcatggattcaactcctctaattcatgataaagaatcatgttctctcctagaacctgaggactcagttaatgaagataattttgcagctgttctttcaaaatttaatgatgctcccaacaaagaaagcaaaggctatggagaaagtggacgtggcaagcatggagaaaaatctctagctgaatcagtgggatcacttaacattggcattgttgactctgagttcatggattcaagtcctctaattcatgataaagaatcatgttctcctctagaacctgagggctccgttaatgaagataattttacagctgtgctttcacagtttaacgatgcccccaacaaagaaagtgaaggctatggagaaagtggatgtggtaagcatggagaaaaatctctagttgaatcagtgggatcacttaacattggcattgttgattctgagttcatggattcaagtcctctaattcatgataaagaatcatgttctcctctagaacctgaggactcagttaatgaagataattttgcagctgtgctttcacaatttaatgatgcccccaacaaagaaagcgaaggctatggagaaagtggacgtggcaagcatggagaaaaatctctagctgaatcagtgggatcacttaacattggcattattgattctgagttcatggattcaagtcctctaattcatgataaagaatcatgttttcctctagaacctgagggctccgttaatgaagataattttacagctgtgctttcacaatttaacgatgcccccaacaaagaaagtgaaggctatggagaaagtggatgtggtaagcatggagaaaaatctctagttgaatcagtgggatcacttaacattggcattgttgattctgagttcatggattcaagtcctctaattcatgataaagaatcatgttctcctctagaacctgaggactccgttaatgaagataattttacagctgtgctttcacaatttaacgatgcccccaacaaagaaagtgaagcctatggagaaagtggatgtggtaagcatggagaaaactctctagatgaatcagtgggatcacttaacattggcgttattgattctgagttcatggattcaagtcctctaattcatgataaagaatcatgttctcctctagaacctgaggactccgttaatgaagataattttgcagctgtgctttcacaatatagcgatggccccaacgaaggaaatgaaggatatggagaaagtggacattacaagcatgaagaaaagtctctagatgaatcagtgggatcactaaccattggcattattgattctgagttcatggattcaagtcgtccaattcatgataaagaatcatgttctactggttctgcagctgaccaatgttcaaggactataccggctaaatatgaattaagttcagaagagtcagattccacaggcagtcatttggtgtttgacagtggcaagaattatctggagttgaacaatcattctgtcacagatttggaaaggatttacaatggacatgccacgtctgtagatcaatatgttcggggaaatggggagacattagctgaccatccaaaaaaagaggaagctggcctccaaaaggacactggcaccatagctcaacatcgtgatacccttgcttgtgatggggagtctgtgtgttcgagttgtgaagagccgagacgtggattaaatggcgagccatcagacttcagctcggagtcacactcgagactgaccccaacacataacacaggtggcaaattgtcgatggtttctgaacatccagtgcataatatggagtcagatatgactgggatggcaagtgatagcactaacccggagctgaatcctgaagccagcaccaggaacgaaatggacggctcccgatccactgataacccagtggaaccagaaaacgtagctcaggacagcgccactcgaggaaggcctgaaggcgacgcccccagatcagggaaaggggttctgaggtcggtcgctggaggaatcacccttgtcggcgcagtgttcttcatgttccatctcagaagaagcaaggggggaagctttgcgacggtcataccatctctttcgggaaaatctgctcggagcaacgcaagggccaggaacatgggcagagaaaacgtccctgatgcgtatcccggggggcggctgaaggcttgacaagacgatggagcacagtctgcttcacagaatctggatgaactctgtcgacccaccagtcaagttgaagtcagtaccctgccttctttcatgtacagaacgacataatcatatgatttaggtgatcgattacagcaaatagtgggacagattttgtacaagtatagttgaggcatgaataaagtctagtttccaacctccaacgtttaaacctagacggtggttgaaaaccagaacggcgttgtgtttaagtcatcactaccctttcatcagtgggattatccacagaccacagatataatttatagagac

SEQ ID NO: 215480 - DNA, 3272 bp, Zea Mays
atcagtttcttcatgaggcctccctgcatgaataaaaatagttttggctctttgcaagtgtctacttgcttgagcattatgatgtcaatcaatcagataaaagaatgcctaggataaatggtttcaagtttccaaggtattatggaaaatgttactaaaaaataacagagaacaattgaaacaatcaaaagtgtatatttatgagagactatccttcggtagaagtagtggaaaatacatgccctattcaaaagttgactcctttctaaaggtgcctgattttgatgtagtcacctacacaatatccatgccaaactatgttgttggaggtattcgtagaaatctggagcagacacagtacagctcatccagttcaagtggatacagtccatgtgcccgttctaaagtactacagcaacaggcaggattttggaaagggttaattgtatttccacacttgtgcttaatgttagtcacttaatatatatttttctcagataatatttggagggcagaatgaccagcacgaggacacacattatgactctgatgaagcagaaagcaaactctctcttctagaacctgaggactcagttaatgaagataattttgcggctgtgctttcacaatttaacgatgcccacaacaaaggaagtgaaggctatggagaaagtggatgtggcaagcatggagaaaaatctctagctgaatcagtgggatcacttaacattggcattattgattttgagttcatggattcaactcctctaattcatgataaagaatcatgttctctcctagaacctgaggactcagttaatgaagataattttgcagctgttctttcaaaatttaatgatgctcccaacaaagaaagcaaaggctatggagaaagtggacgtggcaagcatggagaaaaatctctagctgaatcagtgggatcacttaacattggcattgttgactctgagttcatggattcaagtcctctaattcatgataaagaatcatgttctcctctagaacctgagggctccgttaatgaagataattttacagctgtgctttcacagtttaacgatgcccccaacaaagaaagtgaaggctatggagaaagtggatgtggtaagcatggagaaaaatctctagttgaatcagtgggatcacttaacattggcattgttgattctgagttcatggattcaagtcctctaattcatgataaagaatcatgttctcctctagaacctgaggactcagttaatgaagataattttgcagctgtgctttcacaatttaatgatgcccccaacaaagaaagcgaaggctatggagaaagtggacgtggcaagcatggagaaaaatctctagctgaatcagtgggatcacttaacattggcattattgattctgagttcatggattcaagtcctctaattcatgataaagaatcatgttttcctctagaacctgagggctccgttaatgaagataattttacagctgtgctttcacaatttaacgatgcccccaacaaagaaagtgaaggctatggagaaagtggatgtggtaagcatggagaaaaatctctagttgaatcagtgggatcacttaacattggcattgttgattctgagttcatggattcaagtcctctaattcatgataaagaatcatgttctcctctagaacctgaggactccgttaatgaagataattttacagctgtgctttcacaatttaacgatgcccccaacaaagaaagtgaagcctatggagaaagtggatgtggtaagcatggagaaaactctctagatgaatcagtgggatcacttaacattggcgttattgattctgagttcatggattcaagtcctctaattcatgataaagaatcatgttctcctctagaacctgaggactccgttaatgaagataattttgcagctgtgctttcacaatatagcgatggccccaacgaaggaaatgaaggatatggagaaagtggacattacaagcatgaagaaaagtctctagatgaatcagtgggatcactaaccattggcattattgattctgagttcatggattcaagtcgtccaattcatgataaagaatcatgttctactggttctgcagctgaccaatgttcaaggactataccggctaaatatgaattaagttcagaagagtcagattccacaggcagtcatttggtgtttgacagtggcaagaattatctggagttgaacaatcattctgtcacagatttggaaaggatttacaatggacatgccacgtctgtagatcaatatgttcggggaaatggggagacattagctgaccatccaaaaaaagaggaagctggcctccaaaaggacactggcaccatagctcaacatcgtgatacccttgcttgtgatggggagtctgtgtgttcgagttgtgaagagccgagacgtggattaaatggcgagccatcagacttcagctcggagtcacactcgagactgaccccaacacataacacaggtggcaaattgtcgatggtttctgaacatccagtgcataatatggagtcagatatgactgggatggcaagtgatagcactaacccggagctgaatcctgaagccagcaccaggaacgaaatggacggctcccgatccactgataacccagtggaaccagaaaacgtagctcaggacagcgccactcgaggaaggcctgaaggcgacgcccccagatcagggaaaggggttctgaggtcggtcgctggaggaatcacccttgtcggcgcagtgttcttcatgttccatctcagaagaagcaaggggggaagctttgcgacggtcataccatctctttcgggaaaatctgctcggagcaacgcaagggccaggaacatgggcagagaaaacgtccctgatgcgtatcccggggggcggctgaaggcttgacaagacgatggagcacagtctgcttcacagaatctggatgaactctgtcgacccaccagtcaagttgaagtcagtaccctgccttctttcatgtacagaacgacataatcatatgatttaggtgatcgattacagcaaatagtgggacagattttgtacaagtatagttgaggcatgaataaagtctagtttccaacctccaacgtttaaacctagacggtggttgaaaaccagaacggcgttgtgtttaagtcatcactaccctttcatcagtgggattatccacagaccacagatataatttatagagac

SEQ ID NO: 215481 - DNA, 4824 bp, Zea Mays
gtgtgcttgcttggacctccgaccccctcgcggtttggtggagtggcttccgccgtgcctgctgttgagacacaaacaaagatctggcttggagaagttctacatcttaggtttggtgaagacgctttagttgctgatcttcttgctgacggagaattactgtaagatcagtttcttcatgaggcctccctgcatgaataaaaatagttttggctctttgcaagtgtctacttgcttgagcattatgatgtcaatcaatcagataaaagaatgcctaggataaatggtttgtgaaagaatagaactgttttatgattaattgtgtgcttctctctctgatatttactgtattctgctgacttgttatgtttgtgctattaggtttcaagtttccaaggtattatggaaaatgttactaaaaaataacagagaacaattgaaacaatcaaaagtgtatatttatgagagactatccttcggtagaagtagtggaaaatacatgccctattcaaaagttgactcctttctaaaggtatggatctttgcacattttccttctagacgattcggttctattaatatatttttgagcgaaattcttgattttaacttcatgtgttcaatatttttgttaacttgaagtgcattaattttggtaaaagtgaacaaatacaaatctttcaaaacatttttcccatttgaggagcttgaatgaagctttctttccacgaatgcgtacgaagcatattcctagcatgaattccgttgcaagtagccagtctgatgagtttgatccgtgtaaattgtctgtggtgcatgaaatgctctgtcaatacttgtgcatgaggaaatctaaaaaaactactattgaatctgctagtgatggtgttttgtactacttccttgtgagttacatgtgctctactgactaacattgctgcaatgaaactgaagaagcattagctatagctacaaatctgtcgacctttgcctttttgctctgaacttccctgttttttccatgcttatctacctattttagatcaactgtattctgtacaagctcctagtaaaaagttgtactccctctagtaaaaaaaattacttgactcatttgactttgcacgatcttcgatgatatctttggccactaatttcttctgaaatatatcgcaaatttatgtgcttttgtaattattcttcaactcactttttatacatataactcacatgtttttcaaactaaatttttgtgttttaagctttgactagatattgtcctaaatgacatgctctgatgacggaactggtaacatacataaattggattaaattcgtttctgtgataagaataggtgcaggatcttgcttagtgtcctaatcctgcataaagccaacttttaggtgaagaaaacacccaacaaaaatattccaatggtgctaagtttggacctggtggaaatttaactgctgcaagataatggtctctcttgtatacccatggcctagacctagaagcatggcagacatagatgtgttggtgcatttatgttttcttcctacactacattggtatatttggttgatactaaaagtcttgaagcacgaagcagtcacatatactttactggcttagtttacatttcttctgaaacggttgcttgagaattagtaatctctgttcttttcagatatgtcaaatccttgggttagctggaattgatctgtttaccccttctgatgtggtcgaaaaaagaaatgttcggaaagtctgtatatgcatacgatcggtgtctaaaaagtcactcatcttgcacctaaatgtgcctgattttgatgtagtcacctacacaatatccatgccaaactatgttgttggaggtattcgtagaaatctggagcagacacagtacagctcatccagttcaagtggatacagtccatgtgcccgttctaaagtactacagcaacaggcaggattttggaaagggttaattgtatttccacacttgtgcttaatgttagtcacttaatatatatttttctcagataatatttggagggcagaatgaccagcacgaggacacacattatgactctgatgaagcagaaagcaaactctctcttctagaacctgaggactcagttaatgaagataattttgcggctgtgctttcacaatttaacgatgcccacaacaaaggaagtgaaggctatggagaaagtggatgtggcaagcatggagaaaaatctctagctgaatcagtgggatcacttaacattggcattattgattttgagttcatggattcaactcctctaattcatgataaagaatcatgttctctcctagaacctgaggactcagttaatgaagataattttgcagctgttctttcaaaatttaatgatgctcccaacaaagaaagcaaaggctatggagaaagtggacgtggcaagcatggagaaaaatctctagctgaatcagtgggatcacttaacattggcattgttgactctgagttcatggattcaagtcctctaattcatgataaagaatcatgttctcctctagaacctgagggctccgttaatgaagataattttacagctgtgctttcacagtttaacgatgcccccaacaaagaaagtgaaggctatggagaaagtggatgtggtaagcatggagaaaaatctctagttgaatcagtgggatcacttaacattggcattgttgattctgagttcatggattcaagtcctctaattcatgataaagaatcatgttctcctctagaacctgaggactcagttaatgaagataattttgcagctgtgctttcacaatttaatgatgcccccaacaaagaaagcgaaggctatggagaaagtggacgtggcaagcatggagaaaaatctctagctgaatcagtgggatcacttaacattggcattattgattctgagttcatggattcaagtcctctaattcatgataaagaatcatgttttcctctagaacctgagggctccgttaatgaagataattttacagctgtgctttcacaatttaacgatgcccccaacaaagaaagtgaaggctatggagaaagtggatgtggtaagcatggagaaaaatctctagttgaatcagtgggatcacttaacattggcattgttgattctgagttcatggattcaagtcctctaattcatgataaagaatcatgttctcctctagaacctgaggactccgttaatgaagataattttacagctgtgctttcacaatttaacgatgcccccaacaaagaaagtgaagcctatggagaaagtggatgtggtaagcatggagaaaactctctagatgaatcagtgggatcacttaacattggcgttattgattctgagttcatggattcaagtcctctaattcatgataaagaatcatgttctcctctagaacctgaggactccgttaatgaagataattttgcagctgtgctttcacaatatagcgatggccccaacgaaggaaatgaaggatatggagaaagtggacattacaagcatgaagaaaagtctctagatgaatcagtgggatcactaaccattggcattattgattctgagttcatggattcaagtcgtccaattcatgataaagaatcatgttctactggttctgcagctgaccaatgttcaaggactataccggctaaatatgaattaagttcagaagagtcagattccacaggcagtcatttggtgtttgacagtggcaagaattatctggagttgaacaatcattctgtcacagatttggaaaggatttacaatggacatgccacgtctgtagatcaatatgttcggggaaatggggagacattagctgaccatccaaaaaaagaggaagctggcctccaaaaggacactggcaccatagctcaacatcgtgatacccttgcttgtgatggggagtctgtgtgttcgagttgtgaagagccgagacgtggattaaatggcgagccatcagacttcagctcggagtcacactcgagactgaccccaacacataacacaggtggcaaattgtcgatggtttctgaacatccagtgcataatatggagtcagatatgactgggatggcaagtgatagcactaacccggagctgaatcctgaagccagcaccaggaacgaaatggacggctcccgatccactgataacccagtggaaccagaaaacgtagctcaggacagcgccactcgaggaaggcctgaaggcgacgcccccagatcagggaaaggggttctgaggtcggtcgctggaggaatcacccttgtcggcgcagtgttcttcatgttccatctcagaagaagcaaggggggaagctttgcgacggtcataccatctctttcgggaaaatctgctcggagcaacgcaagggccaggaacatgggcagagaaaacgtccctgatgcgtatcccggggggcggctgaaggcttgacaagacgatggagcacagtctgcttcacagaatctggatgaactctgtcgacccaccagtcaagttgaagtcagtaccctgccttctttcatgtacagaacgacataatcatatgatttaggtgatcgattacagcaaatagtgggacagattttgtacaagtatagttgaggcatgaataaagtctagtttccaacctccaacgtttaaacctagacggtggttgaaaaccagaacggcgttgtgtttaagtcatcactaccctttcatcagtgggattatccacagaccacagatataatttatagagac

SEQ ID NO: 215482 - DNA, 3124 bp, Zea Mays
caggtgcagcagcggcagcgccgcgctcattccggcgcagcacgcgacacgcggcttctgcctcgcctccacggctgcagcccgcgccgcccaccccaggcgcgcgcgcacgcaaacggcaacgcgtgctcacgcatcctcctcctcccgccgctgaagtggagtagccgagtagcaaactacggcacacggccatgagcttgcacgccgcgcgcggcgggccgcacgaggatctgagctggagcgccatcgggcggcgggcaccccgtgacgtggtgacattcggtgatcgagaaggaggcggcgggatgaggagtgcgcagcaggggccgggggcggtgcgggtggacgaggcgtcgtccgcgtccaccttccgtgagctcgacgaggccttcctgcagacacaaacaaagatctggcttggagaagttctacatcttaggtttggtgaagacgctttagttgctgatcttcttgctgacggagaattactgtttcaagtttccaaggtattatggaaaatgttactaaaaaataacagagaacaattgaaacaatcaaaagtgtatatttatgagagactatccttcggtagaagtagtggaaaatacatgccctattcaaaagttgactcctttctaaagatatgtcaaatccttgggttagctggaattgatctgtttaccccttctgatgtggtcgaaaaaagaaatgttcggaaagtctgtatatgcatacgatcggtgtctaaaaagtcactcatcttgcacctaaatgtgcctgattttgatgtagtcacctacacaatatccatgccaaactatgttgttggaggtattcgtagaaatctggagcagacacagtacagctcatccagttcaagtggatacagtccatgtgcccgttctaaagtactacagcaacagaatgaccagcacgaggacacacattatgactctgatgaagcagaaagcaaactctctcttctagaacctgaggactcagttaatgaagataattttgcggctgtgctttcacaatttaacgatgcccatgcccccaacaaagaaagcgaaggctatggagaaagtggacgtggcaagcatggagaaaaatctctagctgaatcagtgggatcacttaacattggcattattgattctgagttcatggattcaagtcctctaattcatgataaagaatcatgttttcctctagaacctgagggctccgttaatgaagataattttacagctgtgctttcacaatttaacgatgcccccaacaaagaaagtgaaggctatggagaaagtggatgtggtaagcatggagaaaaatctctagttgaatcagtgggatcacttaacattggcattgttgattctgagttcatggattcaagtcctctaattcatgataaagaatcatgttctcctctagaacctgaggactccgttaatgaagataattttacagctgtgctttcacaatttaacgatgcccccaacaaagaaagtgaagcctatggagaaagtggatgtggtaagcatggagaaaactctctagatgaatcagtgggatcacttaacattggcgttattgattctgagttcatggattcaagtcctctaattcatgataaagaatcatgttctcctctagaacctgaggactccgttaatgaagataattttgcagctgtgctttcacaatatagcgatggccccaacgaaggaaatgaaggatatggagaaagtggacattacaagcatgaagaaaagtctctagatgaatcagtgggatcactaaccattggcattattgattctgagttcatggattcaagtcgtccaattcatgataaagaatcatgttctactggttctgcagctgaccaatgttcaaggactataccggctaaatatgaattaagttcagaagagtcagattccacaggcagtcatttggtgtttgacagtggcaagaattatctggagttgaacaatcattctgtcacagatttggaaaggatttacaatggacatgccacgtctgtagatcaatatgttcggggaaatggggagacattagctgaccatccaaaaaaagaggaagctggcctccaaaaggacactggcaccatagctcaacatcgtgatacccttgcttgtgatggggagtctgtgtgttcgagttgtgaagagccgagacgtggattaaatggcgagccatcagacttcagctcggagtcacactcgagactgaccccaacacataacacaggtggcaaattgtcgatggtttctgaacatccagtgcataatatggagtcagatatgactgggatggcaagtgatagcactaacccggagctgaatcctgaagccagcaccaggaacgaaatggacggctcccgatccactgataacccagtggaaccagaaaacgtagctcaggacagcgccactcgaggaaggcctgaaggcgacgcccccagatcagggaaaggggttctgaggtcggtcgctggaggaatcacccttgtcggcgcagtgttcttcatgttccatctcaggtgcggtaccatgcttgttagcactgctttccagattttcgctgcgaagtcacactgatacatcctctgagataatatccttcagtgccgcgctgctgcagaagaagcaaggggggaagctttgcgacggtcataccatctctttcgggaaaatctgctcggagcaacgcaagggccaggaacatgggcagagaaaacgtccctgatgcgtatcccggggggcggctgaaggcttgacaagacgatggagcacagtctgcttcacagaatctggatgaactctgtcgacccaccagtcaagttgaagtcagtaccctgccttctttcatgtacagaacgacataatcatatgatttaggtgatcgattacagcaaatagtgggacagattttgtacaagtatagttgaggcatgaataaagtctagtttccaacctccaacgtttaaacctagacggtggttgaaaaccagaacggcgttgtgtttaagtcatcactaccctttcatcagtgggattatccacagaccacagatataatttatagagac

SEQ ID NO: 215483 - DNA, 3349 bp, Zea Mays
caggtgcagcagcggcagcgccgcgctcattccggcgcagcacgcgacacgcggcttctgcctcgcctccacggctgcagcccgcgccgcccaccccaggcgcgcgcgcacgcaaacggcaacgcgtgctcacgcatcctcctcctcccgccgctgaagtggagtagccgagtagcaaactacggcacacggccatgagcttgcacgccgcgcgcggcgggccgcacgaggatctgagctggagcgccatcgggcggcgggcaccccgtgacgtggtgacattcggtgatcgagaaggaggcggcgggatgaggagtgcgcagcaggggccgggggcggtgcgggtggacgaggcgtcgtccgcgtccaccttccgtgagctcgacgaggccttcctgcagacacaaacaaagatctggcttggagaagttctacatcttaggtttggtgaagacgctttagttgctgatcttcttgctgacggagaattactgtttcaagtttccaaggtattatggaaaatgttactaaaaaataacagagaacaattgaaacaatcaaaagtgtatatttatgagagactatccttcggtagaagtagtggaaaatacatgccctattcaaaagttgactcctttctaaagatatgtcaaatccttgggttagctggaattgatctgtttaccccttctgatgtggtcgaaaaaagaaatgttcggaaagtctgtatatgcatacgatcggtgtctaaaaagtcactcatcttgcacctaaatgtgcctgattttgatgtagtcacctacacaatatccatgccaaactatgttgttggaggtattcgtagaaatctggagcagacacagtacagctcatccagttcaagtggatacagtccatgtgcccgttctaaagtactacagcaacaggcaggattttggaaagggttaattgtatttccacacttgtgcttaatgttagtcacttaatatatatttttctcagataatatttggagggcagaatgaccagcacgaggacacacattatgactctgatgaagcagaaagcaaactctctcttctagaacctgaggactcagttaatgaagataattttgcggctgtgctttcacaatttaacgatgcccacaacaaaggaagtgaaggctatggagaaagtggatgtggcaagcatggagaaaaatctctagctgaatcagtgggatcacttaacattggcattattgattttgagttcatggattcaactcctctaattcatgataaagaatcatgttctctcctagaacctgaggactcagttaatgaagataattttgcagctgttctttcaaaatttaatgatgctcccaacaaagaaagcaaaggctatggagaaagtggacgtggcaagcatggagaaaaatctctagctgaatcagtgggatcacttaacattggcattattgattctgagttcatggattcaagtcctctaattcatgataaagaatcatgttttcctctagaacctgagggctccgttaatgaagataattttacagctgtgctttcacaatttaacgatgcccccaacaaagaaagtgaaggctatggagaaagtggatgtggtaagcatggagaaaaatctctagttgaatcagtgggatcacttaacattggcattgttgattctgagttcatggattcaagtcctctaattcatgataaagaatcatgttctcctctagaacctgaggactccgttaatgaagataattttacagctgtgctttcacaatttaacgatgcccccaacaaagaaagtgaagcctatggagaaagtggatgtggtaagcatggagaaaactctctagatgaatcagtgggatcacttaacattggcgttattgattctgagttcatggattcaagtcctctaattcatgataaagaatcatgttctcctctagaacctgaggactccgttaatgaagataattttgcagctgtgctttcacaatatagcgatggccccaacgaaggaaatgaaggatatggagaaagtggacattacaagcatgaagaaaagtctctagatgaatcagtgggatcactaaccattggcattattgattctgagttcatggattcaagtcgtccaattcatgataaagaatcatgttctactggttctgcagctgaccaatgttcaaggactataccggctaaatatgaattaagttcagaagagtcagattccacaggcagtcatttggtgtttgacagtggcaagaattatctggagttgaacaatcattctgtcacagatttggaaaggatttacaatggacatgccacgtctgtagatcaatatgttcggggaaatggggagacattagctgaccatccaaaaaaagaggaagctggcctccaaaaggacactggcaccatagctcaacatcgtgatacccttgcttgtgatggggagtctgtgtgttcgagttgtgaagagccgagacgtggattaaatggcgagccatcagacttcagctcggagtcacactcgagactgaccccaacacataacacaggtggcaaattgtcgatggtttctgaacatccagtgcataatatggagtcagatatgactgggatggcaagtgatagcactaacccggagctgaatcctgaagccagcaccaggaacgaaatggacggctcccgatccactgataacccagtggaaccagaaaacgtagctcaggacagcgccactcgaggaaggcctgaaggcgacgcccccagatcagggaaaggggttctgaggtcggtcgctggaggaatcacccttgtcggcgcagtgttcttcatgttccatctcagtgccgcgctgctgcagaagaagcaaggggggaagctttgcgacggtcataccatctctttcgggaaaatctgctcggagcaacgcaagggccaggaacatgggcagagaaaacgtccctgatgcgtatcccggggggcggctgaaggcttgacaagacgatggagcacagtctgcttcacagaatctggatgaactctgtcgacccaccagtcaagttgaagtcagtaccctgccttctttcatgtacagaacgacataatcatatgatttaggtgatcgattacagcaaatagtgggacagattttgtacaagtatagttgaggcatgaataaagtctagtttccaacctccaacgtttaaacctagacggtggttgaaaaccagaacggcgttgtgtttaagtcatcactaccctttcatcagtgggattatccacagaccacagatataatttatagagac

SEQ ID NO: 215484 - DNA, 4467 bp, Zea Mays
gggaagcgtgccaaacaacgagtcccgccccgcctgcaaaatccacggcgaaatttgaatcccttcgcacaacggctcagctctcattcttctcttccaccgaccacccgacaactctcacgtctcacaacaccaaagcatccgccagctactcctcctgctgcgatcaagccgctctcgaagcaagcagacgctcctccgatcctctctcttctccccgccgtgtcgtcaacaacctctctccctcctctcgctgcggtctcccccgctccgttactccgattccaccagcgacaggcgaactctgtgctgcatcgatctcaagtaacaccggcttgaggtcaggtcgcccgatcgaggatgggttctctcgccgatccgtacgcgctacgctgcgtctccgacctgcctccgccattccgctctatgttcaggttcagatacttcaattccttgcagagtgagtgcttccatgtatgtttcttctcggatgtgaacatggttatctcggcacctacggggagtgggaagaccgtactatttgaactctgcattctgaggctcctctcaaggttcctttcaccagattggaggttcaatttaaataaaggaactctgaaaacaatctacattgcaccgtcgaaggcgctggtacaggaaaagctgcgggactggaacatgaagctgggcccattagggatcaattgcttggagatgactggtgacggtgaattttgcaacactaaagccatccatgatgctgatttaatactcaccactcctgagaagttcgattctatgagtcgacatggtataaaaagtggtagattgggtttcttctgtgacattgctcttgtccttattgatgaagttcaccttctaaatgatccacgtggagctgcgttagaagcagttgtcagtaggataaaaatgctatcgcgacatgataacatgaaatcttttcctctggctaatgttcgattaatcgctgtttctgctactatccctaatattgaggacatagcacagtggctcttagcaccccgagaaggaatcaaaagatttggagaagaaatgaggccagtgaagttgacaaccaaggttatgctccagctaaaaatgactttctttttgagaggaaatataaatggaatatggattacagatatactgatgcaacattcaagggggaagtctgcacttattttctgttctacgagaaaaggtgcacaagaagcagcgcagtgcctttcacaaactggagcatcgcttggctattcgaatccatttatgaaatcaatgcagcagtatgaacatctaaaggcggcttccctaacctgtagtgacaagcaactgcaagcttgcatcatacatggagttggttttcataatggtggtctttgcttaaaagaccgaggtcttgttgaggggcttttcctcaagggtgatcttcaagttctatgcacaacaaatactttggcacatggcgtcaacttgcctgcacatacagttgtgataaagtcaacacagttcttcaacaaagagaagggcctatatgttgaatatgagagatccatggtgcttcagatgtgtgggagggctggacgtccaccattcgatgatactggaacaattataatcatgacaagaaaagaaacggttcatctatatgagaaccttctaaatggatgtgaaatggtggagtctcagttgctgtcatgtgcggtggagcatctaaatgcagaaatcgttcagttgacagtatctgacatcattctggcggttgagtggatcaagtgctcgtatttgtacatcagaataaggaagaatcctgagaactatggagttaagagggggactcctcaagatctccttgaaaagcaaattcaagatatatgtgtcgataagattcatgagttggtggagtatggactgatttggacagatgaaggagctttcgttttacaaccgctagaacctgggaggctgatggcaaaattctacctgaagtttgatacaatgaagcttatagtcaaagcttctggctattgcagtttggaagatttattgcatgtcatctgtcactctgcagagataacttggatccaactacgccgaaatgataagaagattctaaatgacataaacgctgacaaagatggtagacttctatttcatattgtcatgaagaatggaaaaaggaagaagcgtgttcagacaagagaagagaaaatattcttgctagcaaatgattgcttaactggagactctctaatccatgatttatccctcaaccaggaaacaaatgcaatatgctcaaatggatgtaggattgccaaatgcatgcgagaatattttatatacaaaaagaattacagatctgccattaattctatgatccttgcaaatagtctgcatcaaaagctttgggagagcagtccatttctgctgaaacaactgcctgggattggaattgtaacagcaaaggctctgaagactgctggagtttatagctttgagaccttggcaactgctgatgcaagaaagatagaattggccacagggcgcaattatccatttgggaatcatatcaaagaatcaatgtcatcattaccacccaaaattgacatacacatagaggaaactggaaacagacttgggaaatcgaccattactgtaacactaactcgtctatcacaggcagttaaatccagtaaacgcaactgtgctgacatggttgtggcctcagaggaagacaatgtgatcctctttcatgagaatataagcccatattctgtaaaagtttttgtgccatgcccccaaaatgcacgggtgactctgaaggttgatctaatatttgaagaatatgttggtcttgatgtccacaagaagcatgtagtaagcagggaagatggtttgtacgtgaccaaggagcatgggatagataaccttgaacctacgtacaatatcccttcagagatttgtttggttagctccaggacaactcgaacaagccgatctcaatctcacactgaacagaaccctctttccaaagaggtttatgtcatagaagatgatggcgctgctgtgagtgctgtcagtgctctcgagaaagctgatgatgcagtgggaaccataaaatttaacaacttggcttcactggaggtcccaagctttgatctactgcctgaagaagagtatggagctcctggaccagcagaggcagaatgcaaaggtgccacagacagcacgatttttgatcacatacgcaaaaagtccaaagacttccccactctgatgctatcaaaatccatggattgctcatatgaacctcttatactgaagaagatgaagatatcaagggaccagtttggagtaaagcatggttgtctgcatgcgggtgaggccaccacaatggattttgatcctgttgagcctagggtctctccaaccaatactgctgagaagttccgcgggatcctgggtagaagttcagaaaggagtcgcatgctgtttggaaaaatggatagcccgtttgagaagagcgagatgctgggcacgacgccagctgaaagttctcttcggttcgcgggtggaaaagacagctcactggagaagaacaagaccctgatcagaactccagctgaaaactctctccaaattgcagcacgtggaaaggagagcaaggtgagcaaggtgctgacaaatctagataaaagccctcttgggtttgcgggtggaaaggagagcaagatgagcaatgtaccgagcacttcagctgaaaactctctccagtttgcagctaggcgtgtcagatcatctgagaagagcaagatgctgacaactccatatgaaagctctcaagcgtttttgggcgaaaaggacagcccatcggagaaaagcaaaatccttattaatagtccagttgagtatcctttcaagaaaggaagtccaggtgaaaatcctttcaaaacatgtagtccagttgaaaactccctcaaatttgcagctcaacgtgacagcccatctgagaagaggaaatcctgcatcagcaatccccttccgcccttccagcaggctgttcaatgcacaaagcaagtaggagttgcaggtcaaccctttgatattaaggaatattgcaaggaaatattgaggagcagaaatgacagtcaaggaggcgatccttttgctggttacaagagtatcttttcttttctatgatctgctgaacagctagcaaatatgatcctgaacaatgtacattatgacactcaaataacagctagcaataatctttttcttgtcattgctgaccatcttctgcccaaagtaggaacataaaatgcatgtgatttggtcaaagtgtgtaaagagttgccccacaatttgtgtgttacatcactttattgtgccccaccaagcccttgtacatggtatttctttacactaattgttggcgccgatccg

SEQ ID NO: 215485 - DNA, 4155 bp, Zea Mays
ctcaagtaacaccggcttgaggtcaggtcgcccgatcgaggatgggttctctcgccgatccgtacgcgctacgctgcgtctccgacctgcctccgccattccgctctatgttcaggttcagatacttcaattccttgcagagtgagtgcttccatgtatgtttcttctcggatgtgaacatggttatctcggcacctacggggagtgggaagaccgtactatttgaactctgcattctgaggctcctctcaaggttcctttcaccagattggaggttcaatttaaataaaggaactctgaaaacaatctacattgcaccgtcgaaggcgctggtacaggaaaagctgcgggactggaacatgaagctgggcccattagggatcaattgcttggagatgactggtgacggtgaattttgcaacactaaagccatccatgatgctgatttaatactcaccactcctgagaagttcgattctatgagtcgacatggtataaaaagtggtagattgggtttcttctgtgacattgctcttgtccttattgatgaagttcaccttctaaatgatccacgtggagctgcgttagaagcagttgtcagtaggataaaaatgctatcgcgacatgataacatgaaatcttttcctctggctaatgttcgattaatcgctgtttctgctactatccctaatattgaggacatagcacagtggctcttagcaccccgagaaggaatcaaaagatttggagaagaaatgaggccagtgaagttgacaaccaaggtctttggttatgctccagctaaaaatgactttctttttgagaggaaatataaatggaatatggattacagatatactgatgcaacattcaagggggaagtctgcacttattttctgttctacgagaaaaggtgcacaagaagcagcgcagtgcctttcacaaactggagcatcgcttggctattcgaatccatttatgaaatcaatgcagcagtatgaacatctaaaggcggcttccctaacctgtagtgacaagcaactgcaagcttgcatcatacatggagttggttttcataatggtggtctttgcttaaaagaccgaggtcttgttgaggggcttttcctcaagggtgatcttcaagttctatgcacaacaaatactttggcacatggcgtcaacttgcctgcacatacagttgtgataaagtcaacacagttcttcaacaaagagaagggcctatatgttgaatatgagagatccatggtgcttcagatgtgtgggagggctggacgtccaccattcgatgatactggaacaattataatcatgacaagaaaagaaacggttcatctatatgagaaccttctaaatggatgtgaaatggtggagtctcagttgctgtcatgtgcggtggagcatctaaatgcagaaatcgttcagttgacagtatctgacatcattctggcggttgagtggatcaagtgctcgtatttgtacatcagaataaggaagaatcctgagaactatggagttaagagggggactcctcaagatctccttgaaaagcaaattcaagatatatgtgtcgataagattcatgagttggtggagtatggactgatttggacagatgaaggagctttcgttttacaaccgctagaacctgggaggctgatggcaaaattctacctgaagtttgatacaatgaagcttatagtcaaagcttctggctattgcagtttggaagatttattgcatgtcatctgtcactctgcagagataacttggatccaactacgccgaaatgataagaagattctaaatgacataaacgctgacaaagatggtagacttctatttcatattgtcatgaagaatggaaaaaggaagaagcgtgttcagacaagagaagagaaaatattcttgctagcaaatgattgcttaactggagactctctaatccatgatttatccctcaaccaggaaacaaatgcaatatgctcaaatggatgtaggattgccaaatgcatgcgagaatattttatatacaaaaagaattacagatctgccattaattctatgatccttgcaaatagtctgcatcaaaagctttgggagagcagtccatttctgctgaaacaactgcctgggattggaattgtaacagcaaaggctctgaagactgctggagtttatagctttgagaccttggcaactgctgatgcaagaaagatagaattggccacagggcgcaattatccatttgggaatcatatcaaagaatcaatgtcatcattaccacccaaaattgacatacacatagaggaaactggaaacagacttgggaaatcgaccattactgtaacactaactcgtctatcacaggcagttaaatccagtaaacgcaactgtgctgacatggttgtggcctcagaggaagacaatgtgatcctctttcatgagaatataagcccatattctgtaaaagtttttgtgccatgcccccaaaatgcacgggtgactctgaaggttgatctaatatttgaagaatatgttggtcttgatgtccacaagaagcatgtagtaagcagggaagatggtttgtacgtgaccaaggagcatgggatagataaccttgaacctacgtacaatatcccttcagagatttgtttggttagctccaggacaactcgaacaagccgatctcaatctcacactgaacagaaccctctttccaaagaggtttatgtcatagaagatgatggcgctgctgtgagtgctgtcagtgctctcgagaaagctgatgatgcagtgggaaccataaaatttaacaacttggcttcactggaggtcccaagctttgatctactgcctgaagaagagtatggagctcctggaccagcagaggcagaatgcaaaggtgccacagacagcacgatttttgatcacatacgcaaaaagtccaaagacttccccactctgatgctatcaaaatccatggattgctcatatgaacctcttatactgaagaagatgaagatatcaagggaccagtttggagtaaagcatggttgtctgcatgcgggtgaggccaccacaatggattttgatcctgttgagcctagggtctctccaaccaatactgctgagaagttccgcgggatcctgggtagaagttcagaaaggagtcgcatgctgtttggaaaaatggatagcccgtttgagaagagcgagatgctgggcacgacgccagctgaaagttctcttcggttcgcgggtggaaaagacagctcactggagaagaacaagaccctgatcagaactccagctgaaaactctctccaaattgcagcacgtggaaaggagagcaaggtgagcaaggtgctgacaaatctagataaaagccctcttgggtttgcgggtggaaaggagagcaagatgagcaatgtaccgagcacttcagctgaaaactctctccagtttgcagctaggcgtgtcagatcatctgagaagagcaagatgctgacaactccatatgaaagctctcaagcgtttttgggcgaaaaggacagcccatcggagaaaagcaaaatccttattaatagtccagttgagtatcctttcaagaaaggaagtccaggtgaaaatcctttcaaaacatgtagtccagttgaaaactccctcaaatttgcagctcaacgtgacagcccatctgagaagaggaaatcctgcatcagcaatccccttccgcccttccagcaggctgttcaatgcacaaagcaagtaggagttgcaggtcaaccctttgatattaaggaatattgcaaggaaatattgaggagcagaaatgacagtcaaggaggcgatccttttgctggttacaagagtatcttttcttttctatgatctgctgaacagctagcaaatatgatcctgaacaatgtacattatgacactcaaataacagctagcaataatctttttcttgtcattgctgaccatcttctgcccaaagtaggaacataaaatgcatgtgatttggtcaaagtgtgtaaagagttgccccacaatttgtgtgttacatcactttattgtgccccaccaagcccttgtacatggtatttctttacactaattgttggcgccgatccg

SEQ ID NO: 215486 - DNA, 2732 bp, Zea Mays
agtgccgccagcgctgcaacatgatcttgagacagctgcttggtgaagagcttgctgtattcttctagcgcctccagcctaactgagatttgttcgtccaccagtcccatgtggcggagcaaacccacccgcacttgctcatcagaggaaatattactgtgttgattccttcagaacattttggtaatgacatgaatacaccttttctctgtcctcccaactctgaggttgggcatacagaacctgggaggctgatggcaaaattctacctgaagtttgatacaatgaagcttatagtcaaagcttctggctattgcagtttggaagatttattgcatgtcatctgtcactctgcagagataacttggatccaactacgccgaaatgataagaagattctaaatgacataaacgctgacaaagatggtagacttctatttcatattgtcatgaagaatggaaaaaggaagaagcgtgttcagacaagagaagagaaaatattcttgctagcaaatgattgcttaactggagactctctaatccatgatttatccctcaaccaggaaacaaatgcaatatgctcaaatggatgtaggattgccaaatgcatgcgagaatattttatatacaaaaagaattacagatctgccattaattctatgatccttgcaaatagtctgcatcaaaagctttgggagagcagtccatttctgctgaaacaactgcctgggattggaattgtaacagcaaaggctctgaagactgctggagtttatagctttgagaccttggcaactgctgatgcaagaaagatagaattggccacagggcgcaattatccatttgggaatcatatcaaagaatcaatgtcatcattaccacccaaaattgacatacacatagaggaaactggaaacagacttgggaaatcgaccattactgtaacactaactcgtctatcacaggcagttaaatccagtaaacgcaactgtgctgacatggttgtggcctcagaggaagacaatgtgatcctctttcatgagaatataagcccatattctgtaaaagtttttgtgccatgcccccaaaatgcacgggtgactctgaaggttgatctaatatttgaagaatatgttggtcttgatgtccacaagaagcatgtagtaagcagggaagatggtttgtacgtgaccaaggagcatgggatagataaccttgaacctacgtacaatatcccttcagagatttgtttggttagctccaggacaactcgaacaagccgatctcaatctcacactgaacagaaccctctttccaaagaggtttatgtcatagaagatgatggcgctgctgtgagtgctgtcagtgctctcgagaaagctgatgatgcagtgggaaccataaaatttaacaacttggcttcactggaggtcccaagctttgatctactgcctgaagaagagtatggagctcctggaccagcagaggcagaatgcaaaggtgccacagacagcacgatttttgatcacatacgcaaaaagtccaaagacttccccactctgatgctatcaaaatccatggattgctcatatgaacctcttatactgaagaagatgaagatatcaagggaccagtttggagtaaagcatggttgtctgcatgcgggtgaggccaccacaatggattttgatcctgttgagcctagggtctctccaaccaatactgctgagaagttccgcgggatcctgggtagaagttcagaaaggagtcgcatgctgtttggaaaaatggatagcccgtttgagaagagcgagatgctgggcacgacgccagctgaaagttctcttcggttcgcgggtggaaaagacagctcactggagaagaacaagaccctgatcagaactccagctgaaaactctctccaaattgcagcacgtggaaaggagagcaaggtgagcaaggtgctgacaaatctagataaaagccctcttgggtttgcgggtggaaaggagagcaagatgagcaatgtaccgagcacttcagctgaaaactctctccagtttgcagctaggcgtgtcagatcatctgagaagagcaagatgctgacaactccatatgaaagctctcaagcgtttttgggcgaaaaggacagcccatcggagaaaagcaaaatccttattaatagtccagttgagtatcctttcaagaaaggaagtccaggtgaaaatcctttcaaaacatgtagtccagttgaaaactccctcaaatttgcagctcaacgtgacagcccatctgagaagaggaaatcctgcatcagcaatccccttccgcccttccagcaggctgttcaatgcacaaagcaagtaggagttgcaggtcaaccctttgatattaaggaatattgcaaggaaatattgaggagcagaaatgacagtcaaggaggcgatccttttgctggttacaagagtatcttttcttttctatgatctgctgaacagctagcaaatatgatcctgaacaatgtacattatgacactcaaataacagctagcaataatctttttcttgtcattgctgaccatcttctgcccaaagtaggaacataaaatgcatgtgatttggtcaaagtgtgtaaagagttgccccacaatttgtgtgttacatcactttattgtgccccaccaagcccttgtacatggtatttctttacactaattgttggcgccgatccg

SEQ ID NO: 215487 - DNA, 2469 bp, Zea Mays
cccaactctgaggttgggcatacagaacctgggaggctgatggcaaaattctacctgaagtttgatacaatgaagcttatagtcaaagcttctggctattgcaggatccaactacgccgaaatgataagaagattctaaatgacataaacgctgacaaagatggtagacttctatttcatattgtcatgaagaatggaaaaaggaagaagcgtgttcagacaagagaagagaaaatattcttgctagcaaatgattgcttaactggagactctctaatccatgatttatccctcaaccaggaaacaaatgcaatatgctcaaatggatgtaggattgccaaatgcatgcgagaatattttatatacaaaaagaattacagatctgccattaattctatgatccttgcaaatagtctgcatcaaaagctttgggagagcagtccatttctgctgaaacaactgcctgggattggaattgtaacagcaaaggctctgaagactgctggagtttatagctttgagaccttggcaactgctgatgcaagaaagatagaattggccacagggcgcaattatccatttgggaatcatatcaaagaatcaatgtcatcattaccacccaaaattgacatacacatagaggaaactggaaacagacttgggaaatcgaccattactgtaacactaactcgtctatcacaggcagttaaatccagtaaacgcaactgtgctgacatggttgtggcctcagaggaagacaatgtgatcctctttcatgagaatataagcccatattctgtaaaagtttttgtgccatgcccccaaaatgcacgggtgactctgaaggttgatctaatatttgaagaatatgttggtcttgatgtccacaagaagcatgtagtaagcagggaagatggtttgtacgtgaccaaggagcatgggatagataaccttgaacctacgtacaatatcccttcagagatttgtttggttagctccaggacaactcgaacaagccgatctcaatctcacactgaacagaaccctctttccaaagaggtttatgtcatagaagatgatggcgctgctgtgagtgctgtcagtgctctcgagaaagctgatgatgcagtgggaaccataaaatttaacaacttggcttcactggaggtcccaagctttgatctactgcctgaagaagagtatggagctcctggaccagcagaggcagaatgcaaaggtgccacagacagcacgatttttgatcacatacgcaaaaagtccaaagacttccccactctgatgctatcaaaatccatggattgctcatatgaacctcttatactgaagaagatgaagatatcaagggaccagtttggagtaaagcatggttgtctgcatgcgggtgaggccaccacaatggattttgatcctgttgagcctagggtctctccaaccaatactgctgagaagttccgcgggatcctgggtagaagttcagaaaggagtcgcatgctgtttggaaaaatggatagcccgtttgagaagagcgagatgctgggcacgacgccagctgaaagttctcttcggttcgcgggtggaaaagacagctcactggagaagaacaagaccctgatcagaactccagctgaaaactctctccaaattgcagcacgtggaaaggagagcaaggtgagcaaggtgctgacaaatctagataaaagccctcttgggtttgcgggtggaaaggagagcaagatgagcaatgtaccgagcacttcagctgaaaactctctccagtttgcagctaggcgtgtcagatcatctgagaagagcaagatgctgacaactccatatgaaagctctcaagcgtttttgggcgaaaaggacagcccatcggagaaaagcaaaatccttattaatagtccagttgagtatcctttcaagaaaggaagtccaggtgaaaatcctttcaaaacatgtagtccagttgaaaactccctcaaatttgcagctcaacgtgacagcccatctgagaagaggaaatcctgcatcagcaatccccttccgcccttccagcaggctgttcaatgcacaaagcaagtaggagttgcaggtcaaccctttgatattaaggaatattgcaaggaaatattgaggagcagaaatgacagtcaaggaggcgatccttttgctggttacaagagtatcttttcttttctatgatctgctgaacagctagcaaatatgatcctgaacaatgtacattatgacactcaaataacagctagcaataatctttttcttgtcattgctgaccatcttctgcccaaagtaggaacataaaatgcatgtgatttggtcaaagtgtgtaaagagttgccccacaatttgtgtgttacatcactttattgtgccccaccaagcccttgtacatggtatttctttacactaattgttggcgccgatccg

SEQ ID NO: 215488 - DNA, 1728 bp, Zea Mays
tttgtcgttcttttggttctttcttccaggactcatgaattccacagcccatattctgtaaaagtttttgtgccatgcccccaaaatgcacgggtgactctgaaggttgatctaatatttgaagaatatgttggtcttgatgtccacaagaagcatgtagtaagcagggaagatggtttgtacgtgaccaaggagcatgggatagataaccttgaacctacgtacaatatcccttcagagatttgtttggttagctccaggacaactcgaacaagccgatctcaatctcacactgaacagaaccctctttccaaagaggtttatgtcatagaagatgatggcgctgctgtgagtgctgtcagtgctctcgagaaagctgatgatgcagtgggaaccataaaatttaacaacttggcttcactggaggtcccaagctttgatctactgcctgaagaagagtatggagctcctggaccagcagaggcagaatgcaaaggtgccacagacagcacgatttttgatcacatacgcaaaaagtccaaagacttccccactctgatgctatcaaaatccatggattgctcatatgaacctcttatactgaagaagatgaagatatcaagggaccagtttggagtaaagcatggttgtctgcatgcgggtgaggccaccacaatggattttgatcctgttgagcctagggtctctccaaccaatactgctgagaagttccgcgggatcctgggtagaagttcagaaaggagtcgcatgctgtttggaaaaatggatagcccgtttgagaagagcgagatgctgggcacgacgccagctgaaagttctcttcggttcgcgggtggaaaagacagctcactggagaagaacaagaccctgatcagaactccagctgaaaactctctccaaattgcagcacgtggaaaggagagcaaggtgagcaaggtgctgacaaatctagataaaagccctcttgggtttgcgggtggaaaggagagcaagatgagcaatgtaccgagcacttcagctgaaaactctctccagtttgcagctaggcgtgtcagatcatctgagaagagcaagatgctgacaactccatatgaaagctctcaagcgtttttgggcgaaaaggacagcccatcggagaaaagcaaaatccttattaatagtccagttgagtatcctttcaagaaaggaagtccaggtgaaaatcctttcaaaacatgtagtccagttgaaaactccctcaaatttgcagctcaacgtgacagcccatctgagaagaggaaatcctgcatcagcaatccccttccgcccttccagcaggctgttcaatgcacaaagcaagtaggagttgcaggtcaaccctttgatattaaggaatattgcaaggaaatattgaggagcagaaatgacagtcaaggaggcgatccttttgctggttacaagagtatcttttcttttctatgatctgctgaacagctagcaaatatgatcctgaacaatgtacattatgacactcaaataacagctagcaataatctttttcttgtcattgctgaccatcttctgcccaaagtaggaacataaaatgcatgtgatttggtcaaagtgtgtaaagagttgccccacaatttgtgtgttacatcactttattgtgccccaccaagcccttgtacatggtatttctttacactaattgttggcgccgatccg

SEQ ID NO: 215489 - DNA, 1192 bp, Zea Mays
aagcagggcacatgctgacatgccccgtgaccgtgccgttgtatcagaataatgccaaggagatggtaccttagcgtaaaccttctccagtcagcaattcgtgttcctgatgcgctggtcaacaccggtctggcgaagctgggctacgagtatgtcaacatagatgattgctgggcggagtctgacagggactaccagggaagcttcgttgcaaacagacaaaccttcccctctggcatcaaggcgctcgcggactacgtgcacgccaaggggctcaagcttggcatctacagcgatgctgggacacggacgtgcagccagaaaatgccagggtcacttgaccacgaggagcaggacgtgaagacattctcgtcctggggtatcgattatctgaaatacgacaactgcaacgacgccggcaggagcgtcatggagaggtatacgaagatgagcaacgctatgaagacgtatgggaagggcatcttcttctcgctgtgcgaatgggggaggcaaaaccctgctacctgggcaggcggcatggggaacagctggagaacgaccgatgatatcgccgacaactggggcagcatgacgtctcgtgcagaccagaacgacaggtgggcttcctacgccggacctggcgggtggaacgatcctgacatgcttgaggtgggcaacggcggcatgtccgaggcggagtaccgctctcacttcagcatctgggcgctcgccaaggctccgcttctgatcgggtgcgacgtgcgggcgatgagccagcagacgatgggcatactcagcaactcggaagtcatcgccgtgaaccaagatagccaaggtgcgcagggaaagaaagtgcagtccagcaatggcttggaggtttgggctgggccgctcagcaacaacaggaaggccgtggttctctggaaccggcagggataccaggcaaccatcaccgcgcagtggtcgagcatcgggctcgcttcttccactgctgtcactgctcgcgatctatgggcgcactcgtcgttctcggctcaaggccagctatcagcttcggtgccacctcacgactgcaagatgtatgtcttgacgccgaactagctcagaagacaagagcggattgttccatggcgcgtgggatgcaaccattcggtcaggattcagggaagaagagtatgcaggcaaggatttc

SEQ ID NO: 215490 - DNA, 2847 bp, Zea Mays
gcacgctccctcgcttccctgtccctgctcacctctgaacccaatctaaccgccgtccgccaccttcgcgcgcgaaaactccccccctcccattcgcgccgccgccgccgaccaccacccatcccggcgacaagggctccccatccggctgatccgtcaggaacctaatcttctcggcgcgagaaacgccgggcggggaacaaaggacaggaccccattccggtgcggcgggaccaatgggctccggcgaatagctcgagcacctcgagctcgccggaaacaaccgaggcggcgcggcgtctgttctccccggcgtgatggcgatgcaggggacaggcaacggatctccaagccgacccaacatttccgtgcccggtcgttgaacgcagcggtggtcccgtctcgtcctccaaggcattgggaacctgagaggcagaggctcggccagcgacggtgggtagcgaactggcgcctggttcccgggttgctattctccgggaggaggcgctcccgttgccatgggtgcgcggcggcggcttcgccagggctctggacggctccagctgctgttttccttcctcgtgctgctgctccaggcacaggccagcgtcggcgcggcttcgatcaacggtgaaggattggcgttgctggaactgaaggtgagggtggaagctgatccccatggcgtattccaggattgggaccccatggacagcagcccatgcagctggtctggcgtgcgatgctttgacgataaagtagagattctgaacttaacaggccggcaattggctggaactctcgcacccgagatcgggagcctccgaggtctaaaatcccttttacttccaaagaacaacttccgcgggcaaatccccagagaatttggagggctgtctgctctagaagtgctagatctgagcagcaacaacctggatggaacagttccagaagaactatgggctatgccactgctcaaacaactatcccttcatgataatcagctccaagaaggcgtccaagcaatagctgatgatcaggcaggatgcttgagcagaaaactagggtgctggtctttgctgtacaagtgggactttaaggattggatctctctcggtggtctccgagagaaagataacaccaatgtaccaaatttcagtgaggcagacgtaatgcataatttgcagtcatttgcaagtgtcatgcgccgcaggcttcttagtgaaaatgacaacctggctgctcttttgggaaatgatgacaaatcttctgatctgcaaaacctaaaagaaattcagagatctgttgacgtgaattctgtaggaagtggctcgttctctgcatttccgggaatatatggccaagctctggcacctttgcttcctgaagatattgatgctaccacagttcagcagctgtctacagatgtgacccagaccactaatgtagagatgtctggtacaacgtacagcaagtgggcatatattatcacaattcctgctgcaatattgctcattagtctcatagttctgattttggttttgcggaagcgagggcgtgcaccagtagccccttggaaaacagggctaagtggccctattcagaaggccctcgtaacaggtgcccaaaaactgaacagagctgaactcgaagttgcctgtgaagattttagcaacatcatcaatacttttcctacctgtactgtattcaagggcatattgtcaagcggggttgagattggtgttgtctccactaccatatcgtcgagcaaagactggtccaggagtgcggaatcatgcttcaagaaaaagatagatagactgtcaagggtcaaccacaagaacttcatcaacctccttggctattgcctagaaaatgagcctttcacgagaatgatggtgtttgagttcgctccacatggtagtctctcacagcaccttcacgtcaaagagtttgagcatctggactgggctgcgaggatgagggtcatcatgggcgtcgcatactgccttcaatacatgcaccatgagctcagtccacctatggcgatccacgacgtgcggtctgacacaaccttcatttcagatgattatgctgccaagattgcagatgttggtgtatggaacgagcttgctgccaaagcgaaggctggaaaggaggacggcagcagccgtgctgaagctcctccggatctcccaagcaacgcctactgcttcggcgcgctcatgatcgagaccatatccgggagggttcctgacccgcttctgagcatctgaaagacaagaactacggcaagctcgtggacgcgtcgctgaaggagcacaaggaaagcgagctggaggccgtctgcgaggtgatccaagagtgcatcgaccctgacccgacgcggcggccgtcgatgagagacgtcgtgggcaagctgcgagacgctctcggcatctcgcccgaggcggcggcgccgcggctgtcgccgctctggtgggcggagctggagctgctgtcggtgaagtcaacctagtgtggagaacgctgtgtatactgatactgtaccaacatgttccaacgctcctctagctgagctctaacaggattcgtataggggcttcaattcgtgctgctgatgctaccgacatttgtactggccgtaagcggtcgtaatttatgcagagagagagagagagagagagagagacgttgtgaaaaaatgcgattgatgatgtaactcatgtacatgctgatctttatcaaggaggggaaatacagtgacttgtataaatatctgtaatcccaaactcgtgtgactgtatagaaataaaacaaatagctggcgttcccagttgccactca

SEQ ID NO: 215491 - DNA, 2869 bp, Zea Mays
gcacgctccctcgcttccctgtccctgctcacctctgaacccaatctaaccgccgtccgccaccttcgcgcgcgaaaactccccccctcccattcgcgccgccgccgccgaccaccacccatcccggcgacaagggctccccatccggctgatccgtcaggaacctaatcttctcggcgcgagaaacgccgggcggggaacaaaggacaggaccccattccggtgcggcgggaccaatgggctccggcgaatagctcgagcacctcgagctcgccggaaacaaccgaggcggcgcggcgtctgttctccccggcgtgatggcgatgcaggggacaggcaacggatctccaagccgacccaacatttccgtgcccggtcgttgaacgcagcggtggtcccgtctcgtcctccaaggcattgggaacctgagaggcagaggctcggccagcgacggtgggtagcgaactggcgcctggttcccgggttgctattctccgggaggaggcgctcccgttgccatgggtgcgcggcggcggcttcgccagggctctggacggctccagctgctgttttccttcctcgtgctgctgctccaggcacaggccagcgtcggcgcggcttcgatcaacggattggcgttgctggaactgaaggtgagggtggaagctgatccccatggcgtattccaggattgggaccccatggacagcagcccatgcagctggtctggcgtgcgatgctttgacgataaagtagagattctgaacttaacaggccggcaattggctggaactctcgcacccgagatcgggagcctccgaggtctaaaatcccttttacttccaaagaacaacttccgcgggcaaatccccagagaatttggagggctgtctgctctagaagtgctagatctgagcagcaacaacctggatggaacagttccagaagaactatgggctatgccactgctcaaacaactatcccttcatgataatcagctccaagaaggcgtccaagcaatagctgatgatcaggcaggatgcttgagcagaaaactagggtgctggtctttgctgtacaagtgggactttaaggattggatctctctcggtggtctccgagagaaagataacaccaatgtaccaaatttcagtgaggcagacgtaatgcataatttgcagtcatttgcaagtgtcatgcgccgcaggcttcttagtgaaaatgacaacctggctgctcttttgggaaatgatgacaaatcttctgatctgcaaaacctaaaagaaattcagagatctgttgacgtgaattctgtaggaagtggctcgttctctgcatttccgggaatatatggccaagctctggcacctttgcttcctgaagatattgatgctaccacagttcagcagctgtctacagatgtgacccagaccactaatgtagagatgtctggtacaacgtacagcaagtgggcatatattatcacaattcctgctgcaatattgctcattagtctcatagttctgattttggttttgcggaagcgagggcgtgcaccagtagccccttggaaaacagggctaagtggccctattcagaaggccctcgtaacaggtgcccaaaaactgaacagagctgaactcgaagttgcctgtgaagattttagcaacatcatcaatacttttcctacctgtactgtattcaagggcatattgtcaagcggggttgagattggtgttgtctccactaccatatcgtcgagcaaagactggtccaggagtgcggaatcatgcttcaagaaaaagatagatagactgtcaagggtcaaccacaagaacttcatcaacctccttggctattgcctagaaaatgagcctttcacgagaatgatggtgtttgagttcgctccacatggtagtctctcacagcaccttcacgtcaaagagtttgagcatctggactgggctgcgaggatgagggtcatcatgggcgtcgcatactgccttcaatacatgcaccatgagctcagtccacctatggcgatccacgacgtgcggtctgacacaaccttcatttcagatgattatgctgccaagattgcagatgttggtgtatggaacgagcttgctgccaaagcgaaggctggaaaggaggacggcagcagccgtgctgaagctcctccggatctcccaagcaacgcctactgcttcggcgcgctcatgatcgagaccatatccgggagggttcctgacccgtatgatcacaaacccatatgcagctgggcttctgagcatctgaaagacaagaactacggcaagctcgtggacgcgtcgctgaaggagcacaaggaaagcgagctggaggccgtctgcgaggtgatccaagagtgcatcgaccctgacccgacgcggcggccgtcgatgagagacgtcgtgggcaagctgcgagacgctctcggcatctcgcccgaggcggcggcgccgcggctgtcgccgctctggtgggcggagctggagctgctgtcggtgaagtcaacctagtgtggagaacgctgtgtatactgatactgtaccaacatgttccaacgctcctctagctgagctctaacaggattcgtataggggcttcaattcgtgctgctgatgctaccgacatttgtactggccgtaagcggtcgtaatttatgcagagagagagagagagagagagagagacgttgtgaaaaaatgcgattgatgatgtaactcatgtacatgctgatctttatcaaggaggggaaatacagtgacttgtataaatatctgtaatcccaaactcgtgtgactgtatagaaataaaacaaatagctggcgttcccagttgccactca

SEQ ID NO: 215492 - DNA, 2856 bp, Zea Mays
gcacgctccctcgcttccctgtccctgctcacctctgaacccaatctaaccgccgtccgccaccttcgcgcgcgaaaactccccccctcccattcgcgccgccgccgccgaccaccacccatcccggcgacaagggctccccatccggctgatccgtcaggaacctaatcttctcggcgcgagaaacgccgggcggggaacaaaggacaggaccccattccggtgcggcgggaccaatgggctccggcgaatagctcgagcacctcgagctcgccggaaacaaccgaggcggcgcggcgtctgttctccccggcgtgatggcgatgcaggggacaggcaacggatctccaagccgacccaacatttccgtgcccggtcgttgaacgcagcggtggtcccgtctcgtcctccaaggcattgggaacctgagaggcagaggctcggccagcgacggtgggtagcgaactggcgcctggttcccgggttgctattctccgggaggaggcgctcccgttgccatgggtgcgcggcggcggcttcgccagggctctggacggctccagctgctgttttccttcctcgtgctgctgctccaggcacaggccagcgtcggcgcggcttcgatcaacggtgaaggattggcgttgctggaactgaaggtgagggtggaagctgatccccatggcgtattccaggattgggaccccatggacagcagcccatgcagctggtctggcgtgcgatgctttgacgataaagtagagattctgaacttaacaggccggcaattggctggaactctcgcacccgagatcgggagcctccgaggtctaaaatcccttttacttccaaagaacaacttccgcgggcaaatccccagagaatttggagggctgtctgctctagaagtgctagatctgagcagcaacaacctggatggaacagttccagaagaactatgggctatgccactgctcaaacaactctccaagaaggcgtccaagcaatagctgatgatcaggcaggatgcttgagcagaaaactagggtgctggtctttgctgtacaagtgggactttaaggattggatctctctcggtggtctccgagagaaagataacaccaatgtaccaaatttcagtgaggcagacgtaatgcataatttgcagtcatttgcaagtgtcatgcgccgcaggcttcttagtgaaaatgacaacctggctgctcttttgggaaatgatgacaaatcttctgatctgcaaaacctaaaagaaattcagagatctgttgacgtgaattctgtaggaagtggctcgttctctgcatttccgggaatatatggccaagctctggcacctttgcttcctgaagatattgatgctaccacagttcagcagctgtctacagatgtgacccagaccactaatgtagagatgtctggtacaacgtacagcaagtgggcatatattatcacaattcctgctgcaatattgctcattagtctcatagttctgattttggttttgcggaagcgagggcgtgcaccagtagccccttggaaaacagggctaagtggccctattcagaaggccctcgtaacaggtgcccaaaaactgaacagagctgaactcgaagttgcctgtgaagattttagcaacatcatcaatacttttcctacctgtactgtattcaagggcatattgtcaagcggggttgagattggtgttgtctccactaccatatcgtcgagcaaagactggtccaggagtgcggaatcatgcttcaagaaaaagatagatagactgtcaagggtcaaccacaagaacttcatcaacctccttggctattgcctagaaaatgagcctttcacgagaatgatggtgtttgagttcgctccacatggtagtctctcacagcaccttcacgtcaaagagtttgagcatctggactgggctgcgaggatgagggtcatcatgggcgtcgcatactgccttcaatacatgcaccatgagctcagtccacctatggcgatccacgacgtgcggtctgacacaaccttcatttcagatgattatgctgccaagattgcagatgttggtgtatggaacgagcttgctgccaaagcgaaggctggaaaggaggacggcagcagccgtgctgaagctcctccggatctcccaagcaacgcctactgcttcggcgcgctcatgatcgagaccatatccgggagggttcctgacccgtatgatcacaaacccatatgcagctgggcttctgagcatctgaaagacaagaactacggcaagctcgtggacgcgtcgctgaaggagcacaaggaaagcgagctggaggccgtctgcgaggtgatccaagagtgcatcgaccctgacccgacgcggcggccgtcgatgagagacgtcgtgggcaagctgcgagacgctctcggcatctcgcccgaggcggcggcgccgcggctgtcgccgctctggtgggcggagctggagctgctgtcggtgaagtcaacctagtgtggagaacgctgtgtatactgatactgtaccaacatgttccaacgctcctctagctgagctctaacaggattcgtataggggcttcaattcgtgctgctgatgctaccgacatttgtactggccgtaagcggtcgtaatttatgcagagagagagagagagagagagagagacgttgtgaaaaaatgcgattgatgatgtaactcatgtacatgctgatctttatcaaggaggggaaatacagtgacttgtataaatatctgtaatcccaaactcgtgtgactgtatagaaataaaacaaatagctggcgttcccagttgccactca

SEQ ID NO: 215493 - DNA, 1290 bp, Zea Mays
agcagatcgggtctgctccagatatatcatggcacgagcgagctcctcacgccaggtaatagcaaaggcacgtgtgccaattgtgaagtttgtggaaagaaagagtggaatagcttttgacatcagctttgatatagatggtggcccacaggcagcagatttcatcaaggatgctgtgaagaagttgcctgctttaagacctttatgtatgattctgaaagtttttctgcatcagagagagctcaacgaggtctataccggtggaattggatcatatgctcttcttacgatgttgattacacatttacagttggtctggggaggaaaagatattctcgggtatcatcggtccaaggagcacaatctgggaattcttttggtcaggttttttgatttttatggacgcaagttgaacaactgggatgtcggagtatcatgcaattcttcaaggacctttttcttgaagagtgataaagactttatgaatcatgaccggccacatcttttagcgattcaggatcctatggcaccagataatgatatcggaaagaattcctttaactactttaagattcagttctccttgaccggaaaggctggaacaatgaagatatgttagcggaaccctgggagccgatcacccaacagtttgacaccgagaatgatgcagtatacaattggcatgtgatagacgaggatgaaccattgcccagaaatagtcaatccacatccgaggacactagttcgtcaccatctaaaaaacggaagtccccaaaatcaagacggaaatcgcgaaagaagtcgaaggctactgcctcaggcagtagtgatgttgcaaatgggttcagaaaggatagatcatccaagcgggaagcgggaagcagcaaacggaggaaagggccaaaggagtacgacagattcacgaatacactcccaaagtacacacatgttagcaagtggtaacttatagcatttatagtctggtcgcaaaggtccagcaatttgacagtgagaagagtatcatgtcacattatggcatgcgatgtgaatgacggaagtcatcagcagcaccagaagcgccatcgcatggtttgcttgttggtctgtttaattgctgtactttacgtaacagagatcacactagattaaatgatgttttggttattttatttatgctgcagcagttttggcgactagcttgtattctttttgtaacggtatgggttggtgacgatgagattatgtacgttcaaacatatttaattgatggtctgatggccttaatcactg

SEQ ID NO: 215494 - DNA, 2058 bp, Zea Mays
gcaagggcaaacgagccgttctctcccccgcgccgccgacgcaagcagccgccacggagatggaggccgaggcgtccgtccccgccacggactacgtctacgacgcgctcccgggcctgcacctggccttctcaccggaggagacgctcgatgacgccgccgcggggcaggacgaggacgatgcgaccgcgacatacgccgtcttccgcaacgagataacggaggctggagatgtgctcgcggacatccctgctgcggacttcttctcactcgacgtctccacctctgcctccgtcgagcccgagcccgagcccgagccgccatccccggcgcccacagctgccgcggcaacgccctctatctcccgtgctttggaggaccagccgccgcagggctcggagcgcgcgtggttcaggggagggaggcggttcaggagccccatgcttcagctacacaaggagatcctggacttctgtgattttatctcaccttctactgaagagcaatcttcacgagcagctgctgtgcaagatgtctctgatgttgtcaaacatatatggccacagtgtggaagtttttggatctttcaggacaggtctctatctaccaacaagtgatatagatgttgtgatatttgaatccagagttaagactcctcaagttggtctatatgctcttgcaaaagcattatcccagaaaggtgttgctaaaaaaatacaggtaatagcaaaggcacgtgtgccaattgtgaagtttgtggaaagaaagagtggaatagcttttgacatcagctttgatatagatggtggcccacaggcagcagatttcatcaaggatgctgtgaagaagttgcctgctttaagacctttatgtatgattctgaaagtttttctgcatcagagagagctcaacgaggtctataccggtggaattggatcatatgctcttcttacgatgttgattacacatttacagttggtctggggaggaaaagatattctcgggtatcatcggtccaaggagcacaatctgggaattcttttggtcaggttttttgatttttatggacgcaagttgaacaactgggatgtcggagtatcatgcaattcttcaaggacctttttcttgaagagtgataaagactttatgaatcatgaccggccacatcttttagcgattcaggatcctatggcaccagataatgatatcggaaagaattcctttaactactttaaggtgaaatcagcattttccaaggcgtactctgtgttaactgatgcaaacttgtttattagtttgggacataataggagcattctgggtaccattgtgagaccagattcagttctccttgaccggaaaggctggaacaatgaagatatgttagcggaaccctgggagccgatcacccaacagtttgacaccgagaatgatgcagtatacaattggcatgtgatagacgaggatgaaccattgcccagaaatagtcaatccacatccgaggacactagttcgtcaccatctaaaaaacggaagtccccaaaatcaagacggaaatcgcgaaagaagtcgaaggctactgcctcaggcagtagtgatgttgcaaatgggttcagaaaggatagatcatccaagcgggaagcgggaagcagcaaacggaggaaagggccaaaggagtacgacagattcacgaatacactcccaaagtacacacatgttagcaagtggtaacttatagcatttatagtctggtcgcaaaggtccagcaatttgacagtgagaagagtatcatgtcacattatggcatgcgatgtgaatgacggaagtcatcagcagcaccagaagcgccatcgcatggtttgcttgttggtctgtttaattgctgtactttacgtaacagagatcacactagattaaatgatgttttggttattttatttatgctgcagcagttttggcgactagcttgtattctttttgtaacggtatgggttggtgacgatgagattatgtacgttcaaacatatttaattgatggtctgatggccttaatcactg

SEQ ID NO: 215495 - DNA, 2021 bp, Zea Mays
ctcgcgaagcgacgaacgcgtggcctcggccgtcaccgtcagcgcggaaacgaagcaagggcaaacgagccgttctctcccccgcgccgccgacgcaagcagccgccacggagatggaggccgaggcgtccgtccccgccacggactacgtctacgacgcgctcccgggcctgcacctggccttctcaccggaggagacgctcgatgacgccgccgcggggcaggacgaggacgatgcgaccgcgacatacgccgtcttccgcaacgagataacggaggctggagatgtgctcgcggacatccctgctgcggacttcttctcactcgacgtctccacctctgcctccgtcgagcccgagcccgagcccgagccgccatccccggcgcccacagctgccgcggcaacgccctctatctcccgtgctttggaggaccagccgccgcagggctcggagcgcgcgtggttcaggggagggaggcggttcaggagccccatgcttcagctacacaaggagatcctggacttctgtgattttatctcaccttctactgaagagcaatcttcacgagcagctgctgtgcaagatgtctctgatgttgtcaaacatatatggccacagtgcaaggtggaagtttttggatctttcaggacaggtctctatctaccaacaagtgatatagatgtaatagcaaaggcacgtgtgccaattgtgaagtttgtggaaagaaagagtggaatagcttttgacatcagctttgatatagatggtggcccacaggcagcagatttcatcaaggatgctgtgaagaagttgcctgctttaagacctttatgtatgattctgaaagtttttctgcatcagagagagctcaacgaggtctataccggtggaattggatcatatgctcttcttacgatgttgattacacatttacagttggtctggggaggaaaagatattctcgggtatcatcggtccaaggagcacaatctgggaattcttttggtcaggttttttgatttttatggacgcaagttgaacaactgggatgtcggagtatcatgcaattcttcaaggacctttttcttgaagagtgataaagactttatgaatcatgaccggccacatcttttagcgattcaggatcctatggcaccagataatgatatcggaaagaattcctttaactactttaaggtgaaatcagcattttccaaggcgtactctgtgttaactgatgcaaacttgtttattagtttgggacataataggagcattctgggtaccattgtgagaccagattcagttctccttgaccggaaaggctggaacaatgaagatatgttagcggaaccctgggagccgatcacccaacagtttgacaccgagaatgatgcagtatacaattggcatgtgatagacgaggatgaaccattgcccagaaatagtcaatccacatccgaggacactagttcgtcaccatctaaaaaacggaagtccccaaaatcaagacggaaatcgcgaaagaagtcgaaggctactgcctcaggcagtagtgatgttgcaaatgggttcagaaaggatagatcatccaagcgggaagcgggaagcagcaaacggaggaaagggccaaaggagtacgacagattcacgaatacactcccaaagtacacacatgttagcaagtggtaacttatagcatttatagtctggtcgcaaaggtccagcaatttgacagtgagaagagtatcatgtcacattatggcatgcgatgtgaatgacggaagtcatcagcagcaccagaagcgccatcgcatggtttgcttgttggtctgtttaattgctgtactttacgtaacagagatcacactagattaaatgatgttttggttattttatttatgctgcagcagttttggcgactagcttgtattctttttgtaacggtatgggttggtgacgatgagattatgtacgttcaaacatatttaattgatggtctgatggccttaatcactg

SEQ ID NO: 215496 - DNA, 2749 bp, Zea Mays
cgcgcgcatcagaagccctaaatccatggaccatggctcgcgaagcgacgaacgcgtggcctcggccgtcaccgtcagcgcggaaacgaagcaagggcaaacgagccgttctctcccccgcgccgccgacgcaagcagccgccacggagatggaggccgaggcgtccgtccccgccacggactacgtctacgacgcgctcccgggcctgcacctggccttctcaccggaggagacgctcgatgacgccgccgcggggcaggacgaggacgatgcgaccgcgacatacgccgtcttccgcaacgagataacggaggctggagatgtgctcgcggacatccctgctgcggacttcttctcactcgacgtctccacctctgcctccgtcgagcccgagcccgagcccgagccgccatccccggcgcccacagctgccgcggcaacgccctctatctcccgtgctttggaggaccagccgccgcagggctcggagcgcgcgtggttcaggggagggaggcggttcaggagccccatgcttcagctacacaaggagatcctggacttctgtgattttatctcaccttctactgaagagcaatcttcacgagcagctgctgtgcaagatgtctctgatgttgtcaaacatatatggccacagtgcaaggtggaagtttttggatctttcaggacaggtctctatctaccaacaagtgatatagatgttgtgatatttgaatccagagttaagactcctcaagttggtctatatgctcttgcaaaagcattatcccagaaaggtgttgctaaaaaaatacaggtaatagcaaaggcacgtgtgccaattgtgaagtttgtggaaagaaagagtggaatagcttttgacatcagctttgatatagatggtggcccacaggcagcagatttcatcaaggatgctgtgaagaagttgcctgctttaagacctttatgtatgattctgaaagtttttctgcatcagagagagctcaacgaggtctataccggtggaattggatcatatgctcttcttacgatgttgattacacatttacagttggtctggggaggaaaagatattctcgggtatcatcggtccaaggagcacaatctgggaattcttttggtcaggttttttgatttttatggacgcaagttgaacaactgggatgtcggagtatcatgcaattcttcaaggacctttttcttgaagagtgataaagactttatgaatcatgaccggccacatcttttagcgattcaggatcctatggcaccagataatgatatcggaaagaattcctttaactactttaaggtaatcactattgattttttactgatgcttctgcagggcatgttgccgatgctgtggatatgaaagtagggtgggcgtttgggttacccgaaaatttcggggcgggtaattcgggtatttaaaatttctggttttgagaatcgatacctgaaattacaacgggttttacaatacccgaaaattcgggtattgccgaactaccgatctgttgtgtcagcttcataaaaacgcatgtaccctattaaattattataaaagtacagtttgaataatgatatagatggacataaaaaacacaaccaatctacaaccacaagtcatgcacatttacacataattatagatgtacaagttaataattaagaatgacatgagtacttgacacataaaagttcgggtaatttggatacccgattatgatacccgaattacccaaaataatttagggttttgtaagttgctacccgaaatttctgaacgaaatgatactggaactgtttgatgctttaactcattttgccttttgctttgatgatactgttactctggaatatttcgacataagaaaacattgaataaatccccccttttttcaggtgaaatcagcattttccaaggcgtactctgtgttaactgatgcaaacttgtttattagtttgggacataataggagcattctgggtaccattgtgagaccagattcagttctccttgaccggaaaggctggaacaatgaagatatgttagcggaaccctgggagccgatcacccaacagtttgacaccgagaatgatgcagtatacaattggcatgtgatagacgaggatgaaccattgcccagaaatagtcaatccacatccgaggacactagttcgtcaccatctaaaaaacggaagtccccaaaatcaagacggaaatcgcgaaagaagtcgaaggctactgcctcaggcagtagtgatgttgcaaatgggttcagaaaggatagatcatccaagcgggaagcgggaagcagcaaacggaggaaagggccaaaggagtacgacagattcacgaatacactcccaaagtacacacatgttagcaagtggtaacttatagcatttatagtctggtcgcaaaggtccagcaatttgacagtgagaagagtatcatgtcacattatggcatgcgatgtgaatgacggaagtcatcagcagcaccagaagcgccatcgcatggtttgcttgttggtctgtttaattgctgtactttacgtaacagagatcacactagattaaatgatgttttggttattttatttatgctgcagcagttttggcgactagcttgtattctttttgtaacggtatgggttggtgacgatgagattatgtacgttcaaacatatttaattgatggtctgatggccttaatcactg

SEQ ID NO: 215497 - DNA, 2148 bp, Zea Mays
cgcgcgcatcagaagccctaaatccatggaccatggctcgcgaagcgacgaacgcgtggcctcggccgtcaccgtcagcgcggaaacgaagcaagggcaaacgagccgttctctcccccgcgccgccgacgcaagcagccgccacggagatggaggccgaggcgtccgtccccgccacggactacgtctacgacgcgctcccgggcctgcacctggccttctcaccggaggagacgctcgatgacgccgccgcggggcaggacgaggacgatgcgaccgcgacatacgccgtcttccgcaacgagataacggaggctggagatgtgctcgcggacatccctgctgcggacttcttctcactcgacgtctccacctctgcctccgtcgagcccgagcccgagcccgagccgccatccccggcgcccacagctgccgcggcaacgccctctatctcccgtgctttggaggaccagccgccgcagggctcggagcgcgcgtggttcaggggagggaggcggttcaggagccccatgcttcagctacacaaggagatcctggacttctgtgattttatctcaccttctactgaagagcaatcttcacgagcagctgctgtgcaagatgtctctgatgttgtcaaacatatatggccacagtgcaaggtggaagtttttggatctttcaggacaggtctctatctaccaacaagtgatatagatgttgtgatatttgaatccagagttaagactcctcaagttggtctatatgctcttgcaaaagcattatcccagaaaggtgttgctaaaaaaatacaggtaatagcaaaggcacgtgtgccaattgtgaagtttgtggaaagaaagagtggaatagcttttgacatcagctttgatatagatggtggcccacaggcagcagatttcatcaaggatgctgtgaagaagttgcctgctttaagacctttatgtatgattctgaaagtttttctgcatcagagagagctcaacgaggtctataccggtggaattggatcatatgctcttcttacgatgttgattacacatttacagttggtctggggaggaaaagatattctcgggtatcatcggtccaaggagcacaatctgggaattcttttggttttttgatttttatggacgcaagttgaacaactgggatgtcggagtatcatgcaattcttcaaggacctttttcttgaagagtgataaagactttatgaatcatgaccggccacatcttttagcgattcaggatcctatggcaccagataatgatatcggaaagaattcctttaactactttaaggtgaaatcagcattttccaaggcgtactctgtgttaactgatgcaaacttgtttattagtttgggacataataggagcattctgggtaccattgtgagaccagattcagttctccttgaccggaaaggctggaacaatgaagatatgttagcggaaccctgggagccgatcacccaacagtttgacaccgagaatgatgcagtatacaattggcatgtgatagacgaggatgaaccattgcccagaaatagtcaatccacatccgaggacactagttcgtcaccatctaaaaaacggaagtccccaaaatcaagacggaaatcgcgaaagaagtcgaaggctactgcctcaggcagtagtgatgttgcaaatgggttcagaaaggatagatcatccaagcgggaagcgggaagcagcaaacggaggaaagggccaaaggagtacgacagattcacgaatacactcccaaagtacacacatgttagcaagtggtaacttatagcatttatagtctggtcgcaaaggtccagcaatttgacagtgagaagagtatcatgtcacattatggcatgcgatgtgaatgacggaagtcatcagcagcaccagaagcgccatcgcatggtttgcttgttggtctgtttaattgctgtactttacgtaacagagatcacactagattaaatgatgttttggttattttatttatgctgcagcagttttggcgactagcttgtattctttttgtaacggtatgggttggtgacgatgagattatgtacgttcaaacatatttaattgatggtctgatggccttaatcactg

SEQ ID NO: 215498 - DNA, 2143 bp, Zea Mays
cgcgcgcatcagaagccctaaatccatggaccatggctcgcgaagcgacgaacgcgtggcctcggccgtcaccgtcagcgcggaaacgaagcaagggcaaacgagccgttctctcccccgcgccgccgacgcaagcagccgccacggagatggaggccgaggcgtccgtccccgccacggactacgtctacgacgcgctcccgggcctgcacctggccttctcaccggaggagacgctcgatgacgccgccgcggggcaggacgaggacgatgcgaccgcgacatacgccgtcttccgcaacgagataacggaggctggagatgtgctcgcggacatccctgctgcggacttcttctcactcgacgtctccacctctgcctccgtcgagcccgagcccgagcccgagccgccatccccggcgcccacagctgccgcggcaacgccctctatctcccgtgctttggaggaccagccgccgcagggctcggagcgcgcgtggttcaggggagggaggcggttcaggagccccatgcttcagctacacaaggagatcctggacttctgtgattttatctcaccttctactgaagagcaatcttcacgagcagctgctgtgcaagatgtctctgatgttgtcaaacatatatggccacagtgcaaggtggaagtttttggatctttcaggacaggtctctatctaccaacaagtgatatagatgttgtgatatttgaatccagagttaagactcctcaagttggtctatatgctcttgcaaaagcattatcccagaaaggtgttgctaaaaaaatacaggtaatagcaaaggcacgtgtgccaattgtgaagtttgtggaaagaaagagtggaatagcttttgacatcagctttgatatagatggtggcccacaggcagcagatttcatcaaggatgctgtgaagaagttgcctgctttaagacctttatgtatgattctgaaagtttttctgcatcagagagagctcaacgaggtctataccggtggaattggatcatatgctcttcttacgatgttgattacacatttacagttggtctggggaggaaaagatattctcgggtatcatcggtccaaggagcacaatctgggaattcttttggtcaggttttttgatttttatggacgcaagttgaacaactgggatgtcggagtatcatgcaattcttcaaggacctttttcttgaagagtgataaagactttatgaatcatgaccggccacatcttttagcgattcaggatcctatggcaccagataatgatatcggaaagaattcctttaactactttaagcattttccaaggcgtactctgtgttaactgatgcaaacttgtttattagtttgggacataataggagcattctgggtaccattgtgagaccagattcagttctccttgaccggaaaggctggaacaatgaagatatgttagcggaaccctgggagccgatcacccaacagtttgacaccgagaatgatgcagtatacaattggcatgtgatagacgaggatgaaccattgcccagaaatagtcaatccacatccgaggacactagttcgtcaccatctaaaaaacggaagtccccaaaatcaagacggaaatcgcgaaagaagtcgaaggctactgcctcaggcagtagtgatgttgcaaatgggttcagaaaggatagatcatccaagcgggaagcgggaagcagcaaacggaggaaagggccaaaggagtacgacagattcacgaatacactcccaaagtacacacatgttagcaagtggtaacttatagcatttatagtctggtcgcaaaggtccagcaatttgacagtgagaagagtatcatgtcacattatggcatgcgatgtgaatgacggaagtcatcagcagcaccagaagcgccatcgcatggtttgcttgttggtctgtttaattgctgtactttacgtaacagagatcacactagattaaatgatgttttggttattttatttatgctgcagcagttttggcgactagcttgtattctttttgtaacggtatgggttggtgacgatgagattatgtacgttcaaacatatttaattgatggtctgatggccttaatcactg

SEQ ID NO: 215499 - DNA, 2158 bp, Zea Mays
gccagcgcgcgcatcagaagccctaaatccatggaccatggctcgcgaagcgacgaacgcgtggcctcggccgtcaccgtcagcgcggaaacgaagcaagggcaaacgagccgttctctcccccgcgccgccgacgcaagcagccgccacggagatggaggccgaggcgtccgtccccgccacggactacgtctacgacgcgctcccgggcctgcacctggccttctcaccggaggagacgctcgatgacgccgccgcggggcaggacgaggacgatgcgaccgcgacatacgccgtcttccgcaacgagataacggaggctggagatgtgctcgcggacatccctgctgcggacttcttctcactcgacgtctccacctctgcctccgtcgagcccgagcccgagcccgagccgccatccccggcgcccacagctgccgcggcaacgccctctatctcccgtgctttggaggaccagccgccgcagggctcggagcgcgcgtggttcaggggagggaggcggttcaggagccccatgcttcagctacacaaggagatcctggacttctgtgattttatctcaccttctactgaagagcaatcttcacgagcagctgctgtgcaagatgtctctgatgttgtcaaacatatatggccacagtgcaaggtggaagtttttggatctttcaggacaggtctctatctaccaacaagtgatatagatgttgtgatatttgaatccagagttaagactcctcaagttggtctatatgctcttgcaaaagcattatcccagaaaggtgttgctaaaaaaatacaggtaatagcaaaggcacgtgtgccaattgtgaagtttgtggaaagaaagagtggaatagcttttgacatcagctttgatatagatggtggcccacaggcagcagatttcatcaaggatgctgtgaagaagttgcctgctttaagacctttatgtatgattctgaaagtttttctgcatcagagagagctcaacgaggtctataccggtggaattggatcatatgctcttcttacgatgttgattacacatttacagttggtctggggaggaaaagatattctcgggtatcatcggtccaaggagcacaatctgggaattcttttggtcaggttttttgatttttatggacgcaagttgaacaactgggatgtcggagtatcatgcaattcttcaaggacctttttcttgaagagtgataaagactttatgaatcatgaccggccacatcttttagcgattcaggatcctatggcaccagataatgatatcggaaagaattcctttaactactttaaggtgaaatcagcattttccaaggcgtactctgtgttaactgatgcaaacttgtttattagtttgggacataataggagcattctgggtaccattgtgagaccagattcagttctccttgaccggaaaggctggaacaatgaagatatgttagcggaaccctgggagccgatcacccaacagtttgacaccgagaatgatgcagtatacaattggcatgtgatagacgaggatgaaccattgcccagaaatagtcaatccacatccgaggacactagttcgtcaccatctaaaaaacggaagtccccaaaatcaagacggaaatcgcgaaagaagtcgaaggctactgcctcaggcagtagtgatgttgcaaatgggttcagaaaggatagatcatccaagcgggaagcgggaagcagcaaacggaggaaagggccaaaggagtacgacagattcacgaatacactcccaaagtacacacatgttagcaagtggtaacttatagcatttatagtctggtcgcaaaggtccagcaatttgacagtgagaagagtatcatgtcacattatggcatgcgatgtgaatgacggaagtcatcagcagcaccagaagcgccatcgcatggtttgcttgttggtctgtttaattgctgtactttacgtaacagagatcacactagattaaatgatgttttggttattttatttatgctgcagcagttttggcgactagcttgtattctttttgtaacggtatgggttggtgacgatgagattatgtacgttcaaacatatttaattgatggtctgatggccttaatcactg

SEQ ID NO: 215500 - DNA, 1517 bp, Zea Mays
cctaaacctagggcagccgccgtttgttgtcgcgagcgcgttcctgccccgccacagccgaagctcccagcgtcctcctgcaggccgagctgaaggttcagcgcgccggtggagttcgacgacgaaactccgtcacgtcatacctctccacctcccgtcttccagacgtctccaatcgaggctcccagcgtctcggagaagaggagcagcacgacacggcggctgtggcgaggaaggctcctgtcccatcccaacccagttagcagccgtccaaggaggaggagatccaatcggcgtgcgggcgtccgcggtccatccatcgatccaattccaatctgcaggtgagcagctcgttgagattcccaatcaacagctcgaatcgcctgctctcccatcctattgaatgaaactatggtctctgcgtcacggcttgttcgtggaggagaggtcgagaatttactaagtcaacatcttgttttaggtcattactgcatttggaagactagggacaatgtttggatgtgatatgtataatattaaaccagatcttgtttccatagccaaggttagttcaatataaaatacttattaattacaagagaacttctttataaaattaatggtgaacttaatgcacttttccccctaataggctctttcttctgcatatatgccaattggagcaattctcgttagcccagaaataacggatgtaatttattctcagagcaataaacttggtaaatctaatcccatcatggtaaatctattctgcatatatgtgtctgattaatccttcatataatggccgttagggaaaggaatattgtagaacacgttaacaaaattgctccaaggttccaggagggaatcaaggccttctcaggcagcccaattgttggggagatacgcggtctgggactgatacttggaactgaatttgtcgacaacaaatctccaaatgatccatttccagctgaatggggtgttggttcgatatttggcacggagtgcgagaagcgtgggatgctcatcagggtggctggggacaacatcatgctgtcacccccgctgatcatgactcccaatgaagtcgaagaaatcataagcaaattcggcgatgctctgaaggctacagaggaacggattggagaactgaaatccaggaagaattagccgatgctactggttgtaacgacgacatgcaattgaaaatgacaattgatcttttttatgggcgaagtgttgaagatggctttggtgaaggaaatgtcttgttagcatcaagtaagtggcgacatcacaacccctacaagcttgtgccttaaaacaaaaggatacaagaagttggagtgcttttgtgaaagcttttgcgaatcacttgaaacgttagtacttttgtgaatgattttgtaaagtgtttgcaaatatgtgcaaaacataataacatgtgtaggttttgtgaatgattttgttgtggtgcctgttgatggtttatgtatgtggatctatcatgg

SEQ ID NO: 215501 - DNA, 1308 bp, Zea Mays
cctaaacctagggcagccgccgtttgttgtcgcgagcgcgttcctgccccgccacagccgaagctcccagcgtcctcctgcaggccgagctgaaggttcagcgcgccggtggagttcgacgacgaaactccgtcacgtcatacctctccacctcccgtcttccagacgtctccaatcgaggctcccagcgtctcggagaagaggagcagcacgacacggcggctgtggcgaggaaggctcctgtcccatcccaacccagttagcagccgtccaaggaggaggagatccaatcggcgtgcgggcgtccgcggtccatccatcgatccaattccaatctgcaggtctctgcgtcacggcttgttcgtggaggagaggtcgagaatttactaagtcaacatcttgttttaggtcattactgcatttggaagactagggacaatgtttggatgtgatatgtataatattaaaccagatcttgtttccatagccaagaaataacggatgtaatttattctcagagcaataaacttggtaaatctaatcccatcatggtaaatctattctgcatatatgtgtctgattaatccttcatataatggccgttagggaaaggaatattgtagaacacgttaacaaaattgctccaaggttccaggagggaatcaaggccttctcaggcagcccaattgttggggagatacgcggtctgggactgatacttggaactgaatttgtcgacaacaaatctccaaatgatccatttccagctgaatggggtgttggttcgatatttggcacggagtgcgagaagcgtgggatgctcatcagggtggctggggacaacatcatgctgtcacccccgctgatcatgactcccaatgaagtcgaagaaatcataagcaaattcggcgatgctctgaaggctacagaggaacggattggagaactgaaatccaggaagaattagccgatgctactggttgtaacgacgacatgcaattgaaaatgacaattgatcttttttatgggcgaagtgttgaagatggctttggtgaaggaaatgtcttgttagcatcaagtaagtggcgacatcacaacccctacaagcttgtgccttaaaacaaaaggatacaagaagttggagtgcttttgtgaaagcttttgcgaatcacttgaaacgttagtacttttgtgaatgattttgtaaagtgtttgcaaatatgtgcaaaacataataacatgtgtaggttttgtgaatgattttgttgtggtgcctgttgatggtttatgtatgtggatctatcatgg

SEQ ID NO: 215502 - DNA, 1661 bp, Zea Mays
cctaaacctagggcagccgccgtttgttgtcgcgagcgcgttcctgccccgccacagccgaagctcccagcgtcctcctgcaggccgagctgaaggttcagcgcgccggtggagttcgacgacgaaactccgtcacgtcatacctctccacctcccgtcttccagacgtctccaatcgaggctcccagcgtctcggagaagaggagcagcacgacacggcggctgtggcgaggaaggctcctgtcccatcccaacccagttagcagccgtccaaggaggaggagatccaatcggcgtgcgggcgtccgcggtccatccatcgatccaattccaatctgcaggtctctgcgtcacggcttgttcgtggaggagaggtcgagaatttactaagtcaacatcttgttttaggtcattactgcatttggaagactagggacaatgtttggatgtgatatgtataatattaaaccagatcttgtttccatagccaaggttagttcaatataaaatacttattaattacaagagaacttctttataaaattaatggtgaacttaatgcacttttccccctaataggctctttcttctgcatatatgccaattggagcaattctcgttagcccagaaataacggatgtaatttattctcagagcaataaacttggtaaatctaatcccatcatggtaaatctattctgcatatatgtgtctgattaatccttcatataatggccgttagggaaaggaatattgtagaacacgttaacaaaattgctccaaggttccaggagggaatcaaggccttctcaggcagcccaattgttggggagatacgcggtctgggactgatacttggaactgaatttgtcgacaacaaatctccaaatgatccatttccagctgaatggggttcgttgttttattgatctcatgtcccttttcaaacatttcagaagtaatccaactttaaggcggcccaaaatgtctctgaagaagttaacttaatgttatgaattagcgtagcatgtcgaggcaaaatttgtcactatccccagagttagaagaaaccttgccgagttgattaatggtgacagtatattgattttattacgactggtaactccaggtgttggttcgatatttggcacggagtgcgagaagcgtgggatgctcatcagggtggctggggacaacatcatgctgtcacccccgctgatcatgactcccaatgaagtcgaagaaatcataagcaaattcggcgatgctctgaaggctacagaggaacggattggagaactgaaatccaggaagaattagccgatgctactggttgtaacgacgacatgcaattgaaaatgacaattgatcttttttatgggcgaagtgttgaagatggctttggtgaaggaaatgtcttgttagcatcaagtaagtggcgacatcacaacccctacaagcttgtgccttaaaacaaaaggatacaagaagttggagtgcttttgtgaaagcttttgcgaatcacttgaaacgttagtacttttgtgaatgattttgtaaagtgtttgcaaatatgtgcaaaacataataacatgtgtaggttttgtgaatgattttgttgtggtgcctgttgatggtttatgtatgtggatctatcatgg

SEQ ID NO: 215503 - DNA, 646 bp, Zea Mays
ggcgaggagacacgcaccgcacagccacacgcgtacacccgtacaccgtacgcagccatggcatcagtaggcttcggcacggtcgcgccggccgtggcatcatcgccggcggccaggacgacgagcatgggccgcccctctgcggcgcacgtccctgcggcgacgaccaagttcgtcgcggcggcggcgggtaagcgggtggaggagaagggcctgttcgacaccatcttcggcgcgctgtacaaggaggagcagctgctggagacggaccccgtcctgaacaaggtggggagcaagggcaaggccgccgccgccccggcgcccaagaaagccgctgaagagggcggcaacggcgggctcagcctcggcgggttcttctccaggcccaagaaaggttgatctcgccctgtgttctgcaagcacacaccccagccagcatcagtggttcactgctggctgttgatcatcatcatcatcactagtaaatgtagcagttgtgtgtctatgtataaatgtactgaagctcgtgtagaaataaaaaaaaaatgggaaacaacatcgcctagaaggatcccgtggccttcagctgcttcaccagcacgtgtggccgatctatcttgctgtaaaaaaggaaataaaaaatgaa

SEQ ID NO: 215504 - DNA, 1945 bp, Zea Mays
ctcacacgacgtggcgtggcgttgcctccccttcgcttcactccgatcccctatcgcggccatgacgggagccaagcaatctcgccgatgcaacctcctgacgtttttctccaccatattggccaccgttctgcttttgatcttccagcgattctcgccgacggcagctgcagtgccgcagtggagaaggggaggaactcaggaacatatcgacgttgcgcggggagccgaggcagtgggccacgggcaaggacgatgcgaagattctctccgaggcggaagctcgcgctggcggcggaggagagggtttgctgacggcggacgagggacgcgagttcgcctcgctctacagcatgctgcagtgggcaattggtataggcttgggactttgcgggtccttcctcatttgttggggaactctgatccggataagttgagagaaaaggctgcagaattggtgaaactatcggcagaggaattactcaagagacagatggagattaaggagttgatggagaagttcaaggcgccatcagatgctgagttgataaagattgctattgctgacttaaataattcctctctggaggaccgccaacgtgcactgcaagagctcttaattctcgttgagcccatcgacaatgctaatgacgaaggaataagaactacttcagcatgggtgctgggcaaagccagtcaggacaatgttcttgttcaaaaccagatcaatggatatggagctttggacagattagtgaagatgggttattccagttctggaccagaagctgcaaaggcattgtacactatatcctctttgattagggacaacgaacatggtcaggagttgttcctttcagaaaatggttatgcaatgttgcaggtagaaaaaggaaatcatatattgaacatcaaggcaaaagcgaggttgaaatgtaccaacgcgttgtttgtttgcagcacatattgtcaaccacaaacactagtgttcggcttcagaaaaaggttgtgtctttactggcatatatagctgactttcagctaaatacagggaagtcacaagctcaatccttactcaaccactttttcatataatcagtagttgagatgatatcagcagtgcctgaccttgacctccaggagaaggctttgttagctgttaggaatctgctgcaccttacgtcagctgatgctacagatcttcagaagttttcaggcctggatgattccctgaatgcactgaaggtgcaattggatgagttgacatctcatgaggaacaaagagagtatgctccggaaattgaaattctccggagagaagtccacactgtcttccagcggaaaactgaccaggcaagggtggtgacaaatgaaggcaaatataatggttagaaacatttgctgtccatataagcgtttgttcggttcttccccaaaccaagagggttgggggatttaatagtcccccctcaattctctccaaccccttggtttcgggaggaaactaacaagctctaaaggtgatcacataacaattcctcaactgaatgacaagttgtcaatagaacgagttgcatgggatcatagatacttcacagagataggatgtcacaaaatggtgattgtctatcaagttacagaacgaagaagtgcagtggaacagagttctcattctcactgatttctgcttcgtgtgaaactgtttcatagtacacttgtagcccattgaatgtcgatgttgttcatacgcaaggactcaaagttgttactgggcctgaactaaggctacaatcgcaatagccctgattcagttgcttcctgttcaaatgaaatgttgctcgagttctttcatacgtaggcattttgcgcaacttccactggaagtaaacttaatgtgctttagaaaaccataaagtttgtgaatatatatacagaggaagtagca

SEQ ID NO: 215505 - DNA, 2486 bp, Zea Mays
gagcttacgacgaatttgtttgcctccgctcccccattccgtcattcccatcctgtcgtcgccgtcccttcccgagcttttctctccaccaaccctcctcccatcctccaccagagagatatcagtttagtgcttgattaagcaaggatccatcgtccgtcgccgtcgtttaaggatcgaccgatcatcggtggtgaggagcgagcccgggatcgatcgatcgatcaaaaatccatcggcggcggcgctcacccggccggtcccgtgtcgatcgtccgaattgaatgacaacgacgacgagctaggacggcagcagcaatgccggcgcccggcgctgttctattttgatcccaggcccagcgatgcattgcagcggcatcgtcgcaccatgggcggtcaccagctgcacctgtcgtccccgaccgcggtgctgggccacgtcaccccggcgctgcgcgacctctacgcggtggggcgcaagctcgggcaggggcagttcggcaccacgtacctgtgcacggagctgtccacgggcgccgccttcgcctgcaagtccatcgccaagcgcaagctgctcacccccgaggacgtcgacgacgtgcggcgcgagatccagatcatgcaccacctcgccggccacaagagcgtcgtcaccatcaagggcgcctacgaggacccgctctacgtccacatcgtgatggagctctgcgagggcggcgagctcttcgaccgcatcgtcgacagggggtacttctccgagcgcaaggccgccgagatcgcgcgcgtcatcgtcggcgtcgtggaggcgtgccactcgctgggcgtcatgcaccgggacctcaagcccgagaacttcttgctcaaggacaggggccacgacgcgtcgctcaaggccatcgacttcggcctctccgtcttcttcaagcccggccaggtgttcaccgacgtggtgggctccccctactacgtggcgccggaggtgctgtgcaagcactacgggcccgaggcggacgtgtggacggcgggggtcatcgtgtacatcctcctcagcggggtgccgccgttctgggcggagacgcagcagggcatcttcgacgccgtgctgaagggggccatcgacttcgactcggagccgtggccggccatctccgacagcgccaaggacctgatccgccgaatgctgcggtcgccgccggcggacaggctgagcgcgcaccaggtgctgtgccacccgtggatctgcgagaacggggtggccccggacagggcgctggacccggcggtgctgacgcggctgaagcagttctcggccatgaacaggctgaagaagatggcgctgcgggtcatctcgcagagcctgtcggaggaggagctggcggggctgaaggagatgttcaaggccatggacacggacggcagcggcgccatcaccttcgacgagctgaaggaggggctgaagaggcacgggtccaaggacctcagggagagcgagatcagggacctgatggacgccgccgacgtggacaagagcggcagcatcgactacgacgagttcatcgccgccaccgtgcacatgagcaagctggagcgcgaggagcacctgctcgcggcattcgcctacttcgacaaggacggcagcggatacatcaccgtcgacgagctggagcaggcgtgcagggagcacaacatggccgacgtcggcctcgacgacatcatcacagaggtggaccaggacaacgatggccgcatcgactacggcgagttcgtggcaatgatgaagaagggcatcatcggccacggcaggctcaccatgaggcacacctctgacggcagcgtcctccatggcgccggctagctgctgctacctcgctcatcgatcttcaaaatgctagcttgctgcatcttcacctgccttcaaaattctacatacaaatttaacaacgaactccatatacgtatattgtttatatatgcatggtcgggcaagagtagtgtcgtcgtcgactccttttgttgtcatttcctttttttttttctgttttcaagagtcaagacccacccacccgtggaaactgatgactcatcaagcctcgttcatatataggctgtctattctacaaattaaagttatcattaccaaatcagatatagataattttgagaattgtaaataaggatcataccttcaagttcttggctcttggccttgacttcaagagtttgggccgggcttcaagatcatccctcatcttttggacctagctagctgctagcctggtagttgtatctagatggcaaataacgcttgatgatataaattattattattaattgatatagtcgagacaatggttacttgcctcttgggggctgaggtagctagaagaacggaggactcggccagcgcgctggaaggcagagtcatctcgccgccagctgactcttggttcgataggcactagtagcagctcgaccctcatctctag

SEQ ID NO: 215506 - DNA, 2268 bp, Zea Mays
atcgattcatcttcctatcctgttgaacactgcctatgctagctgcatgcatgcgcgcggatctaggcaggaacaaggcaggcccctcgtcccgcggctgaccacgcagagatcgcacgagtgtggcattggccgtcgtcgcgacgacacttgggtcatctatcatcctccgatccgtcgcctcgccgccggccggcgagcccgagagtacgaggccatgacgcttgcgagcacggacaaggtggtgctgggatgcgtcgcgttcagcatcttctgggtgctggccgtgttcccgtcggtgccgtttatgccggtggggcgcaccgcggggtccctcctgggcgccatgctcatggtgctgttccgcgtgatgacccccgacgaggcgtacaaggcgatcgacctcccgatcctgggcctcctcttcggcaccatggtggtgagcatcttcctggagcgcgccgacatgttcgagtacctcggcggcgcgctggcgtggcggagccggggcagcaaggacctgctcctccgcgtctgcctcgtgtccgccgtggccagcgcgctcttcaccaacgacacctgctgcgtggtgctcaccgagttcatcctcaagctggcgcgccagaacggcctgcccccgcagcccttcctgctggcgctcgcctccagctccaacatcggctccgccgccacgcccatcggcaacccgcagaacctggtcatcgccgtgcagagcggcatcaccttcggccagttcctcgtcggcgtcttcccggccatggccgtcggcgtcgccgccaacacctgcgtcctgctctgctacttctggaggtacctcgcggcgccggagaaggaccaggaggcggggcccgacgcggtcgtggccgacgaggaggtcacctcgcacaggttcacaccggcgcggatgtcgcacgcctcgtccatgaacggcggcttcgacggcgactgcgtcagcgagcccatgcgccggagcgagagcctgggcagggccgacgcgctgaggagccgcagctacaactcggagggcgacatccaggtctccatccggtccatgcgcgcctccagcctgtcgcaggagatggtggatgtgtccaccgtcggcgacgggcccaggaagatcaccaggagcaccagccagcagcgcagcgtcatcatcgaggacgcgccgcccgaggccgacgacgacgcccacaagggcaaggacggcgacgacgacgacgtcaaggtgaagaggtggaaggtggtcgtgtggaagagcgccgtgtacctcaccacgctgggcatgctcgtcgcgcttctcatgggcctcaacatgtcctggtccgccatcaccgctgctcttgtcctcctcgcgctcgacttcactgacgcgcaggcttgcctggagaaggtgtcctactctttgctcatcttcttctgtgggatgttcataacggtcgacggcttcaacaagaccggcatacccaacgcgctctgggagctggtcgagccgtattcgagaatcgacagcgccagaggcacggcgctcctcgcgcttgtcattctcgtcctttcgaacgtggcctccaatgtcccaactgtcctcctgctgggctccagagtggcagcgtcagcggctgccatctccccggagtcgcagaagaaagcctggctcatactagcgtgggtcagcacggtgtccggcaatctcaccctcctgggctccgccgccaacctgatcgtgtgcgagcaggcgcggcgggcgcagttcttcgggtacaacctcaccttctggagccacctccgcttcggcctgccgtcaaccatcatcgtcaccgccatcggcctgctcatcgtcgtcagctactgaatggcgtcgggttgcccatctgaatggcatcgatcgagcagtggccggcacaggtagcagggctcctctcaagtctcaatctggttctgtcggaggggcctgtggtcggagcctttctcggtgaagaaacaagttatgccgaggtgtggactttgcaactttaccctgcatttgcaggacgaaaatcgttacagaggcttgtgctctaccgacccagctagacgcgccaacgtggttgtgtattgagatctttctttgtggcaacaggccggtcactctagcactcatagcaaataatatatagctgttgagtatcatatttggcacctaagcatgttcggacggttcgcccatgtggcccggacggtccgcatctccacgaccagattaacacagat

SEQ ID NO: 215507 - DNA, 2237 bp, Zea Mays
gtgtaaaaccgcagacggcggccgtgaggatctaggcaggaacaaggcaggcccctcgtcccgcggctgaccacgcagagatcgcacgagtgtggcattggccgtcgtcgcgacgacacttgggtcatctatcatcctccgatccgtcgcctcgccgccggccggcgagcccgagagtacgaggccatgacgcttgcgagcacggacaaggtggtgctgggatgcgtcgcgttcagcatcttctgggtgctggccgtgttcccgtcggtgccgtttatgccggtggggcgcaccgcggggtccctcctgggcgccatgctcatggtgctgttccgcgtgatgacccccgacgaggcgtacaaggcgatcgacctcccgatcctgggcctcctcttcggcaccatggtggtgagcatcttcctggagcgcgccgacatgttcgagtacctcggcggcgcgctggcgtggcggagccggggcagcaaggacctgctcctccgcgtctgcctcgtgtccgccgtggccagcgcgctcttcaccaacgacacctgctgcgtggtgctcaccgagttcatcctcaagctggcgcgccagaacggcctgcccccgcagcccttcctgctggcgctcgcctccagctccaacatcggctccgccgccacgcccatcggcaacccgcagaacctggtcatcgccgtgcagagcggcatcaccttcggccagttcctcgtcggcgtcttcccggccatggccgtcggcgtcgccgccaacacctgcgtcctgctctgctacttctggaggtacctcgcggcgccggagaaggaccaggaggcggggcccgacgcggtcgtggccgacgaggaggtcacctcgcacaggttcacaccggcgcggatgtcgcacgcctcgtccatgaacggcggcttcgacggcgactgcgtcagcgagcccatgcgccggagcgagagcctgggcagggccgacgcgctgaggagccgcagctacaactcggagggcgacatccaggtctccatccggtccatgcgcgcctccagcctgtcgcaggagatggtggatgtgtccaccgtcggcgacgggcccaggaagatcaccaggagcaccagccagcagcgcagcgtcatcatcgaggacgcgccgcccgaggccgacgacgacgcccacaagggcaaggacggcgacgacgacgacgtcaaggtgaagaggtggaaggtggtcgtgtggaagagcgccgtgtacctcaccacgctgggcatgctcgtcgcgcttctcatgggcctcaacatgtcctggtccgccatcaccgctgctcttgtcctcctcgcgctcgacttcactgacgcgcaggcttgcctggagaaggtgtcctactctttgctcatcttcttctgtgggatgttcataacggtcgacggcttcaacaagaccggcatacccaacgcgctctgggagctggtcgagccgtattcgagaatcgacagcgccagaggcacggcgctcctcgcgcttgtcattctcgtcctttcgaacgtggcctccaatgtcccaactgtcctcctgctgggctccagagtggcagcgtcagcggctgccatctccccggagtcgcagaagaaagcctggctcatactagcgtgggtcagcacggtgtccggcaatctcaccctcctgggctccgccgccaacctgatcgtgtgcgagcaggcgcggcgggcgcagttcttcgggtacaacctcaccttctggagccacctccgcttcggcctgccgtcaaccatcatcgtcaccgccatcggcctgctcatcgtcgtcagctactgaatggcgtcgggttgcccatctgaatggcatcgatcgagcagtggccggcacaggtagcagggctcctctcaagtctcaatctggttctgtcggaggggcctgtggtcggagcctttctcggtgaagaaacaagttatgccgaggtgtggactttgcaactttaccctgcatttgcaggacgaaaatcgttacagaggcttgtgctctaccgacccagctagacgcgccaacgtggttgtgtattgagatctttctttgtggcaacaggccggtcactctagcactcatagcaaataatatatagctgttgagtatcatatttggcacctaagcatgttcggacggttcgcccatgtggcccggacggtccgcatctccacgaccagattaacacagat

SEQ ID NO: 215508 - DNA, 930 bp, Zea Mays
ccagcgttgagtggcccaatagaccagccctgtctttctcatgcgctcaaacagagtcgttgtctacctcggtcattcctcattcgcgaaaagaaaaacacaaggcgaccgcagagggcaggacaggacagagacgccgaggctaggcagtccatctgttggggtggccagtggggatctcgccggccgggaggtctggggggcgggggctgccaaacttcgccatattggtgaatcactgaatccgcccctgccagcaaccgttctgacgtggcggggtggggcaggatccaaatggcggcggcaatagaggaactgcggctcctgggatccatccctgtactggaaggtccgggagaggtcgacggcgtggtgggtgaggaagggcgaccgcgaggcggcggcgacgacgaggagatcctgcgattcatggactcggtggacagctacctgctcctcatggactccctatcctccgctcttcgtcagggctggcttgacctggcaagtgctcgccattctatgggcacatcacgcgtttcgagtacactgtttgatcacaaggagcagtctgctgccactaagcttcaagttgttgatcatgatggcctgaaatcatcagagtcaataccacactttgctctatcaaagtggtctttgcaagaagaatgtcactccacctatgatctcagtgagagagattttactgagccaaagatgaggcatcgaggatcagttactaccccagaaaagggaaaccatgaaagtgcaaacaccacaacactgtctacaggtgctgatgctagcaatcgttttatgtgcttgagttaccagtggctgaaatttgccccttgatatgcttgatccaagatatgccaatggttaacataaataccacaagaataatatattgcagtatgctaagccaat

SEQ ID NO: 215509 - DNA, 3147 bp, Zea Mays
aacagatggggatgggggcatgccggcgttgggagcagaagcagaagcggctgtttttatttggattccagatagtatggctgccaaaatggctggagctgtccaagtgctcaaggatgacactgttaaacgcacacccatggcacgacctagtaacggccgtgaaggaaagcccattaggttgctgtcgaaccacttctcagtgaagcttagaggagttgatgctgttttctaccaatacagtgtctgcatcaaatctgaggatgataaggtggttgatagcaagggtattggccgaaaggtcatagataaactattgcaaacatactgttctgagcttgatgggaaggattttgcatatgatggagagaaatgtctatttactgtgggacctcttccacagaataactttgagttcactgttatcttggaggaaacatcttcaagggctgctggtggaagtccagtgcatgaaagccctactcaagctaacaaaaagcgagtcaagcgatcacatctggcaaaaaagttcagtgtagacataagttatgccgcaaagattcctcttcagtcggttgctttggctcttcgaggaagcgagtcagaacatggtcaagatgttctgagagtccttgacgttgttttaaggcaacagcaggctaagagaggttgtctacttgttagacagtcatttttcagtgatgatagtcgaaaccttgttgatttaactggtggagttagtggttgtcgtggactccactctagtttccgtactacaattggtggtctttcactaaatatggatgtttcaaccactatggttgtaactcctggaccagttattgattttctcgtcacaaatcaaaatgtaagagacatcagagatattgactggcccagggccaagaaaatgcttaaaaatctcagagttaaagctaagcacaacaacatggagttcaagattattggccttagtgatcaaccatgctctagacagatgttcccaatgaaagttcgaaatggaaacatcgaaattaaatctgttgatatcactgttcaggattattttaaatccaagcaagttgagctaacaatgccttatctgccatgtcttgatgtgggaaaaccaaaacgccctaattatctcccaattgagttatgccacatggtatcacttcaacgttatacaaaggcactgtcttctcaacaaagggcaatgttggttgaaaagtcacgacagaaacctcaagaaagaatgcgagttgttacagatgctgtaaaaagtaatatgtatgatgatgatccaatcttatcttcatgtggtattgaaattgagaaacaacttactcgtgttgacgctcgtgttctctctgcaccagcgctagttgtgggcaacagtgaagattgcatcccaaacaggggtaggtggaactacaataataagaggctattcgatccagtcaagattgagcgttgggccattgttaatttctctgctcgttgtgacatgagccgaatctcaagagaactgataaactgtggacgcagcaaaggcattttcattgaatgtcctcacagtttggtggatgaggacagccagtctaggagatgttcacctgtggaaagggttgaaaagatgtttgaaaaagtcaaagcaagccttcctggtcctccagagtttctcctttgtcttttaccagagaggaagaattgtgatatttacgggccatggaagaagaaaaatcttcatgaaatgggtattgtcactcaatgcattgctccaagtaataagatgaatgatcaatatttcaccaatgttcttctaaaaattaatgctaagcttggtggaatgaactccaaactggcactggaacatcgtcaaatgataccagttgtgactcaaataccaacattaattcttggcatggatgtttcacatggttctccaggtcgagcagatataccatcaattgctgcggttgttggatctagatgctggccattgatatcacggtacagagcatctgtgcgcacccagtctccaaaggtagagatgattgattctctatttaagccactggatgatgggaaggatgatggcataatgagggaacttctactagacttctaccaaaccagtcaacaaagaaagcctaagcagataatcatcttcagggatggtgttagcgagtctcagtttagccaagtactgaacgtagaacttaatcaaattataaaggcatatcagagtatgggacagggggaccttccgaagttcacagtgatcattgctcaaaagaatcaccacacaaaactcttccaagctgattcaccagagaacgttccacctgggactgttgtggactccggcatagttcatccaagacagtatgatttctacatgtgtgctcatgccggaccaattggtacttcaaggccaacccattaccatgtgttgcttgatgagattggcttctctgcagataatctccagaagctagttctttcactttcatatgtgtaccagaggagcaccactgcgatttctgtggtggcacctatctgttatgcccacctcgcagcagctcagatgggccagttcatgaaatttgaagagtttgcagatacgtcgtcagggagtgtcaattcatcatcgccaccatcaataccagaattgccacggctgcatgctgatgtctgcagttccatgttcttctgttgacgtgattttagtttgaccgttgtggggtagggccaattctttgtgaaaggaaccttaccttatatgttggcacacagcaggctaaccgtttttgtgaagaaaccatgtaggtcgttagttgtcgtatatcgcacgcgtgcatctttttggagcggttttcggctccccccacccacaggtggcggttccgttaggtacagtttccagattttaacgatgctaatacagtaaaagcagtttgtacattctacgcagattttgcagggatacgtggttagatgatctttttgttatgcccagaaatacgtgtgcattggggggttatgaaagtgagctaaatttctgtgcctcgcatggcatccaattgtactcggagattgtgtttgtgctcgatacgcttcctgccactgaaatgcgaaaatgac

SEQ ID NO: 215510 - DNA, 3174 bp, Zea Mays
cctatcgtgttgcttagggtatatgtgtccgattaaatgtgggacaagctgacaaacccatcgtggtgaagaaatcaagggttttatttggattccagatagtatggctgccaaaatggctggagctgtccaagtgctcaaggatgacactgttaaacgcacacccatggcacgacctagtaacggccgtgaaggaaagcccattaggttgctgtcgaaccacttctcagtgaagcttagaggagttgatgctgttttctaccaatacagtgtctgcatcaaatctgaggatgataaggtggttgatagcaagggtattggccgaaaggtcatagataaactattgcaaacatactgttctgagcttgatgggaaggattttgcatatgatggagagaaatgtctatttactgtgggacctcttccacagaataactttgagttcactgttatcttggaggaaacatcttcaagggctgctggtggaagtccagtgcatgaaagccctactcaagctaacaaaaagcgagtcaagcgatcacatctggcaaaaaagttcagtgtagacataagttatgccgcaaagattcctcttcagtcggttgctttggctcttcgaggaagcgagtcagaacatggtcaagatgttctgagagtccttgacgttgttttaaggcaacagcaggctaagagaggttgtctacttgttagacagtcatttttcagtgatgatagtcgaaaccttgttgatttaactggtggagttagtggttgtcgtggactccactctagtttccgtactacaattggtggtctttcactaaatatggatgtttcaaccactatggttgtaactcctggaccagttattgattttctcgtcacaaatcaaaatgtaagagacatcagagatattgactggcccagggccaagaaaatgcttaaaaatctcagagttaaagctaagcacaacaacatggagttcaagattattggccttagtgatcaaccatgctctagacagatgttcccaatgaaagttcgaaatggaaacatcgaaattaaatctgttgatatcactgttcaggattattttaaatccaagcaagttgagctaacaatgccttatctgccatgtcttgatgtgggaaaaccaaaacgccctaattatctcccaattgagttatgccacatggtatcacttcaacgttatacaaaggcactgtcttctcaacaaagggcaatgttggttgaaaagtcacgacagaaacctcaagaaagaatgcgagttgttacagatgctgtaaaaagtaatatgtatgatgatgatccaatcttatcttcatgtggtattgaaattgagaaacaacttactcgtgttgacgctcgtgttctctctgcaccagcgctagttgtgggcaacagtgaagattgcatcccaaacaggggtaggtggaactacaataataagaggctattcgatccagtcaagattgagcgttgggccattgttaatttctctgctcgttgtgacatgagccgaatctcaagagaactgataaactgtggacgcagcaaaggcattttcattgaatgtcctcacagtttggtggatgaggacagccagtctaggagatgttcacctgtggaaagggttgaaaagatgtttgaaaaagtcaaagcaagccttcctggtcctccagagtttctcctttgtcttttaccagagaggaagaattgtgatatttacgggccatggaagaagaaaaatcttcatgaaatgggtattgtcactcaatgcattgctccaagtaataagatgaatgatcaatatttcaccaatgttcttctaaaaattaatgctaagcttggtggaatgaactccaaactggcactggaacatcgtcaaatgataccagttgtgactcaaataccaacattaattcttggcatggatgtttcacatggttctccaggtcgagcagatataccatcaattgctgcggttgttggatctagatgctggccattgatatcacggtacagagcatctgtgcgcacccagtctccaaaggtagagatgattgattctctatttaagccactggatgatgggaaggatgatggcataatgagggaacttctactagacttctaccaaaccagtcaacaaagaaagcctaagcagataatcatcttcagggatggtgttagcgagtctcagtttagccaagtactgaacgtagaacttaatcaaattataaaggcatatcagagtatgggacagggggaccttccgaagttcacagtgatcattgctcaaaagaatcaccacacaaaactcttccaagctgattcaccagagaacgttccacctgggactgttgtggactccggcatagttcatccaagacagtatgatttctacatgtgtgctcatgccggaccaattggtacttcaaggccaacccattaccatgtgttgcttgatgagattggcttctctgcagataatctccagaagctagttctttcactttcatatgtgtaccagaggagcaccactgcgatttctgtggtggcacctatctgttatgcccacctcgcagcagctcagatgggccagttcatgaaatttgaagagtttgcagatacgtcgtcagggagtgtcaattcatcatcgccaccatcaataccagaattgccacggctgcatgctgatgtctgcagttccatgttcttctgttgacgtgattttagtttgaccgttgtggggtagggccaattctttgtgaaaggaaccttaccttatatgttggcacacagcaggctaaccgtttttgtgaagaaaccatgtaggtcgttagttgtcgtatatcgcacgcgtgcatctttttggagcggttttcggctccccccacccacaggtggcggttccgttaggtacagtttccagattttaacgatgctaatacagtaaaagcagtttgtacattctacgcagattttgcagggatacgtggttagatgatctttttgttatgcccagaaatacgtgtgcattggggggttatgaaagtgagctaaatttctgtgcctcgcatggcatccaattgtactcggagattgtgtttgtgctcgatacgcttcctgccactgaaatgcgaaaatgac

SEQ ID NO: 215511 - DNA, 3204 bp, Zea Mays
cttgtttctatttgagctaggtttacattctgattagtggtgtttttaaaattttcctctgcaccttgttagttttttttttgaggaattcactccattccaaattttaagacgttcttcctttccagatagtatggctgccaaaatggctggagctgtccaagtgctcaaggatgacactgttaaacgcacacccatggcacgacctagtaacggccgtgaaggaaagcccattaggttgctgtcgaaccacttctcagtgaagcttagaggagttgatgctgttttctaccaatacagtgtctgcatcaaatctgaggatgataaggtggttgatagcaagggtattggccgaaaggtcatagataaactattgcaaacatactgttctgagcttgatgggaaggattttgcatatgatggagagaaatgtctatttactgtgggacctcttccacagaataactttgagttcactgttatcttggaggaaacatcttcaagggctgctggtggaagtccagtgcatgaaagccctactcaagctaacaaaaagcgagtcaagcgatcacatctggcaaaaaagttcagtgtagacataagttatgccgcaaagattcctcttcagtcggttgctttggctcttcgaggaagcgagtcagaacatggtcaagatgttctgagagtccttgacgttgttttaaggcaacagcaggctaagagaggttgtctacttgttagacagtcatttttcagtgatgatagtcgaaaccttgttgatttaactggtggagttagtggttgtcgtggactccactctagtttccgtactacaattggtggtctttcactaaatatggatgtttcaaccactatggttgtaactcctggaccagttattgattttctcgtcacaaatcaaaatgtaagagacatcagagatattgactggcccagggccaagaaaatgcttaaaaatctcagagttaaagctaagcacaacaacatggagttcaagattattggccttagtgatcaaccatgctctagacagatgttcccaatgaaagttcgaaatggaaacatcgaaattaaatctgttgatatcactgttcaggattattttaaatccaagcaagttgagctaacaatgccttatctgccatgtcttgatgtgggaaaaccaaaacgccctaattatctcccaattgagttatgccacatggtatcacttcaacgttatacaaaggcactgtcttctcaacaaagggcaatgttggttgaaaagtcacgacagaaacctcaagaaagaatgcgagttgttacagatgctgtaaaaagtaatatgtatgatgatgatccaatcttatcttcatgtggtattgaaattgagaaacaacttactcgtgttgacgctcgtgttctctctgcaccagcgctagttgtgggcaacagtgaagattgcatcccaaacaggggtaggtggaactacaataataagaggctattcgatccagtcaagattgagcgttgggccattgttaatttctctgctcgttgtgacatgagccgaatctcaagagaactgataaactgtggacgcagcaaaggcattttcattgaatgtcctcacagtttggtggatgaggacagccagtctaggagatgttcacctgtggaaagggttgaaaagatgtttgaaaaagtcaaagcaagccttcctggtcctccagagtttctcctttgtcttttaccagagaggaagaattgtgatatttacgggccatggaagaagaaaaatcttcatgaaatgggtattgtcactcaatgcattgctccaagtaataagatgaatgatcaatatttcaccaatgttcttctaaaaattaatgctaagcttggtggaatgaactccaaactggcactggaacatcgtcaaatgataccagttgtgactcaaataccaacattaattcttggcatggatgtttcacatggttctccaggtcgagcagatataccatcaattgctgcggttgttggatctagatgctggccattgatatcacggtacagagcatctgtgcgcacccagtctccaaaggtagagatgattgattctctatttaagccactggatgatgggaaggatgatggcataatgagggaacttctactagacttctaccaaaccagtcaacaaagaaagcctaagcagataatcatcttcagggatggtgttagcgagtctcagtttagccaagtactgaacgtagaacttaatcaaattataaaggcatatcagagtatgggacagggggaccttccgaagttcacagtgatcattgctcaaaagaatcaccacacaaaactcttccaagctgattcaccagagaacgttccacctgggactgttgtggactccggcatagttcatccaagacagtatgatttctacatgtgtgctcatgccggaccaattggtacttcaaggccaacccattaccatgtgttgcttgatgagattggcttctctgcagataatctccagaagctagttctttcactttcatatgtgtaccagaggagcaccactgcgatttctgtggtggcacctatctgttatgcccacctcgcagcagctcagatgggccagttcatgaaatttgaagagtttgcagatacgtcgtcagggagtgtcaattcatcatcgccaccatcaataccagaattgccacggctgcatgctgatgtctgcagttccatgttcttctgttgacgtgattttagtttgaccgttgtggggtagggccaattctttgtgaaaggaaccttaccttatatgttggcacacagcaggctaaccgtttttgtgaagaaaccatgtaggtcgttagttgtcgtatatcgcacgcgtgcatctttttggagcggttttcggctccccccacccacaggtggcggttccgttaggtacagtttccagattttaacgatgctaatacagtaaaagcagtttgtacattctacgcagattttgcagggatacgtggttagatgatctttttgttatgcccagaaatacgtgtgcattggggggttatgaaagtgagctaaatttctgtgcctcgcatggcatccaattgtactcggagattgtgtttgtgctcgatacgcttcctgccactgaaatgcgaaaatgac

SEQ ID NO: 215512 - DNA, 3402 bp, Zea Mays
cgaactgctggaccggagatggcctaaacatagggtttagaccgttgccgtccctactcccgcctagccgaccccactcgtcccagtcccagtcccagtccgccgcctggttccttcttgctcttccctccactctctacagacgcagattgacaaggaagagagagagaggccgaggggaggaggcgtcgtcgtcttcttctgaatgcctgaacttttatttggattccagatagtatggctgccaaaatggctggagctgtccaagtgctcaaggatgacactgttaaacgcacacccatggcacgacctagtaacggccgtgaaggaaagcccattaggttgctgtcgaaccacttctcagtgaagcttagaggagttgatgctgttttctaccaatacagtgtctgcatcaaatctgaggatgataaggtggttgatagcaagggtattggccgaaaggtcatagataaactattgcaaacatactgttctgagcttgatgggaaggattttgcatatgatggagagaaatgtctatttactgtgggacctcttccacagaataactttgagttcactgttatcttggaggaaacatcttcaagggctgctggtggaagtccagtgcatgaaagccctactcaagctaacaaaaagcgagtcaagcgatcacatctggcaaaaaagttcagtgtagacataagttatgccgcaaagattcctcttcagtcggttgctttggctcttcgaggaagcgagtcagaacatggtcaagatgttctgagagtccttgacgttgttttaaggcaacagcaggctaagagaggttgtctacttgttagacagtcatttttcagtgatgatagtcgaaaccttgttgatttaactggtggagttagtggttgtcgtggactccactctagtttccgtactacaattggtggtctttcactaaatatggatgtttcaaccactatggttgtaactcctggaccagttattgattttctcgtcacaaatcaaaatgtaagagacatcagagatattgactggcccagggccaagaaaatgcttaaaaatctcagagttaaagctaagcacaacaacatggagttcaagattattggccttagtgatcaaccatgctctagacagatgttcccaatgaaagttcgaaatggaaacatcgaaattaaatctgttgatatcactgttcaggattattttaaatccaagcaagttgagctaacaatgccttatctgccatgtcttgatgtgggaaaaccaaaacgccctaattatctcccaattgagttatgccacatggtatcacttcaacgttatacaaaggcactgtcttctcaacaaagggcaatgttggttgaaaagtcacgacagaaacctcaagaaagaatgcgagttgttacagatgctgtaaaaagtaatatgtatgatgatgatccaatcttatcttcatgtggtattgaaattgagaaacaacttactcgtgttgacgctcgtgttctctctgcaccagcgctagttgtgggcaacagtgaagattgcatcccaaacaggggtaggtggaactacaataataagaggctattcgatccagtcaagattgagcgttgggccattgttaatttctctgctcgttgtgacatgagccgaatctcaagagaactgataaactgtggacgcagcaaaggcattttcattgaatgtcctcacagtttggtggatgaggacagccagtctaggagatgttcacctgtggaaagggttgaaaagatgtttgaaaaagtcaaagcaagccttcctggtcctccagagtttctcctttgtcttttaccagagaggaagaattgtgatatttacgggccatggaagaagaaaaatcttcatgaaatgggtattgtcactcaatgcattgctccaagtaataagatgaatgatcaatatttcaccaatgttcttctaaaaattaatgctaagcttggtggaatgaactccaaactggcactggaacatcgtcaaatgataccagttgtgactcaaataccaacattaattcttggcatggatgtttcacatggttctccaggtcgagcagatataccatcaattgctgcgtctcatagtttaaatgaacagcaagcacaataagttgcactatatctagggaacaccaacatgaatgttatggcgaatgcgccgaagtgttgcggttgttggatctagatgctggccattgatatcacggtacagagcatctgtgcgcacccagtctccaaaggtagagatgattgattctctatttaagccactggatgatgggaaggatgatggcataatgagggaacttctactagacttctaccaaaccagtcaacaaagaaagcctaagcagataatcatcttcagggatggtgttagcgagtctcagtttagccaagtactgaacgtagaacttaatcaaattataaaggcatatcagagtatgggacagggggaccttccgaagttcacagtgatcattgctcaaaagaatcaccacacaaaactcttccaagctgattcaccagagaacgttccacctgggactgttgtggactccggcatagttcatccaagacagtatgatttctacatgtgtgctcatgccggaccaattggtacttcaaggccaacccattaccatgtgttgcttgatgagattggcttctctgcagataatctccagaagctagttctttcactttcatatgtgtaccagaggagcaccactgcgatttctgtggtggcacctatctgttatgcccacctcgcagcagctcagatgggccagttcatgaaatttgaagagtttgcagatacgtcgtcagggagtgtcaattcatcatcgccaccatcaataccagaattgccacggctgcatgctgatgtctgcagttccatgttcttctgttgacgtgattttagtttgaccgttgtggggtagggccaattctttgtgaaaggaaccttaccttatatgttggcacacagcaggctaaccgtttttgtgaagaaaccatgtaggtcgttagttgtcgtatatcgcacgcgtgcatctttttggagcggttttcggctccccccacccacaggtggcggttccgttaggtacagtttccagattttaacgatgctaatacagtaaaagcagtttgtacattctacgcagattttgcagggatacgtggttagatgatctttttgttatgcccagaaatacgtgtgcattggggggttatgaaagtgagctaaatttctgtgcctcgcatggcatccaattgtactcggagattgtgtttgtgctcgatacgcttcctgccactgaaatgcgaaaatgac

SEQ ID NO: 215513 - DNA, 3275 bp, Zea Mays
cgaactgctggaccggagatggcctaaacatagggtttagaccgttgccgtccctactcccgcctagccgaccccactcgtcccagtcccagtcccagtccgccgcctggttccttcttgctcttccctccactctctacagacgcagattgacaaggaagagagagagaggccgaggggaggaggcgtcgtcgtcttcttctgaatgcctgaacttttatttggattccagatagtatggctgccaaaatggctggagctgtccaagtgctcaaggatgacactgttaaacgcacacccatggcacgacctagtaacggccgtgaaggaaagcccattaggttgctgtcgaaccacttctcagtgaagcttagaggagttgatgctgttttctaccaatacagtgtctgcatcaaatctgaggatgataaggtggttgatagcaagggtattggccgaaaggtcatagataaactattgcaaacatactgttctgagcttgatgggaaggattttgcatatgatggagagaaatgtctatttactgtgggacctcttccacagaataactttgagttcactgttatcttggaggaaacatcttcaagggctgctggtggaagtccagtgcatgaaagccctactcaagctaacaaaaagcgagtcaagcgatcacatctggcaaaaaagttcagtgtagacataagttatgccgcaaagattcctcttcagtcggttgctttggctcttcgaggaagcgagtcagaacatggtcaagatgttctgagagtccttgacgttgttttaaggcaacagcaggctaagagaggttgtctacttgttagacagtcatttttcagtgatgatagtcgaaaccttgttgatttaactggtggagttagtggttgtcgtggactccactctagtttccgtactacaattggtggtctttcactaaatatggatgtttcaaccactatggttgtaactcctggaccagttattgattttctcgtcacaaatcaaaatgccaagaaaatgcttaaaaatctcagagttaaagctaagcacaacaacatggagttcaagattattggccttagtgatcaaccatgctctagacagatgttcccaatgaaagttcgaaatggaaacatcgaaattaaatctgttgatatcactgttcaggattattttaaatccaagcaagttgagctaacaatgccttatctgccatgtcttgatgtgggaaaaccaaaacgccctaattatctcccaattgagttatgccacatggtatcacttcaacgttatacaaaggcactgtcttctcaacaaagggcaatgttggttgaaaagtcacgacagaaacctcaagaaagaatgcgagttgttacagatgctgtaaaaagtaatatgtatgatgatgatccaatcttatcttcatgtggtattgaaattgagaaacaacttactcgtgttgacgctcgtgttctctctgcaccagcgctagttgtgggcaacagtgaagattgcatcccaaacaggggtaggtggaactacaataataagaggctattcgatccagtcaagattgagcgttgggccattgttaatttctctgctcgttgtgacatgagccgaatctcaagagaactgataaactgtggacgcagcaaaggcattttcattgaatgtcctcacagtttggtggatgaggacagccagtctaggagatgttcacctgtggaaagggttgaaaagatgtttgaaaaagtcaaagcaagccttcctggtcctccagagtttctcctttgtcttttaccagagaggaagaattgtgatatttacgggccatggaagaagaaaaatcttcatgaaatgggtattgtcactcaatgcattgctccaagtaataagatgaatgatcaatatttcaccaatgttcttctaaaaattaatgctaagcttggtggaatgaactccaaactggcactggaacatcgtcaaatgataccagttgtgactcaaataccaacattaattcttggcatggatgtttcacatggttctccaggtcgagcagatataccatcaattgctgcggttgttggatctagatgctggccattgatatcacggtacagagcatctgtgcgcacccagtctccaaaggtagagatgattgattctctatttaagccactggatgatgggaaggatgatggcataatgagggaacttctactagacttctaccaaaccagtcaacaaagaaagcctaagcagataatcatcttcagggatggtgttagcgagtctcagtttagccaagtactgaacgtagaacttaatcaaattataaaggcatatcagagtatgggacagggggaccttccgaagttcacagtgatcattgctcaaaagaatcaccacacaaaactcttccaagctgattcaccagagaacgttccacctgggactgttgtggactccggcatagttcatccaagacagtatgatttctacatgtgtgctcatgccggaccaattggtacttcaaggccaacccattaccatgtgttgcttgatgagattggcttctctgcagataatctccagaagctagttctttcactttcatatgtgtaccagaggagcaccactgcgatttctgtggtggcacctatctgttatgcccacctcgcagcagctcagatgggccagttcatgaaatttgaagagtttgcagatacgtcgtcagggagtgtcaattcatcatcgccaccatcaataccagaattgccacggctgcatgctgatgtctgcagttccatgttcttctgttgacgtgattttagtttgaccgttgtggggtagggccaattctttgtgaaaggaaccttaccttatatgttggcacacagcaggctaaccgtttttgtgaagaaaccatgtaggtcgttagttgtcgtatatcgcacgcgtgcatctttttggagcggttttcggctccccccacccacaggtggcggttccgttaggtacagtttccagattttaacgatgctaatacagtaaaagcagtttgtacattctacgcagattttgcagggatacgtggttagatgatctttttgttatgcccagaaatacgtgtgcattggggggttatgaaagtgagctaaatttctgtgcctcgcatggcatccaattgtactcggagattgtgtttgtgctcgatacgcttcctgccactgaaatgcgaaaatgac

SEQ ID NO: 215514 - DNA, 3287 bp, Zea Mays
cgaactgctggaccggagatggcctaaacatagggtttagaccgttgccgtccctactcccgcctagccgaccccactcgtcccagtcccagtcccagtccgccgcctggttccttcttgctcttccctccactctctacagacgcagattgacaaggaagagagagagaggccgaggggaggaggcgtcgtcgtcttcttctgaatgcctgaactatggctgccaaaatggctggagctgtccaagtgctcaaggatgacactgttaaacgcacacccatggcacgacctagtaacggccgtgaaggaaagcccattaggttgctgtcgaaccacttctcagtgaagcttagaggagttgatgctgttttctaccaatacagtgtctgcatcaaatctgaggatgataaggtggttgatagcaagggtattggccgaaaggtcatagataaactattgcaaacatactgttctgagcttgatgggaaggattttgcatatgatggagagaaatgtctatttactgtgggacctcttccacagaataactttgagttcactgttatcttggaggaaacatcttcaagggctgctggtggaagtccagtgcatgaaagccctactcaagctaacaaaaagcgagtcaagcgatcacatctggcaaaaaagttcagtgtagacataagttatgccgcaaagattcctcttcagtcggttgctttggctcttcgaggaagcgagtcagaacatggtcaagatgttctgagagtccttgacgttgttttaaggcaacagcaggctaagagaggttgtctacttgttagacagtcatttttcagtgatgatagtcgaaaccttgttgatttaactggtggagttagtggttgtcgtggactccactctagtttccgtactacaattggtggtctttcactaaatatggatgtttcaaccactatggttgtaactcctggaccagttattgattttctcgtcacaaatcaaaatgtaagagacatcagagatattgactggcccagggccaagaaaatgcttaaaaatctcagagttaaagctaagcacaacaacatggagttcaagattattggccttagtgatcaaccatgctctagacagatgttcccaatgaaagttcgaaatggaaacatcgaaattaaatctgttgatatcactgttcaggattattttaaatccaagcaagttgagctaacaatgccttatctgccatgtcttgatgtgggaaaaccaaaacgccctaattatctcccaattgagttatgccacatggtatcacttcaacgttatacaaaggcactgtcttctcaacaaagggcaatgttggttgaaaagtcacgacagaaacctcaagaaagaatgcgagttgttacagatgctgtaaaaagtaatatgtatgatgatgatccaatcttatcttcatgtggtattgaaattgagaaacaacttactcgtgttgacgctcgtgttctctctgcaccagcgctagttgtgggcaacagtgaagattgcatcccaaacaggggtaggtggaactacaataataagaggctattcgatccagtcaagattgagcgttgggccattgttaatttctctgctcgttgtgacatgagccgaatctcaagagaactgataaactgtggacgcagcaaaggcattttcattgaatgtcctcacagtttggtggatgaggacagccagtctaggagatgttcacctgtggaaagggttgaaaagatgtttgaaaaagtcaaagcaagccttcctggtcctccagagtttctcctttgtcttttaccagagaggaagaattgtgatatttacgggccatggaagaagaaaaatcttcatgaaatgggtattgtcactcaatgcattgctccaagtaataagatgaatgatcaatatttcaccaatgttcttctaaaaattaatgctaagcttggtggaatgaactccaaactggcactggaacatcgtcaaatgataccagttgtgactcaaataccaacattaattcttggcatggatgtttcacatggttctccaggtcgagcagatataccatcaattgctgcggttgttggatctagatgctggccattgatatcacggtacagagcatctgtgcgcacccagtctccaaaggtagagatgattgattctctatttaagccactggatgatgggaaggatgatggcataatgagggaacttctactagacttctaccaaaccagtcaacaaagaaagcctaagcagataatcatcttcagggatggtgttagcgagtctcagtttagccaagtactgaacgtagaacttaatcaaattataaaggcatatcagagtatgggacagggggaccttccgaagttcacagtgatcattgctcaaaagaatcaccacacaaaactcttccaagctgattcaccagagaacgttccacctgggactgttgtggactccggcatagttcatccaagacagtatgatttctacatgtgtgctcatgccggaccaattggtacttcaaggccaacccattaccatgtgttgcttgatgagattggcttctctgcagataatctccagaagctagttctttcactttcatatgtgtaccagaggagcaccactgcgatttctgtggtggcacctatctgttatgcccacctcgcagcagctcagatgggccagttcatgaaatttgaagagtttgcagatacgtcgtcagggagtgtcaattcatcatcgccaccatcaataccagaattgccacggctgcatgctgatgtctgcagttccatgttcttctgttgacgtgattttagtttgaccgttgtggggtagggccaattctttgtgaaaggaaccttaccttatatgttggcacacagcaggctaaccgtttttgtgaagaaaccatgtaggtcgttagttgtcgtatatcgcacgcgtgcatctttttggagcggttttcggctccccccacccacaggtggcggttccgttaggtacagtttccagattttaacgatgctaatacagtaaaagcagtttgtacattctacgcagattttgcagggatacgtggttagatgatctttttgttatgcccagaaatacgtgtgcattggggggttatgaaagtgagctaaatttctgtgcctcgcatggcatccaattgtactcggagattgtgtttgtgctcgatacgcttcctgccactgaaatgcgaaaatgac
